(19) United States
(12) Patent Application Publication
(10) Pub. No.: US 2005/0221354 A1
(43) Pub. Date: Oct. 6, 2005

(54) Nucleic acid arrays for monitoring expression profiles of drug target genes

(75) Inventor: William Martin Mounts, Andover, MA (US)

Correspondence Address: NIXON PEABODY LP, 401 9TH STREET, N.W., SUITE 900, WASHINGTON, DC, 20004, US

(73) Assignee: Wyeth, Madison, NJ (US)

(21) Appl. No.: 11/060,756

(22) Filed: Feb. 18, 2005

Related U.S. Application Data
(60) Provisional application No. 60/545,213, filed on Feb. 18, 2004.

(51) Int. Cl. C12Q 1/68; C12M 1/34

(52) U.S. Cl. 435/6; 435/287.2

(57) ABSTRACT

The present invention provides nucleic acid arrays and methods of using the same for detecting or monitoring expression profiles of drug target genes. Non-limiting examples of drug target genes include kinase genes, phosphatase genes, protease genes, G-protein coupled receptor genes, nuclear hormone receptor genes, and ion channel genes. The present invention also provides methods of using nucleic acid arrays for the identification or validation of drugs or drug targets. In one embodiment, a nucleic acid array of the present invention is concentrated with probes for drug target genes. These probes constitute a substantial portion of all of the polynucleotide probes that are stably attached to the nucleic acid array, and can hybridize under stringent or nucleic acid array hybridization conditions to the tiling sequences selected from Attachment C, or the complements thereof.

### RELATED APPLICATIONS

[0001] This application claims the benefit and incorporates by reference the entire disclosure of U.S. Provisional Application Ser. No. 60/545,213, entitled “Nucleic Acid Arrays for Monitoring Expression Profiles of Drug Target Genes,” which was filed on Feb. 18, 2004.

[0002] All materials on the compact discs labeled “Copy 1” and “Copy 2” are incorporated herein by reference in their entireties. Each of the compact discs includes the following files: “Attachment A—Consensus Sequences.txt” (208 KB, created Jan. 7, 2004), “Attachment B—Exemplar Sequences.txt” (560 KB, created Jan. 7, 2004), “Attachment C—Tiling Sequences.txt” (759 KB, created Jan. 7, 2004), “Attachment D—Location of Tiling Sequences in Corresponding Parent Sequences.txt” (163 KB, created Jan. 8, 2004), “Attachment E—Gene Class.txt” (100 KB, created Jan. 8, 2004), “Attachment F—Probes.txt” (5,473 KB, created Jan. 8, 2004), “Attachment G—Probes.txt” (9,132 KB, created Jan. 7, 2004), and “Sequence Listing.ST25.txt” (51,515 KB, created Jan. 21, 2005).

### TECHNICAL FIELD

[0003] The present invention relates to nucleic acid arrays and methods of using the same for detecting or monitoring expression profiles of drug target genes. The present invention also relates to methods for the identification or validation of drugs or drug targets.

### BACKGROUND

[0004] Numerous assays are available for evaluating the effects of drug candidates on gene expression. These assays, however, frequently generate excessive information that is irrelevant to the actions of drug candidates. For example, an Affymetrix Human Genome U133 Set contains probe sets for approximately 33,000 human genes. A global gene expression analysis using this microarray may generate hundreds if not thousands of genes whose expression profiles appear to be modulated by a drug candidate. Many of these genes, however, have little therapeutic value, and the identification and removal of these genes are laborious and time-consuming. Moreover, whole genome microarrays are expensive, and the number of probes for each transcript on a whole genome microarray is often limited, compromising the reliability and reproducibility of probe set signal values.

### SUMMARY OF THE INVENTION

[0005] The present invention features nucleic acid arrays that are concentrated with probes for drug target genes. The manufacturing costs of these nucleic acid arrays can be significantly less than those of traditional whole genome microarrays. The sizes of these nucleic acid arrays can also be reduced, resulting in less sample usage and lower reagent costs per experiment. In addition, the number of probes for each transcript on a nucleic acid array of the present invention can be significantly increased, leading to a more robust overall probe set signal value and substantially improving the reliability and reproducibility of the detection. All of these features allows for cost-effective expression profiling of drug target genes, thereby facilitating the process of drug discovery and development.

[0006] In one aspect, a substantial portion of all polynucleotide probes on a nucleic acid array of the present invention consists of probes for drug target genes. These probes can hybridize under stringent or nucleic acid array hybridization conditions to the RNA transcripts, or the complements thereof, of drug target genes. Examples of drug target genes that are amenable to the present invention include, but are not limited to, kinase genes, phosphatase genes, protease genes, G-protein coupled receptor genes, nuclear hormone receptor genes, and ion channel genes.

[0007] In one embodiment, the drug target gene probes constitute at least 15%, 20%, 25%, 30%, 35%, 40%, 45%, 50%, or more of all of the polynucleotide probes that are stably attached to a nucleic acid array of the present invention. In another embodiment, the drug target gene probes constitute at least 30%, 40%, 50%, 60%, 70%, 80%, 90%, or 100% of all of the perfect match probes that are stably attached to a nucleic acid array of the present invention. In many instances, a nucleic acid array of the present invention also includes mismatch probes for each drug target gene probe on the array.

[0008] In still another embodiment, multiple classes of drug target genes can be detected by a nucleic acid array of the present invention, and the nucleic acid array includes at least 1, 2, 5, 10, 20, 30, 40, 50, 100, 200, 300, 400, 500, or more probes for each class of drug target genes. In one example, the nucleic acid array includes one or more probes for an ADAMTS4 gene which encodes a disintegrin-like and metalloprotease with thrombospondin type 1 motif, 4.

[0009] In still yet another embodiment, a nucleic acid array of the present invention includes at least 1, 2, 5, 10, 50, 100, 150, 200, 250, 500, 1,000, 2,000, 3,000 or more probes, each of which is capable of hybridizing under stringent or nucleic acid array hybridization conditions to a different respective tiling sequence selected from Attachment C (SEQ ID NOs: 4,273-8,544), or the complement thereof. In one example, a nucleic acid array of the present invention includes at least one probe for each tiling sequence selected from Attachment C, or the complement thereof.

[0010] In yet another embodiment, a nucleic acid array of the present invention includes at least 1, 2, 5, 10, 15, 20, 25, 30, 35, 40, 45, 50, 55, 60, 65, 70, or more probes for each drug target gene or tiling sequence of interest. In one example, a nucleic acid array of the present invention includes at least from 35 to 68 probes for each drug target gene or tiling sequence of interest.

[0011] In still another embodiment, a nucleic acid array of the present invention includes at least 1, 2, 5, 10, 50, 100, 150, 200, 250, 500, 1,000, 2,000, 3,000 or more probes selected from Attachment F (SEQ ID NOs: 8,647-116,337), or the complements thereof In one example, the nucleic acid array includes each and every probe selected from Attachment F, or the complement thereof.

[0012] The nucleic acid arrays of the present invention can include 1, 2, 3, 4, 5, or more substrate supports. In one embodiment, all of the polynucleotide probes on a nucleic acid array are attached to a single substrate support. In another embodiment, the nucleic acid array is a bead array which includes numerous beads that are stably associated with probes for drug target genes.

[0013] In another aspect, the present invention provides methods for the detection, identification, or evaluation of agents that are capable of modulating expression profiles of drug target genes. These methods include the steps of contacting one or more cells with a candidate molecule, preparing a nucleic acid sample from the cell(s), and hybridizing the nucleic acid sample to a nucleic acid array of the present invention to detect any change in hybridization signals before and after the contact. A change in the hybridization signals is indicative that the candidate compound is capable of modulating the expression profiles of drug target genes.

[0014] In one embodiment, the change in the hybridization signals is a result of modulation of the transcription or translation of a drug target gene of interest. The change in the hybridization signals can also be a result of modulation of the expression or function of another gene or gene product, which in turn alters the expression of the drug target gene.

[0015] The agents identified by the present invention can be used to teat mammals in need thereof. In many instances, a drug target gene is abnormally expressed in a mammal that is to be treated, and an agent capable of modulating the expression profile of the drug target gene is identified and used to correct or alleviate the abnormality in the mammal.

[0016] In yet another aspect, the present invention provides other methods for the detection, identification, or evaluation of agents that are capable of modulating expression profiles of drug target genes. These methods include the steps of administering a candidate molecule to a human or animal, preparing a nucleic acid sample from the human or animal, and hybridizing the nucleic acid sample to a nucleic acid array of the present invention to detect any change in hybridization signals before and after the administration. A change in the hybridization signals is indicative that the candidate compound is capable of modulating the expression profiles of drug target genes in the human or animal.

[0017] In still yet another aspect, the present invention provides methods for making nucleic acid arrays. The methods include the steps of (1) selecting numerous polynucleotides, each polynucleotide capable of hybridizing under stringent or nucleic acid array hybridization conditions to a different respective drug target gene, and (2) stably attaching the selected polynucleotides to one or more substrate supports to create a nucleic acid array, where the selected polynucleotides constitute a substantial portion of all of the polynucleotide probes that are stably attached to the nucleic acid array.

[0018] The present invention also features protein arrays for detecting or-monitoring expression profiles of drug target genes. Each protein array of the present invention includes probes which can specifically bind to protein products of human drug target genes. In one embodiment, the probes on a protein array of the present invention are antibodies. In another embodiment, a substantial portion of all of the probes on a protein array of the present invention consists of antibodies for the protein products encoded by the parent sequences selected from Attachments A or B.

[0019] In addition, the present invention also features polynucleotide collections. In one embodiment, a polynucleotide collection includes at least 1, 2, 3, 4, 5, 10, 20, 50, 100, 200, 500, 1,000, or more probes capable of hybridizing under stringent or nucleic acid array hybridization conditions to the corresponding tiling sequences selected from Attachment C, or the complements thereof. In another embodiment, the polynucleotide collection includes at least 1, 2, 3, 4, 5, 10, 20, 50, 100, 200, 500, 1,000, or more tiling sequences selected from Attachment C, or the complements thereof. In yet another embodiment, a polynucleotide collection includes at least 1, 2, 3, 4, 5, 10, 20, 50, 100, 200, 500, 1,000, or more sequences selected from SEQ ID NOs: 1-4,272, or the complements thereof.

[0020] Other features, objects, and advantages of the present invention are apparent in the detailed description that follows. It should be understood, however, that the detailed description, while indicating preferred. embodiments of the invention, is given by way of illustration only, not limitation. Various changes and modifications within the scope of the invention will become apparent to those skilled in the art from the detailed description.

### DETAILED DESCRIPTION

[0021] The present invention provides nucleic acid arrays that are concentrated with probes for drug target genes. In one embodiment, a substantial portion of all of the polynucleotide probes that are stably attached to a nucleic acid array of the present invention consists of probes for drug target genes. These probes can hybridize under stringent or nucleic acid array hybridization conditions to the RNA transcripts, or the complements thereof, of drug target genes. Exemplary drug target genes include, but are not limited to, genes that encode kinases, phosphatases, proteases, G-protein coupled receptors, nuclear hormone receptors, or ion channels. In another embodiment, a substantial portion of all of the polynucleotide probes that are stably attached to a nucleic acid array of the present invention is capable of hybridizing under stringent or nucleic acid array hybridization conditions to the tiling sequences selected from Attachment C (SEQ ID NOs: 4,273-8,544), or the complements thereof. The nucleic acid arrays of the present invention can also include probes for non-drug target genes.

[0022] In many cases, the use of the nucleic acid arrays of the present invention reduces or eliminates the painstaking process for identifying or removing signals that are not associated with drug target genes. In addition, by using a less number of genes, the present invention reduces the costs associated with the manufacture and use of nucleic acid arrays.

[0023] The following sections focus on the creation of nucleic acid arrays that are suitable for detecting or monitoring the expression profiles of human drug target genes. As appreciated by those skilled in the art, the same methodology can be readily adapted to making nucleic acid arrays for expression profiling of animal drug target genes. Exemplary animals include, but are not limited to, primates, rodents, rabbits, canines, nematode worms, fruit flies, and frogs. A nucleic acid array of the present invention can also include probes for drug target genes of different species (e.g., including probes for human drug target genes as well as probes for animal drug target genes). As used herein, the term “or” means “and/or” unless stated otherwise.

A. Collection of mRNA, cDNA, and other Coding or Non-Coding Sequences of Human Drug Target Genes

[0024] Drug target genes include genes whose functions or expressions can be modified by drugs. As used herein, a drug can be any compound of any degree of complexity that is capable of modulating a biological system to achieve a desirable effect, whether by known or unknown mechanisms and whether used therapeutically or not. Examples of drugs include, but are not limited to, small molecules with therapeutic effects; naturally-occurring factors or their analogs, such as endocrine, paracrine, or autocrine factors, or factors interacting with cell receptors of all types; and intracellular factors or their analogs, such as elements of intracellular signaling pathways. The biological effect of a drug can be, without limitation, a consequence of drug-mediated changes in the rate or extent of transcription or translation of one or more genes, the degradation or processing of one or more RNA transcripts, the degradation or post-translational modification of one or more proteins, or the inhibition or stimulation of the action or activity of one or more proteins.

[0025] Examples of drug target genes that can be assessed according to the present invention include, but are not limited to, kinase genes, phosphatase genes, protease genes, G-protein coupled receptor genes, nuclear hormone receptor genes, and ion channel genes. These genes have been the major targets for drug action and development. Many products of these genes play important roles in intercellular communication and signal transduction pathways.

[0026] Protein kinases are key components of many signal transduction pathways. Malfunctions of protein kinases have been associated with a wide variety of diseases. A large number of therapeutic strategies have been based on compounds that can activate or inactivate specified protein kinases. For instance, a year 2002 survey of ongoing clinical trials in the United States showed that more than 100 clinical trials involved the modulation of kinases. These clinical trials were directed to a broad spectrum of therapeutic indications, including asthma, Parkinson's, inflammation, psoriasis, rheumatoid arthritis, spinal cord injuries, muscle conditions, osteoporosis, graft versus host disease, cardiovascular disorders, autoimmune disorders, retinal detachment, stroke, epilepsy, ischemia/reperfusion, breast cancer, ovarian cancer, glioblastoma, non-Hodgkin's lymphoma, colorectal cancer, non-small cell lung cancer, brain cancer, Kaposi's sarcoma, pancreatic cancer, liver cancer, and other tumors. Numerous modulators of kinase activities have been investigated in clinical trials. They include, for example, antisense oligonucleotides, antibodies, naturally-occurring molecules or their analogs, and other DNA/RNA molecules that are used in gene-based or RNA-based therapies.

[0027] Protein kinases include, but are not limited to, cAMP dependent protein kinases (PKAs), Ca²⁺ and phospholipid-dependent protein kinases (PKCs), mitogen-activated protein (MAP) kinases, Ca²⁺/calmodulin dependent protein kinases, cyclin-dependent kinases (CDKs), DNA-dependent protein kinase (DNA-PK), and protein tyrosine kinases (PTKs). cAMP dependent protein kinases (PKAs) are a family of serine/threonine kinases. Altered PKA expression has been implicated in numerous disorders or diseases, including tumors, thyroid disorders, diabetes, atherosclerosis, and cardiovascular diseases. Known regulators of PKAs include various inhibitors or activators of adenylate cyclase, which controls cAMP levels in cells.

[0028] Ca²⁺ and phospholipid-dependent protein kinases (PKCs) are another family of serine/threonine kinases. PKCs have been implicated in cell proliferation and differentiation, apoptosis, neurotransmission, and long-term potentiation. Changes in PKC activities have also been implicated in hyperglycemia and the vascular complications of diabetes. Different isoforms of PKC require different activation requirements. For instance, activation of isoforms α, β and γ requires phosphatidylserine, diacylglycerol, and Ca²⁺, while activation of other isoforms may require phosphatidylserine or diacylglycerol, but not Ca²⁺.

[0029] Mitogen-activated protein (MAP) kinases are also a family of serine/threonine kinases. MAP kinases mediate signal transduction to the nucleus in response to diverse extracellular stimuli. They also regulate intracellular signaling pathways. MAP kinases have been implicated in inflammation, apoptosis, cell proliferation and differentiation, response to cellular stress, and carcinogenesis. At least three different MAP kinase signal transduction pathways have been identified. They are the ERK1/2 mediated pathway, the JNK/SAPK mediated pathway, and the p38 kinase mediated pathway. The extracellular stimuli capable of activating the MAP kinase signaling pathways include epidermal growth factor (EGF), ultraviolet radiation, hyperosmolar medium, heat shock, endotoxic lipopolysaccharide (LPS), insulin, insulin-like growth factor 1 (IGF-1), and pro-inflammatory cytokines, such as tumor necrosis factor (TNF) and interleukin-1 (IL-1).

[0030] Ca²⁺/calmodulin dependent protein kinases are involved in regulation of smooth muscle contraction (e.g., MLC kinase), glycogen breakdown (e.g., phosphorylase kinase), and neurotransmission (e.g., CaM kinase I and. CaM kinase II). These kinases are members of a serine/threonine kinase family. They can phosphorylate a variety of substrates, such as synapsin I and II, the cystic fibrosis conductance regulator protein, CFTR (a chloride ion channel that is defective in patients with cystic fibrosis), CREB (cAMP responsive element binding protein), and other transcription factors. The deletion of Ca²⁺/calmodulin dependent protein kinase II in mice produces behavioral abnormalities including increased defensive aggression and decreased fear response. In addition, it has been indicated that Ca²⁺/calmodulin dependent protein kinases are required for long-term potentiation. For example, mice with mutated Ca²⁺/calmodulin dependent protein kinase II have impaired learning ability.

[0031] Cyclin-dependent kinases (CDKs) are a family of serine/threonine kinases that control the mitotic process. Exemplary members of this family include cdc2 which regulates the transition from G2 to M phase. Activation of CDKs requires multiple inputs. In addition to the binding of cyclin, CDK activation requires phosphorylation as well as dephosphorylation of specific residues. CDK defects have been observed in various cancer phenotypes, making CDKs important targets for new cancer treatment drugs.

[0032] DNA-dependent protein kinases (DNA-PKs) are nuclear serine/threonine kinases. They have been implicated in double-stranded DNA repair and protection, modification of chromatin structure, and maintenance of telomeres. Cells with defective DNA-PK activities lack the ability to repair radiation-induced DNA breaks and therefore are sensitive to ultraviolet and ionizing radiation. Moreover, it has been shown that inhibition of DNA-PK can increase the efficacy of anti-tumor treatment with radiation or chemotherapeutic agents.

[0033] Protein tyrosine kinases (PTKs) are involved in numerous cellular events, including cell proliferation and differentiation, apoptosis, cell cycle regulation, signal transduction from extracellular stimuli to intracellular targets, T cell activation, B cell activation, and hematopoiesis. PTK defects or deficiencies have been implicated in a wide range of diseases, such as breast cancer, prostate cancer, leukemia, glioma, squamous cell carcinoma, colon cancer, multiple endocrine neoplasia, medullary thyroid cancer, epithelial cell cancer, Hirschsprung's disease, Bruton's disease, psoriasis, diabetes, and autoimmune diseases. PTKs can be divided into two classes—namely, the transmembrane PTKs and the non-transmembrane PTKs.

[0034] The transmembrane PTKs are receptors for most growth factors. Binding of a growth factor to a receptor PTK can activate the PTK or other proteins by phosphorylation. Growth factors capable of activating receptor PTKs include, but are not limited to, epidermal growth factor (EGF), platelet-derived growth factor (PDGF), fibroblast growth factor (FGF), hepatocyte growth factor (HGF), insulin and insulin-like growth factors (IGF), nerve growth factor (NGF), vascular endothelial growth factor (VEGF), and macrophage colony stimulating factor (CSF).

[0035] In addition to the above-described kinases, other protein kinase genes can also be the potential drug targets. These protein kinases include, for example, cGMP-dependent kinases, 5′-AMP-activated protein kinases (AMPK), and proliferation-related kinase (PRK). Like PKAs, cGMP-dependent kinase is a second-message-dependent serine/threonine kinase. Its activity is modulated by the cellular cGMP levels. cGMP-dependent kinase has been implicated in the regulation of smooth muscle relaxation, platelet function, sperm metabolism, and nucleic acid synthesis. AMPK is a regulator of fatty acid and sterol synthesis. AMPK mediates the response to cellular stress, such as heat shock or depletion of glucose or ATP. PRK is a serum/cytokine inducible kinase. It is involved in the regulation of cell cycle and cell proliferation. PRK has been considered a potential proto-oncogene whose deregulation in normal tissues may lead to oncogenic transformation.

[0036] As a counterpart of protein kinases, protein phosphatases reverse the protein phosphorylation process by protein kinases. The levels of protein phosphorylation required for normal cell growth and differentiation are achieved through the coordinated action of protein kinases and phosphatases. Depending on the cellular context, these two types of enzymes may either antagonize or cooperate with each other during signal transduction. An imbalance between these enzymes may impair normal cell functions, leading to metabolic disorders or cellular transformation.

[0037] Protein phosphatases can be roughly divided into three families—namely, serine/threonine phosphatases, tyrosine phosphatases, and dual-specificity phosphatases. Serine/threonine phosphatases are either cytosolic or associated with a receptor. On the basis of their sensitivity to two thermostable proteins (i.e., inhibitors 1 and 2) and their divalent cation requirements, the serine/threonine phosphatases can be divided into at least four distinct groups. They are PP1, PP2A, PP2B, and PP2C.

[0038] PP1 dephosphorylates many of the proteins phosphorylated by cAMP-dependent protein phosphatase and therefore is an important regulator of cAMP-mediated signal transduction pathways. PP2A is a main phosphatase responsible for reversing the phosphorylation of serine/threonine phosphatases. PP2A have been implicated in metabolism, transcription and translation regulation, RNA splicing, cell differentiation, cell cycle, and oncogenic transformation. PP2B, also known as calcineurin, is a Ca²⁺-activated phosphatase. PP2B is involved in a variety of cellular functions, including ion channel regulation, neurotransmission, transcription regulation, muscle glycogen metabolism, and lymphocyte activation. PP2C is an Mg²⁺-dependent phosphatase that plays a role in the regulation of cAMP-activated protein phosphatase activity, Ca²⁺-dependent signal transduction, tRNA splicing, and signal transduction related to heat shock responses.

[0039] Protein tyrosine phosphatases (PTPs) are involved in cell differentiation and malignant transformation. PTP targets include receptors, transcription factors, ion channels, cellular motors, and certain structural proteins such as filaments.

[0040] Dual-specificity phosphatases (DSPs) regulate mitogenic signal transduction pathways. DSPs may also be involved in meiosis and spermatogenesis.

[0041] The importance of phosphatases in the etiology of diseases has been well established. Malfunction of phosphatases has been associated with numerous human diseases or disorders, including renal and small lung carcinoma, Charcot-Marie-Tooth disease type 4B1, allergy, asthma, obesity, myocardial hypertrophy, and Alzheimer's disease.

[0042] Another class of drug target genes is protease. Proteases are involved in a wide variety of biological processes, including post-translational modifications, blood coagulation, fibrinolysis, complement activation, fertilization, hormone production, degradation of undesirable proteins or invading organisms, tumor metastasis, stress response, wound healing, tissue remodeling, cell proliferation and differentiation, and other signal transduction pathways. Proteases include endopeptidases and exopeptidases. Endopeptidases cleave peptide bonds at points within a protein, and exopeptidases remove amino acids sequentially from either N or C-terminus of a protein. At least four mechanistic classes of endopeptidases have been recognized. They are the aspartic, serine, metallo, and cysteine proteinases.

[0043] The aspartic proteinases include at least one active aspartate residue at the catalytic center. Catalysis by aspartic proteases involves the formation of a non-covalent neutral tetrahedral intermediate. Examples of the aspartic proteases include pepsin A, presenilin 1, chymosin, Iysosomal cathepsins D, renin, and retropepsin (from human immunodeficiency virus type 1).

[0044] The serine proteinases include trypases (cleaving arginine or lysine), aspases (cleaving after aspartate), chymases (cleaving after phenylalanine or leucine), metases (cleaving after methionine), and serases (cleaving after serine). The serine proteases are so named because of the presence of a serine residue in their catalytic sites.

[0045] The metallo proteinases differ widely in sequences and structures. Many of the metallo proteinases contain a zinc atom in their catalytic sites. Examples of the metallo proteinases include membrane alanyl aminopeptidase, germinal peptidyl-dipeptidase A, collagenase 1, neprilysin, carboxypeptidase A, membrane dipeptidase, and S2P protease.

[0046] The cysteine proteinases contain a cysteine nucleophile at the catalytic site. Like the serine proteinases, catalysis by cysteine proteinases involves the formation of a covalent intermediate between the substrate and the active-site cysteine. Exemplary cysteine proteinases include cytosolic calpains and lysosomal cathepsins.

[0047] Uncontrolled protease activity has been implicated in many diseases, such as arteriosclerosis, muscular dystrophy, amyotrophy, rheumatoid arthritis, osteoarthritis, autoimmune diseases, inflammation, infection, cancer, and degenerative disorders. Therefore, proteases have been the major targets for drug action and development.

[0048] G-protein coupled receptors (GPCR) are a superfamily of integral membrane proteins which transduce extracellular signals. GPCRs include receptors for biogenic amines, such as dopamine, epinephrine, histamine, glutamate (metabotropic effect), acetylcholine (muscarinic effect), and serotonin; for lipid mediators of inflammation such as prostaglandins, platelet activating factor, and leukotrienes; for peptide hormones such as calcitonin, C5a anaphylatoxin, follicle stimulating hormone, gonadotropin releasing hormone, neurokinin, oxytocin, and thrombin; and for sensory signal mediators, such as retinal photopigments and olfactory stimulatory molecules.

[0049] A typical GPCR has seven transmembrane domains. A GPCR becomes activated when it binds to an extracellular ligand. The interaction between the ligand and the GPCR changes the binding affinity of the GPCR to the coupled G-protein, which in turn enables GTP to bind with enhanced affinity to the G-protein. This allows the G-protein to activate the downstream second messenger generator(s), such as adenylate cyclase. The activation of the second messenger generator(s) alters the cellular level of the respective second messenger molecule(s), thereby triggering the next effector in the signaling cascade. Exemplary second messengers include cAMP, cGMP, inositol trisphosphate, diacylglycerol, and Ca²⁺. Activity of GPCRs can be regulated by phosphorylation of the intracellular or extracellular domains of the receptor.

[0050] GPCR-mediated signal transduction pathways have been implicated in a variety of diseases, including, for example, hypotension, hypertension, angina pectoris, myocardial infarction, depression, delirium, dementia, severe mental retardation, asthma, Parkinson's disease, acute heart failure, urinary retention, osteoporosis, and cancers. Thus, GPCRs represent another platform for drug discovery.

[0051] Nuclear hormone receptor is a large family of ligand-activated transcription factors that modifies the expression of target genes by binding to specific cis-acting sequences. Nuclear hormone receptors include both orphan receptors and receptors for a wide variety of clinically significant ligands including glucocorticoids, androgens, mineralocorticoids, progestins, estrogens, thyroid hormones, vitamin D, retinoids, peroxisomes, and icosanoids.

[0052] A typical nuclear hormone receptor has a variable N-terminal region, a conserved DNA-binding domain, a variable hinge region, a conserved ligand binding domain, and a variable C-terminal region. Ligand binding can induce a conformational change in the receptor and promote its association with transcriptional coactivators. The resulting complex can bind to the target DNA sequence with increased affinity.

[0053] Nuclear hormone receptors have been implicated in numerous disorders or diseases. They include, but are not limited to, Parkinson's disease, adrenal hypoplasia, hypogonadism, hypercholesterolemia, obesity, diabetes, infertility, central nerve system disorders, sleep disorders, immune disorders, metabolic disorders, and tumors. Thus, nuclear hormone receptors represent another class of primary targets for drug discovery.

[0054] Ion channels are transmembrane proteins that regulate the flow of ions across cellular membranes. Ion channels participate in diverse biological processes, including the generation and timing of action potentials, synaptic transmissions, secretion of hormones, contraction of muscles, and intercellular communication. Ion channels exist in vivo in multimeric forms and comprise pore-forming and auxiliary subunits. These subunits are coded by several distinct gene families. Ion channel properties can be modulated by second messenger cascades. Some ion channels can directly interact with intracellular or membrane proteins, such as protein kinases, G-proteins, and cytoskeleton-associated proteins.

[0055] Exemplary ion channels include extracellular ligand-gated channels (e.g., neurotransmitter gated channels), intracellular ligand-gated channels (e.g., cyclic nucleotide or calcium gated channels), voltage-gated channels (e.g., potassium, sodium, or calcium channels), inward rectifier (e.g., inward rectifier K⁺ Channel), gap junction channels (e.g., channels formed by connexins or desmosome), ATP gated channels, and proton-gated channels.

[0056] Many diseases are known to be associated with the dysfunction of ion channels. These diseases include, for example, cardiac arrhythmias, angina pectoris, cystic fibrosis, myotonia, epilepsy Alzheimer's disease, Parkinson's disease, long QT syndrome, sick sinus syndrome, age-related memory loss, and sudden death syndrome. A better understanding of the ion channel expression and its regulation would lead to the discovery of new drugs capable of treating ion channel related diseases.

[0057] mRNA, cDNA, and other protein coding or non-coding sequences of human drug target genes can be collected from a variety of sources, such as GenBank and GENESEQ™ (Derwent). These sequence databases include a large number of EST and cDNA sequences, and many of these sequences are annotated. Sequences encoding drug target genes can therefore be identified according to their annotations.

[0058] These sequence databases also contain an enormous amount of human genomic sequences. Open reading frames (ORFs) in these genomic sequences can be predicted or isolated using methods known in the art. Suitable methods for this purpose include, but are not limited to, GeneMark (provided by the European Bioinformatics Institute), Glimmer (provided by The Institute for Genome Research), and ORF Finder (provided by the National Center for Biotechnology Information (NCBI)). The ORFs that encode or share high sequence homology with known human target genes can be identified. The functions of the polypeptides encoded by these identified ORFs can be analyzed using standard methods, such as cell-based assays or in vitro transcription/translation systems.

[0059] Human drug target gene sequences collected using the above-described methods, together with sequences collected from other sources, can be clustered to identify highly homologous sequences. Suitable clustering algorithms include, but are not limited to, the CAT (cluster and alignment tool) software package provided by DoubleTwist. See Clustering and Alignment Tools User's Guide (DoubleTwist, Inc., 2000).

[0060] The CAT program can reduce the redundancy, as well as mask low-complexity regions, of the input sequence set. The resulting sequence set derived from CAT contains two distinct groups of sequences. The first group is a set of consensus sequences derived from multiple sequence alignment which is produced from CAT sub-clusters containing more than one sequence. These multi-sequence sub-clusters may also include single transcripts represented in the input sequence set numerous times. The second group is a set of exemplar sequences that do not cluster with any other CAT sub-cluster. The consensus and exemplar sequences can be generated such that any base ambiguity is identified with the respective IUPAC (International Union of Pure and Applied Chemistry) or WIPO Standard ST.25 (1998) base representation.

[0061] In a small number of cases, the multi-sequence sub-clusters may contain a large number of sequences due to clustering artifacts (e.g., highly homologous genes or domains). In these cases, through more stringent clustering parameters, the large sub-clusters can be re-clustered. In addition, the consensus sequences can be manually curated to verify cluster membership.

[0062] Examples of the consensus sequences obtained using the above-described method are depicted in SEQ ID NOs: 1-1,087. Examples of the exemplar sequences so obtained are shown in SEQ ID NOs: 1,088-4,272. Each consensus or exemplar sequence has a header which includes a qualifier (after “wyeHumanDT1a”) and other information of the sequence. These headers are illustrated in Attachment A for the consensus sequences and Attachment B for the exemplar sequences, respectively. As used herein, the consensus and exemplar sequences are collectively referred to as the “parent sequences.”

[0063] Attachment E shows the gene class of each parent sequence. These gene classes include the kinase gene class (“Kinase”), the phosphatase gene class (“Phosphatase”), the protease gene class (“Protease”), the G-protein coupled receptor gene class (“GPCR”), the nuclear hormone receptor gene class (“NHR”), and the ion channel gene class (“Ion Channel”).

[0064] mRNA, cDNA, or other protein coding or non-coding sequences of drug target genes can also be obtained by sequencing cDNA libraries. This method is particularly useful for the identification of drug target genes that are specifically expressed in certain tissue or tissues. cDNA libraries suitable for this purpose can be derived from any human tissue, such as heart, liver, kidney, brain, lung, pancreas, spleen, blood, muscle, bone, cartilage, or bone marrow. Methods for constructing cDNA libraries from a tissue of interest are well known in the art. Non-limiting examples of commercial kits suitable for this purpose include the CloneMiner™ cDNA Library Construction Kit provided by Invitrogen (Carlsbad, Calif.).

[0065] cDNA clones in a library can be readily sequenced using any method known in the art. In a standard method, the cDNA insert in a clone can be sequenced using primers designed from the common vector sequences adjacent to the 5′ or 3′ end of the cDNA inserts. These 5′ or 3′ reads from a cDNA library can be compared to the protein coding sequences of known kinases, phosphatases, proteases, G-protein coupled receptors, nuclear hormone receptors, and ion channels. cDNA clones sharing high sequence homology with known drug target genes can therefore be identified. These clones can be further analyzed to determine if they encode functional drug target genes.

[0066] In another embodiment, function-based library screen is employed to identify sequences having drug target gene activities. Libraries suitable for this purpose include cDNA libraries or peptide libraries (e.g., phage-displayed peptide libraries or synthetic peptide libraries).

[0067] The human drug target genes thus identified, together with sequences collected from available sequence databases or other sources, can be clustered using CAT or other programs to derive consensus or exemplar sequences. As appreciated by those skilled in the art, mRNA, cDNA, or other protein coding or non-coding sequences of drug target genes can be similarly collected from animals. Consensus and exemplar sequences can be generated from these sequences using the methods described above.

B. Preparation of Polynucleotide Probes for Human Drug Target Genes

[0068] The parent sequences depicted in Attachments A and B (SEQ ID NOs: 1-4,272) can be used to prepare polynucleotide probes for human drug target genes. These probes can hybridize under stringent or nucleic acid array hybridization conditions to the RNA transcripts, or the complements thereof, of human drug target genes (e.g., mRNA, cRNA, or cDNA). In many embodiments, a probe for a drug target gene is incapable of hybridizing under stringent or nucleic acid array hybridization conditions to the RNA transcripts, or the complements thereof, of other genes (including other drug target genes).

[0069] As used herein, “nucleic acid array hybridization conditions” refer to the temperature and ionic conditions that are normally utilized for nucleic acid array hybridization. For instance, these conditions can include 16-hour hybridization at 45° C., followed by at least three 10-minute washes at room temperature. The hybridization buffer can include 100 mM MES, 1 M [Na⁺], 20 mM EDTA, and 0.01% Tween 20. The pH of the hybridization buffer preferably is between 6.5 and 6.7. The wash buffer is 6×SSPET. 6×SSPET contains 0.9 M NaCl, 60 mM NaH₂PO₄, 6 mM EDTA, and 0.005% Triton X-100. Under more stringent nucleic acid array hybridization conditions, the wash buffer can include 100 mM MES, 0.1 M [Na⁺], and 0.01% Tween 20.

[0070] “Stringent conditions” are at least as stringent as, for example, conditions G-L in Table 1. In certain embodiments, highly stringent conditions A-F in Table 1 can be used. In Table 1, hybridization is carried out under the hybridization conditions (Hybridization Temperature and Buffer) for about four hours, followed by two 20-minute washes under the corresponding wash conditions (Wash Temp. and Buffer).

TABLE 1
Stringency Conditions

| | Poly- | Hybrid | | |
|---|---|---|---|---|
| Stringency | nucleotide | Length | Hybridization | Wash Temp. |
| Condition | Hybrid | (bp)¹ | Temperature and Buffer^{H} | and Buffer^{H} |
| A | DNA:DNA | >50 | 65° C.; 1 × SSC -or- | 65° C.; 0.3 × SSC |
| | | | 42° C.; 1 × SSC, | |
| | | | 50% formamide | |
| B | DNA:DNA | <50 | T_{B}*; 1 × SSC | T_{B}*; 1 × SSC |
| C | DNA:RNA | >50 | 67° C.; 1 × SSC -or- | 67° C.; 0.3 × SSC |
| | | | 45° C.; 1 × SSC, | |
| | | | 50% formamide | |
| D | DNA:RNA | <50 | T_{D}*; 1 × SSC | T_{D}*; 1 × SSC |
| E | RNA:RNA | >50 | 70° C.; 1 × SSC -or- | 70° C.; 0.3 × SSC |
| | | | 50° C.; 1 × SSC, | |
| | | | 50% formamide | |
| F | RNA:RNA | <50 | T_{F}*; 1 × SSC | T_{f}*; 1 × SSC |
| G | DNA:DNA | >50 | 65° C.; 4 × SSC -or- | 65° C.; 1 × SSC |
| | | | 42° C.; 4 × SSC, | |
| | | | 50% formamide | |
| H | DNA:DNA | <50 | T_{H}*; 4 × SSC | T_{H}*; 4 × SSC |
| I | DNA:RNA | >50 | 67° C.; 4 × SSC -or- | 67° C.; 1 × SSC |
| | | | 45° C.; 4 × SSC, | |
| | | | 50% formamide | |
| J | DNA:RNA | <50 | T_{J}*; 4 × SSC | T_{J}*; 4 × SSC |
| K | RNA:RNA | >50 | 70° C.; 4 × SSC -or- | 67° C.; 1 × SSC |
| | | | 50° C.; 4 × SSC, | |
| | | | 50% formamide | |
| L | RNA:RNA | <50 | T_{L}*; 2 × SSC | T_{L}*; 2 × SSC |
| ¹The hybrid length is that anticipated for the hybridized region(s) of the hybridizing polynucleotides. When hybridizing a polynucleotide to a target polynucleotide of unknown sequence, the hybrid length is assumed to be that of the hybridizing polynucleotide. When polynucleotides of known sequence are hybridized, the hybrid length can be determined by aligning the sequences of the polynucleotides and identifying the region or regions of optimal sequence complementarity. | | | | |
| ^{H}SSPE (1 × SSPE is 0.15 M NaCl, 10 mM NaH₂PO₄, and 1.25 mM EDTA, pH 7.4) can be substituted for SSC (1 × SSC is 0.15 M NaCl and 15 mM sodium citrate) in the hybridization and wash buffers. | | | | |
| T_{B}*-T_{R}*: The hybridization temperature for hybrids anticipated to be less than 50 base pairs in length should be 5-10° C. less than the melting temperature (Tₘ) of the hybrid, where Tₘ is determined according to the following equations. For hybrids less than 18 base pairs in length, Tₘ(° C.) = 2(# of A + T bases) + 4(# of G + C bases). | | | | |
| # For hybrids between 18 and 49 base pairs in length, Tₘ(° C.) = 81.5 + 16.6(log₁₀Na⁺) + 0.41(% G + C) − (600/N), where N is the number of bases in the hybrid, and Na⁺ is the molar concentration of sodium ions in the hybridization buffer (Na⁺ for 1 × SSC = 0.165 M). | | | | |

[0071] In many embodiments, the polynucleotide probes for each drug target gene can hybridize under stringent or nucleic acid array hybridization conditions to the corresponding parent sequence of the gene, or the full complement thereof. Where a parent sequence contains one or more ambiguous residues (i.e., residue “n”), the probes for that parent sequence can be designed such that they are capable of hybridizing under stringent or nucleic acid array hybridization conditions to an unambiguous segment of the parent sequence, or the complement of the unambiguous segment. In one example, each probe for a parent sequence comprises or consists of an unambiguous sequence fragment of that parent sequence, or the complement thereof. In one embodiment, the probes for a drug target gene or a parent sequence are incapable of hybridizing under stringent or nucleic acid array hybridization conditions to other drug target genes or parent sequences.

[0072] The length of each polynucleotide probe employed in the present invention can be selected to produce the desired hybridization effects. For example, the probes can include or consist of at least 10, 15, 20, 25, 30, 35, 40, 45, 50, 60, 70, 80, 90, 100, 200, 300, 400 or more consecutive nucleotides. The probes can be DNA, RNA, or PNA. Other modified forms of DNA, RNA, or PNA can also be used. The nucleotide units in each probe can be either naturally occurring residues (such as deoxyadenylate, deoxycytidylate, deoxyguanylate, deoxythymidylate, adenylate, cytidylate, guanylate, and uridylate), or synthetically produced analogs that are capable of forming desired base-pair relationships, or a combination thereof. Examples of these analogs include, but are not limited to, aza and deaza pyrimidine analogs, aza and deaza purine analogs, and other heterocyclic base analogs, wherein one or more of the carbon and nitrogen atoms of the purine and pyrimidine rings are substituted by heteroatoms, such as oxygen, sulfur, selenium, and phosphorus. Similarly, the polynucleotide backbones of the probes can be either naturally occurring (such as through 5′ to 3′ linkage), or modified. For instance, the nucleotide units can be connected via non-typical linkage, such as 5′ to 2′ linkage, so long as the linkage does not interfere with hybridization. For another instance, peptide nucleic acids, in which the constitute bases are joined by peptide bonds rather than phosphodiester linkages, can be used.

[0073] In one embodiment, the polynucleotide probes employed in the present invention have relatively high sequence complexity, and do not contain long stretches of the same nucleotide. In another embodiment, the polynucleotide probes employed in the present invention are designed such that they do not have a high proportion of G or C residues at the 3′ ends. In yet another embodiment, the probes do not have a 3′ terminal T residue. Depending on the type of assay or detection to be performed, sequences that are predicted to form hairpins or interstrand structures, such as “primer dimers,” can be either included in, or excluded from, the probe sequences. In still another embodiment, each probe does not contain any ambiguous base.

[0074] Any part of a parent sequence can be used to prepare probes. For instance, probes can be prepared from the protein-coding region, the 5′ untranslated region, or the 3′ untranslated region of a parent sequence. Multiple probes, such as at least 5, 10, 15, 20, 25, 30, 40, 50, 60, 70, 80, 90, 100, or more, can be prepared for a given parent sequence. These multiple probes may or may not overlap each other, although overlap among different probes may be desirable in some assays.

[0075] In another embodiment, the probes for a parent sequence have low sequence identities with other parent sequences, or the complements thereof. For instance, each probe for a parent sequence can have no more than 70%, 60%, 50% or less sequence identity with other parent sequences, or the complements thereof. This reduces the risk of cross-hybridization between the probes and the undesired RNA transcripts. Sequence identity can be determined using any method known in the art. These methods include, but are not limited to, BLASTN, FASTA, FASTDB, and the GCG program.

[0076] The suitability of a probe for hybridization can be evaluated using various computer programs. Programs suitable for this purpose include, but are not limited to, LaserGene (DNAStar), Oligo (National Biosciences, Inc.), MacVector (Kodak/IBI), and the standard programs provided by the Genetics Computer Group (GCG).

[0077] The polynucleotide probes of the present invention can be synthesized using any method known in the art. Exemplary methods include automated or high throughput DNA synthesizers, such as those provided by Millipore, GeneMachines, and BioAutomation. In one embodiment, the synthesized probes are substantially free of impurities, such as incomplete products produced during the synthesis. In another embodiment, the probes are substantially free of other contaminants that may hinder the desired functions of the probes. The probes can be purified or concentrated using different methods, such as reverse phase chromatography, ethanol precipitation, gel filtration, electrophoresis, or a combination thereof.

[0078] In still another embodiment, the parent sequences with large sizes are divided into shorter sequence segments to facilitate the probe design. These divided sequences, together with the undivided parent sequences, are collectively referred to as the “tiling sequences” (SEQ ID NOs: 4,273-544).

[0079] Attachment C depicts the tiling sequences and their corresponding headers. Each header includes a qualifier (after “wyeHumanDT1a”) and other information of the corresponding tiling sequence. Attachment D shows the location of each tiling sequence in the corresponding parent sequence. The 5′ end of each tiling sequence in the corresponding parent sequence is indicated under “TilingStart,” and the 3′ end under “TilingEnd.”

[0080] Polynucleotide probes for each tiling sequence can hybridize under stringent or nucleic acid array hybridization conditions to that tiling sequence, or the complement thereof. In one embodiment, a probe for a tiling sequence can hybridize under highly stringent conditions to the tiling sequence, or the complement thereof. In another embodiment, the probes for a tiling sequence are incapable of hybridizing under stringent or nucleic acid array hybridization conditions to other tiling sequences, or the complements thereof. If a tiling sequence contains one or more ambiguous residues, the probes for that tiling sequence can prepared such that they are capable of hybridizing under stringent or nucleic acid array hybridization conditions to an unambiguous segment of the tiling sequence, or the complement of the unambiguous segment.

[0081] Any method known in the art may be used to prepare probes for the tiling sequences. In one embodiment, the probes are generated using Array Designer, a software package provided by TeleChem International, Inc (Sunnyvale, Calif. 94089). Examples of the probes thus generated are illustrated in Attachment F (SEQ ID NOs: 8,647-116,337). The locations of the 5′ and 3′ ends of each probe in the corresponding tiling sequence are shown under “5′ End” and “3′ End,” respectively. The qualifier of each probe, which indicative the corresponding tiling sequence from which the probe is derived, is also indicated. Other methods or software programs can also be used to generate hybridization probes for the tiling sequences of the present invention.

[0082] The parent sequences, tiling sequences, and polynucleotide probes of the present invention can be used to detect or monitor the expression profiles of human drug target genes. Methods suitable for this purpose include, but are not limited to, nucleic acid arrays (including bead arrays), Southern Blot, Northern Blot, in situ hybridization, PCR, and RT-PCR.

C. Nucleic Acid Arrays for Detecting Expression Profiles of Human Drug Target Genes

[0083] The polynucleotide probes of the present invention can be used to make nucleic acid arrays. A typical nucleic acid array includes at least one substrate support which includes a plurality of discrete regions. The location of each discrete region is either known or determinable. These discrete regions can be organized in various forms or patterns. For instance, the discrete regions can be arranged as an array of regularly spaced areas on the surface of a substrate. Other patterns, such as linear, concentric or spiral patterns, can also be used. In one embodiment, a nucleic acid array of the present invention is a bead array which includes a plurality of beads stably associated with the polynucleotide probes of the present invention.

[0084] Polynucleotide probes can be stably attached to the corresponding discrete regions through covalent or non-covalent interactions. By “stably attached” or “stably associated,” it means that during nucleic acid array hybridization the polynucleotide probe maintains its position relative to the discrete region to which the probe is attached. Any suitable method can be used to attach polynucleotide probes to a nucleic acid array substrate. In one embodiment, the attachment is achieved by first depositing the polynucleotide probes to their respective discrete regions and then exposing the surface to a solution of a cross-linking agent, such as glutaraldehyde, borohydride, or other bifunctional agents. In another embodiment, the polynucleotide probes are covalently bound to the substrate via an alkylamino-linker group or by coating the glass slides with polyethylenimine followed by activation with cyanuric chloride for coupling the polynucleotides. In yet another embodiment, the polynucleotide probes are covalently attached to the nucleic acid array through polymer linkers. The polymer linkers may improve the accessibility of the probes to their purported targets. In many cases, the polymer linkers are not involved in the interactions between the probes and their purported targets.

[0085] In addition, polynucleotide probes can be stably attached to a nucleic acid array substrate through non-covalent interactions. In one embodiment, polynucleotide probes are attached to a substrate through electrostatic interactions between positively charged surface groups and negatively charged probes. In another embodiment, the substrate is a glass slide having a coating of a polycationic polymer on its surface, such as a cationic polypeptide. The probes are bound to these polycationic polymers. In yet another embodiment, the methods described in U.S. Pat. No. 6,440,723 are used to attach polynucleotide probes to a nucleic acid array substrate.

[0086] Various materials can be used to make the substrate supports of nucleic acid arrays. Suitable materials include, but are not limited to, glasses, silica, ceramics, nylons, quartz wafers, gels, metals, and papers. The substrates can be flexible or rigid. In one embodiment, they are in the form of a tape that is wound up on a reel or cassette. Two or more substrate supports can be used in the same nucleic acid array. In many cases, the substrates are not reactive with reagents that are used in nucleic acid array hybridization.

[0087] The surface(s) of a substrate support can be smooth and substantially planar. The surface(s) of a substrate can also have a variety of configurations, such as raised or depressed regions, trenches, v-grooves, mesa structures, or other regularities or irregularities. The surface(s) of a substrate can be coated with one or more modification layers. Suitable modification layers include inorganic and organic layers, such as metals, metal oxides, polymers, or small organic molecules. In one embodiment, the surface(s) of a substrate is chemically treated to include groups such as hydroxyl, carboxyl, amine, aldehyde, or sulfhydryl groups.

[0088] The discrete regions on a substrate can be of any size, shape and density. For instance, they can be squares, ellipsoids, rectangles, triangles, circles, other regular or irregular geometric shapes, or any portion or combination thereof. In one embodiment, each discrete region has a surface area of less than 10⁻¹ cm², such as less than 10⁻², 10⁻³, 10⁻⁴, 10⁻⁵, 10⁻⁶, or 10⁻⁷ cm². In another embodiment, the spacing between each discrete region and its closest neighbor, measured from center-to-center, is in the range of from about 10 to about 400 μm. The density of the discrete regions may range, for example, between 50 and 50,000 regions/cm².

[0089] All of the methods known in the art can be used to make the nucleic acid arrays of the present invention. For instance, the probes can be synthesized in a step-by-step manner on a substrate, or can be attached to a substrate in pre-synthesized forms. Algorithms for reducing the number of synthesis cycles can be used. In one embodiment, a nucleic acid array of the present invention is synthesized in a combinational fashion by delivering monomers to the discrete regions through mechanically constrained flowpaths. In another embodiment, a nucleic acid array of the present invention is synthesized by spotting monomer reagents onto a substrate support using an ink jet printer (such as the DeskWriter C manufactured by Hewlett-Packard). In yet another embodiment, polynucleotide probes are immobilized on a nucleic acid array using photolithography techniques.

[0090] The nucleic acid arrays of the present invention can also be bead arrays which include a plurality of beads. Polynucleotide probes can be stably attached to these beads using the methods described above.

[0091] In one embodiment, a substantial portion of all of the polynucleotide probes that are stably attached to a nucleic acid array of the present invention is probes for drug target genes. For instance, at least 15%, 20%, 25%, 30%, 35%, 40%, 45%, 50%, or more of all of the polynucleotide probes that are stably attached to the nucleic acid array are drug target gene probes. In one example, all of these drug target gene probes are attached to one substrate support. In another example, these drug target gene probes are attached to two or more substrate supports. Examples of drug target genes include, but are not limited to, kinase genes, phosphatase genes, protease genes, G-protein coupled receptor genes, nuclear hormone receptor genes, and ion channel genes.

[0092] Any number of polynucleotide probes can be included in a nucleic acid array of the present invention. In one embodiment, a nucleic acid array of the present invention includes at least 2, 5, 10, 20, 30, 40, 50, 100, 200, 300, 400, 500, 1,000, or more different probes, and each probe can hybridize under stringent or nucleic acid array hybridization conditions to a different respective drug target gene. In another embodiment, a nucleic acid array of the present invention includes at least 2, 5, 10, 50, 100, 500, or more probes for each class of drug target genes.

[0093] In still another embodiment, a nucleic acid array of the present invention includes at least 2, 5, 10, 20, 30, 40, 50, 100, 200, 300, 400, 500, 1,000, 2,000, 3,000, 4,000, or more different probes, and each probe can hybridize under stringent or nucleic acid array hybridization conditions to a different respective tiling sequence selected from Attachment C, or the full complement thereof. In another embodiment, a nucleic acid array of the present invention comprises at least one probe for each tiling sequence selected from Attachment C.

[0094] In yet another embodiment, a nucleic acid array of the present invention includes at least 1, 2, 5, 10, 20, 30, 40, 50, or more probes for an ADAMTS4 gene. In one example, the ADAMTS4 probes can hybridize under stringent or nucleic acid array hybridization conditions to a sequence selected from the group consisting of SEQ ID NO: 6,797 (tiling: wyeHumanDT1a:NM_{—}005099.2_at), SEQ ID NO: 6,798 (tiling:wyeHumanDT1a:NM_{—}005099.2_s_at), and the full complements thereof. In another example, the ADAMTS4 probes are selected from Attachment F (e.g., SEQ ID NOs: 46,292-46,335).

[0095] Multiple probes can be included in a nucleic acid array to detect the same drug target gene or tiling sequence. For instance, at least 2, 5, 10, 15, 20, 25, 30, 35, 40, 45, 50, 55, 60, 65, 70, or more probes can be used to detect the same drug target gene or tiling sequence. In one example, the nucleic acid array includes at least from 35 to 68 probes for each drug target gene or tiling sequence of interest. Reliability and reproducibility of probe set signal values decrease substantially if less than 20 probe pair per transcript are used. By increasing the number of probe pairs for each drug target gene or tile sequence, a more robust and reliable detection can be achieved.

[0096] Each probe can be attached to a different respective discrete region on the nucleic acid array. Alternatively, two or more different probes can be attached to the same discrete region. The concentration of one probe with respect to the other probe or probes in the same region may vary according to the objectives and requirements of the particular experiment. In one embodiment, different probes in the same region are present in approximately equivocal ratio.

[0097] In many instances, probes for different tiling sequences are attached to different discrete regions on a nucleic acid array. In some embodiments, however, probes for different tiling sequences are attached to the same discrete region.

[0098] As discussed above, the length of each probe on a nucleic acid array can be selected to achieve the desired hybridization effects. For instance, each probe can include or consist of 15, 20, 25, 30, 35, 40, 45, 50, 60, 70, 80, 90, 100 or more consecutive nucleotides. In one embodiment, each probe consists of 25 consecutive nucleotides. In another embodiment, a nucleic acid array includes each and every oligonucleotide probe selected from Attachment F, or the full complement thereof.

[0099] The nucleic acid arrays of the present invention can further include control probes which can hybridize under stringent or nucleic acid array hybridization conditions to corresponding control sequences, or the complements thereof. Exemplary control sequences are depicted in SEQ ID Nos: 8545-8646. Table 2 shows the header information for each control sequence. Each header includes aqualifier (after “wyeHumanDT1a”), as well as other information, of the corresponding control sequence.

TABLE 2
Control Sequences

| SEQ | |
|---|---|
| ID NO | Header |
| 8545 | “>control: wyeHumanDT1a: AFFX-BioB-5_at; J04423; E coli bioB gene |
| | biotin synthetase (-5, -M, -3 represent transcript regions 5 prime, Middle, |
| | and 3 prime respectively)” |
| 8546 | “>control: wyeHumanDT1a: AFFX-BioB-M_at; J04423; E coli bioB gene |
| | biotin synthetase (-5, -M, -3 represent transcript regions 5 prime, Middle, |
| | and 3 prime respectively)” |
| 8547 | “>control: wyeHumanDT1a: AFFX-BioB-3_at; J04423; E coli bioB gene |
| | biotin synthetase (-5, -M, -3 represent transcript regions 5 prime, Middle, |
| | and 3 prime respectively)” |
| 8548 | >control: wyeHumanDT1a: AFFX-BioC-5_at; J04423; E coli bioC protein (-5 |
| | and -3 represent transcript regions 5 prime and 3 prime respectively) |
| 8549 | >control: wyeHumanDT1a: AFFX-BioC-3_at; J04423; E coli bioC protein (-5 |
| | and -3 represent transcript regions 5 prime and 3 prime respectively) |
| 8550 | >control: wyeHumanDT1a: AFFX-BioDn-5_at; J04423; E coli bioD gene |
| | dethiobiotin synthetase (-5 and -3 represent transcript regions 5 prime and 3 |
| | prime respectively) |
| 8551 | >control: wyeHumanDT1a: AFFX-BioDn-3_at; J04423; E coli bioD gene |
| | dethiobiotin synthetase (-5 and -3 represent transcript regions 5 prime and 3 |
| | prime respectively) |
| 8552 | >control: wyeHumanDT1a: AFFX-CreX-5_at; X03453; Bacteriophage P1 |
| | cre recombinase protein (-5 and -3 represent transcript regions 5 prime and |
| | 3 prime respectively) |
| 8553 | >control: wyeHumanDT1a: AFFX-CreX-3_at; X03453; Bacteriophage P1 |
| | cre recombinase protein (-5 and -3 represent transcript regions 5 prime and |
| | 3 prime respectively) |
| 8554 | “>control: wyeHumanDT1a: AFFX-DapX-5_at; L38424; B subtilis dapB, |
| | jojF, jojG genes corresponding to nucleotides 1358-3197 of L38424 (-5, -M, |
| | -3 represent transcript regions 5 prime, Middle, and 3 prime respectively)” |
| 8555 | “>control: wyeHumanDT1a: AFFX-DapX-M_at; L38424; B subtilis dapB, |
| | jojF, jojG genes corresponding to nucleotides 1358-3197 of L38424 (-5, -M, |
| | -3 represent transcript regions 5 prime, Middle, and 3 prime respectively)” |
| 8556 | “>control: wyeHumanDT1a: AFFX-DapX-3_at; L38424; B subtilis dapB, |
| | jojF, jojG genes corresponding to nucleotides 1358-3197 of L38424 (-5, -M, |
| | -3 represent transcript regions 5 prime, Middle, and 3 prime respectively)” |
| 8557 | “>control: wyeHumanDT1a: AFFX-LysX-5_at; X17013; B subtilis lys gene |
| | for diaminopimelate decarboxylase corresponding to nucleotides 350-1345 |
| | of X17013 (-5, -M, -3 represent transcript regions 5 prime, Middle, and 3 |
| | prime respectively)” |
| 8558 | “>control: wyeHumanDT1a: AFFX-LysX-M at; X17013; B subtilis lys gene |
| | for diaminopimelate decarboxylase corresponding to nucleotides 350-1345 |
| | of X17013 (-5, -M, -3 represent transcript regions 5 prime, Middle, and 3 |
| | prime respectively)” |
| 8559 | “>control: wyeHumanDT1a: AFFX-LysX-3_at; X17013; B subtilis lys gene |
| | for diaminopimelate decarboxylase corresponding to nucleotides 350-1345 |
| | of X17013 (-5, -M, -3 represent transcript regions 5 prime, Middle, and 3 |
| | prime respectively)” |
| 8560 | “>control: wyeHumanDT1a: AFFX-PheX-5_at; M24537; B subtilis pheB, |
| | pheA genes corresponding to nucleotides 2017-3334 of M24537 (-5, -M, -3 |
| | represent transcript regions 5 prime, Middle, and 3 prime respectively)” |
| 8561 | “>control: wyeHumanDT1a: AFFX-PheX-M_at; M24537; B subtilis pheB, |
| | pheA genes corresponding to nucleotides 2017-3334 of M24537 (-5, -M, -3 |
| | represent transcript regions 5 prime, Middle, and 3 prime respectively)” |
| 8562 | “>control: wyeHumanDT1a: AFFX-PheX-3_at; M24537; B subtilis pheB, |
| | pheA genes corresponding to nucleotides 2017-3334 of M24537 (-5, -M, -3 |
| | represent transcript regions 5 prime, Middle, and 3 prime respectively)” |
| 8563 | “>control: wyeHumanDT1a: AFFX-ThrX-5_at; X04603; B subtilis thrC, |
| | thrB genes corresponding to nucleotides 248-2229 of X04603 (-5, -M, -3 |
| | represent transcript regions 5 prime, Middle, and 3 prime respectively)” |
| 8564 | “>control: wyeHumanDT1a: AFFX-ThrX-M_at; X04603; B subtilis thrC, |
| | thrB genes corresponding to nucleotides 248-2229 of X04603 (-5, -M, -3 |
| | represent transcript regions 5 prime, Middle, and 3 prime respectively)” |
| 8565 | “>control: wyeHumanDT1a: AFFX-ThrX-3_at; X04603; B subtilis thrC, |
| | thrB genes corresponding to nucleotides 248-2229 of X04603 (-5, -M, -3 |
| | represent transcript regions 5 prime, Middle, and 3 prime respectively)” |
| 8566 | “>control: wyeHumanDT1a: AFFX-TrpnX-5_at; K01391; B subtilis TrpE |
| | protein, TrpD protein, TrpC protein corresponding to nucleotides 1883-4400 |
| | of K01391 (-5, -M, -3 represent transcript regions 5 prime, Middle, and 3 |
| | prime respectively)” |
| 8567 | “>control: wyeHumanDT1a: AFFX-TrpnX-M_at; K01391; B subtilis TrpE |
| | protein, TrpD protein, TrpC protein corresponding to nucleotides 1883-4400 |
| | of K01391 (-5, -M, -3 represent transcript regions 5 prime, Middle, and 3 |
| | prime respectively)” |
| 8568 | “>control: wyeHumanDT1a: AFFX-TrpnX-3_at; K01391; B subtilis TrpE |
| | protein, TrpD protein, TrpC protein corresponding to nucleotides 1883-4400 |
| | of K01391 (-5, -M, -3 represent transcript regions 5 prime, Middle, and 3 |
| | prime respectively)” |
| 8569 | “>control: wyeHumanDT1a: AFFX-r2-Ec-bioB-5_at; J04423; Escherichia |
| | coli /REF = J04423 /DEF = E coli bioB gene biotin synthetase corresponding |
| | to nucleotides 2071-2304 of J04423 /LEN = 1114 (-5, -M, -3 represent |
| | transcript regions 5 prime, Middle, and 3 prime respectively)” |
| 8570 | “>control: wyeHumanDT1a: AFFX-r2-Ec-bioB-M_at; J04423; Escherichia |
| | coli /REF = J04423 /DEF = E coli bioB gene biotin synthetase corresponding |
| | to nucleotides 2393-2682 of J04423 /LEN = 1114 (-5, -M, -3 represent |
| | transcript regions 5 prime, Middle, and 3 prime respectively)” |
| 8571 | “>control: wyeHumanDT1a: AFFX-r2-Ec-bioB-3_at; J04423; Escherichia |
| | coli /REF = J04423 /DEF = E coli bioB gene biotin synthetase corresponding |
| | to nucleotides 2772-3004 of J04423 /LEN = 1114 (-5, -M, -3 represent |
| | transcript regions 5 prime, Middle, and 3 prime respectively)” |
| 8572 | >control: wyeHumanDT1a: AFFX-r2-Ec-bioC-5_at; J04423; Escherichia coli |
| | /REF = J04423 /DEF = E coli bioC protein corresponding to nucleotides 4257- |
| | 4573 of J04423 /LEN = 777 (-5 and -3 represent transcript regions 5 prime |
| | and 3 prime respectively) |
| 8573 | >control: wyeHumanDT1a: AFFX-r2-Ec-bioC-3_at; J04423; Escherichia coli |
| | /REF = J04423 /DEF = E coli bioC protein corresponding to nucleotides 4609- |
| | 4883 of J04423 /LEN = 777 (-5 and -3 represent transcript regions 5 prime |
| | and 3 prime respectively) |
| 8574 | >control: wyeHumanDT1a: AFFX-r2-Ec-bioD-5_at; J04423; Escherichia |
| | coli /REF = J04423 /DEF = E coli bioD gene dethiobiotin synthetase |
| | corresponding to nucleotides 5024-5244 of J04423 /LEN = 676 (-5 and -3 |
| | represent transcript regions 5 prime and 3 prime respectively) |
| 8575 | >control: wyeHumanDT1a: AFFX-r2-Ec-bioD-3_at; J04423; Escherichia |
| | coli /REF = J04423 /DEF = E coli bioD gene dethiobiotin synthetase |
| | corresponding to nucleotides 5312-5559 of J04423 /LEN = 676 (-5 and -3 |
| | represent transcript regions 5 prime and 3 prime respectively) |
| 8576 | >control: wyeHumanDT1a: AFFX-r2-P1-cre-5_at; X03453; Bacteriophage |
| | /REF = X03453 /DEF = Bacteriophage P1 cre recombinase protein |
| | corresponding to nucleotides 581-1001 of X03453 /LEN = 1058 (-5 and -3 |
| | represent transcript regions 5 prime and 3 prime respectively) |
| 8577 | >control: wyeHumanDT1a: AFFX-r2-P1-cre-3_at; X03453; Bacteriophage |
| | /REF = X03453 /DEF = Bacteriophage P1 cre recombinase protein |
| | corresponding to nucleotides 1032-1270 of X03453 /LEN = 1058 (-5 and -3 |
| | represent transcript regions 5 prime and 3 prime respectively) |
| 8578 | “>control: wyeHumanDT1a: AFFX-r2-Bs-dap-5_at; L38424; Bacillus |
| | subtilis /REF = L38424 /DEF = B subtilis dapB, jojF, jojG genes |
| | corresponding to nucleotides 1439-1846 of L38424 /LEN = 1931 (-5, -M, -3 |
| | represent transcript regions 5 prime, Middle, and 3 prime respectively)” |
| 8579 | “>control: wyeHumanDT1a: AFFX-r2-Bs-dap-M_at; L38424; Bacillus |
| | subtilis /REF = L38424 /DEF = B subtilis dapB, jojF, jojG genes |
| | corresponding to nucleotides 2055-2578 of L38424 /LEN = 1931 (-5, -M, -3 |
| | represent transcript regions 5 prime, Middle, and 3 prime respectively)” |
| 8580 | “>control: wyeHumanDT1a: AFFX-r2-Bs-dap-3_at; L38424; Bacillus |
| | subtilis /REF = L38424 /DEF = B subtilis dapB, jojF, jojG genes |
| | corresponding to nucleotides 2634-3089 of L38424 /LEN = 1931 (-5, -M, -3 |
| | represent transcript regions 5 prime, Middle, and 3 prime respectively)” |
| 8581 | “>control: wyeHumanDT1a: AFFX-r2-Bs-lys-5_at; X17013; Bacillus subtilis |
| | /REF = X17013 /DEF = B subtilis lys gene for diaminopimelate decarboxylase |
| | corresponding to nucleotides 411-659 of X17013 /LEN = 1108 (-5, -M, -3 |
| | represent transcript regions 5 prime, Middle, and 3 prime respectively)” |
| 8582 | “>control: wyeHumanDT1a: AFFX-r2-Bs-lys-M_at; X17013; Bacillus |
| | subtilis /REF = X17013 /DEF = B subtilis lys gene for diaminopimelate |
| | decarboxylase corresponding to nucleotides 673-1002 of X17013 |
| | /LEN = 1108 (-5, -M, -3 represent transcript regions 5 prime, Middle, and 3 |
| | prime respectively)” |
| 8583 | “>control: wyeHumanDT1a: AFFX-r2-Bs-lys-3_at; X17013; Bacillus subtilis |
| | /REF = X17013 /DEF = B subtilis lys gene for diaminopimelate decarboxylase |
| | corresponding to nucleotides 1008-1263 of X17013 /LEN = 1108 (-5, -M, -3 |
| | represent transcript regions 5 prime, Middle, and 3 prime respectively)” |
| 8584 | “>control: wyeHumanDT1a: AFFX-r2-Bs-phe-5_at; M24537; Bacillus |
| | subtilis /REF = M24537 /DEF = B subtilis pheB, pheA genes corresponding to |
| | nucleotides 2116-2382 of M24537 /LEN = 1409 (-5, -M, -3 represent |
| | transcript regions 5 prime, Middle, and 3 prime respectively)” |
| 8585 | “>control: wyeHumanDT1a: AFFX-r2-Bs-phe-M_at; M24537; Bacillus |
| | subtilis /REF = M24537 /DEF = B subtilis pheB, pheA genes corresponding to |
| | nucleotides 2484-2875 of M24537 /LEN = 1409 (-5, -M, -3 represent |
| | transcript regions 5 prime, Middle, and 3 prime respectively)” |
| 8586 | “>control: wyeHumanDT1a: AFFX-r2-Bs-phe-3_at; M24537; Bacillus |
| | subtilis /REF = M24537 /DEF = B subtilis pheB, pheA genes corresponding to |
| | nucleotides 2897-3200 of M24537 /LEN = 1409 (-5, -M, -3 represent |
| | transcript regions 5 prime, Middle, and 3 prime respectively)” |
| 8587 | “>control: wyeHumanDT1a: AFFX-r2-Bs-thr-5_s_at; X04603; Bacillus |
| | subtilis /REF = X04603 /DEF = B subtilis thrC, thrB genes corresponding to |
| | nucleotides 288-932 of X04603 /LEN = 2073 (-5, -M, -3 represent transcript |
| | regions 5 prime, Middle, and 3 prime respectively)” |
| 8588 | “>control: wyeHumanDT1a: AFFX-r2-Bs-thr-M_s_at; X04603; Bacillus |
| | subtilis /REF = X04603 /DEF = B subtilis thrC, thrB genes corresponding to |
| | nucleotides 995-1562 of X04603 /LEN = 2073 (-5, -M, -3 represent transcript |
| | regions 5 prime, Middle, and 3 prime respectively)” |
| 8589 | “>control: wyeHumanDT1a: AFFX-r2-Bs-thr-3_s_at; X04603; Bacillus |
| | subtilis /REF = X04603 /DEF = B subtilis thrC, thrB genes corresponding to |
| | nucleotides 1689-2151 of X04603 /LEN = 2073 (-5, -M, -3 represent |
| | transcript regions 5 prime, Middle, and 3 prime respectively)” |
| 8590 | >control: wyeHumanDT1a: AFFX-HSAC07/X00351_5_at; X00351; Human |
| | mRNA for beta-actin. |
| 8591 | >control: wyeHumanDT1a: AFFX-HSAC07/X00351_M_at; X00351; |
| | Human mRNA for beta-actin. |
| 8592 | >control: wyeHumanDT1a: AFFX-HSAC07/X00351_3_at; X00351; Human |
| | mRNA for beta-actin. |
| 8593 | >control: wyeHumanDT1a: AFFX-hum_alu_at; U14573; ***ALU |
| | WARNING: Human Alu-Sq subfamily consensus sequence. |
| 8594 | “>control: wyeHumanDT1a: AFFX-HUMGAPDH/M33197_5_at; M33197; |
| | Human glyceraldehyde-3-phosphate dehydrogenase (GAPDH) mRNA, |
| | complete cds.” |
| 8595 | “>control: wyeHumanDT1a: AFFX-HUMGAPDH/M33197_M_at; M33197; |
| | Human glyceraldehyde-3-phosphate dehydrogenase (GAPDH) mRNA, |
| | complete cds.” |
| 8596 | “>control: wyeHumanDT1a: AFFX-HUMGAPDH/M33197_3_at; M33197; |
| | Human glyceraldehyde-3-phosphate dehydrogenase (GAPDH) mRNA, |
| | complete cds.” |
| 8597 | “>control: wyeHumanDT1a: AFFX-HUMISGF3A/M97935_5_at; M97935; |
| | Homo sapiens transcription factor ISGF-3 mRNA, complete cds.” |
| 8598 | “>control: wyeHumanDT1a: AFFX-HUMISGF3A/M97935_MA_at; |
| | M97935; Homo sapiens transcription factor ISGF-3 mRNA, complete cds.” |
| 8599 | “>control: wyeHumanDT1a: AFFX-HUMISGF3A/M97935_MB_at; |
| | M97935; Homo sapiens transcription factor ISGF-3 mRNA, complete cds.” |
| 8600 | “>control: wyeHumanDT1a: AFFX-HUMISGF3A/M97935_3_at; M97935; |
| | Homo sapiens transcription factor ISGF-3 mRNA, complete cds.” |
| 8601 | “>control: wyeHumanDT1a: AFFX-HUMRGE/M10098_5_at; M10098; |
| | Human 18S rRNA gene, complete.” |
| 8602 | “>control: wyeHumanDT1a: AFFX-HUMRGE/M10098_M_at; M10098; |
| | Human 18S rRNA gene, complete.” |
| 8603 | “>control: wyeHumanDT1a: AFFX-HUMRGE/M10098_3_at; M10098; |
| | Human 18S rRNA gene, complete.” |
| 8604 | “>control: wyeHumanDT1a: AFFX-M27830_5_at; M27830; Human 28S |
| | ribosomal RNA gene, complete cds.” |
| 8605 | “>control: wyeHumanDT1a: AFFX-M27830_M_at; M27830; Human 28S |
| | ribosomal RNA gene, complete cds.” |
| 8606 | “>control: wyeHumanDT1a: AFFX-M27830_3_at; M27830; Human 28S |
| | ribosomal RNA gene, complete cds.” |
| 8607 | “>control: wyeHumanDT1a: BIOB5_at; J04423; E. coli 7,8-diamino- |
| | pelargonic acid (bioA), biotin synthetase (bioB), 7-keto-8-amino-pelargonic |
| | acid synthetase (bioF), bioC protein, and dethiobiotin synthetase (bioD), |
| | complete cds.” |
| 8608 | “>control: wyeHumanDT1a: BIOBM_at; J04423; E. coli 7,8-diamino- |
| | pelargonic acid (bioA), biotin synthetase (bioB), 7-keto-8-amino-pelargonic |
| | acid synthetase (bioF), bioC protein, and dethiobiotin synthetase (bioD), |
| | complete cds.” |
| 8609 | “>control: wyeHumanDT1a: BIOB3_at; J04423; E. coli 7,8-diamino- |
| | pelargonic acid (bioA), biotin synthetase (bioB), 7-keto-8-amino-pelargonic |
| | acid synthetase (bioF), bioC protein, and dethiobiotin synthetase (bioD), |
| | complete cds.” |
| 8610 | “>control: wyeHumanDT1a: BIOC5_at; J04423; E. coli 7,8-diamino- |
| | pelargonic acid (bioA), biotin synthetase (bioB), 7-keto-8-amino-pelargonic |
| | acid synthetase (bioF), bioC protein, and dethiobiotin synthetase (bioD), |
| | complete cds.” |
| 8611 | “>control: wyeHumanDT1a: BIOC3_at; J04423; E. coli 7,8-diamino- |
| | pelargonic acid (bioA), biotin synthetase (bioB), 7-keto-8-amino-pelargonic |
| | acid synthetase (bioF), bioC protein, and dethiobiotin synthetase (bioD), |
| | complete cds.” |
| 8612 | “>control: wyeHumanDT1a: BIOD5_at; J04423; E. coli 7,8-diamino- |
| | pelargonic acid (bioA), biotin synthetase (bioB), 7-keto-8-amino-pelargonic |
| | acid synthetase (bioF), bioC protein, and dethiobiotin synthetase (bioD), |
| | complete cds.” |
| 8613 | “>control: wyeHumanDT1a: BIOD3_at; J04423; E. coli 7,8-diamino- |
| | pelargonic acid (bioA), biotin synthetase (bioB), 7-keto-8-amino-pelargonic |
| | acid synthetase (bioF), bioC protein, and dethiobiotin synthetase (bioD), |
| | complete cds.” |
| 8614 | >control: wyeHumanDT1a: CRE5_at; X03453; Bacteriophage P1 cre gene |
| | for recombinase protein. |
| 8615 | >control: wyeHumanDT1a: CRE3_at; X03453; Bacteriophage P1 cre gene |
| | for recombinase protein. |
| 8616 | “>control: wyeHumanDT1a: DAP5_at; L38424; Bacillus subtilis |
| | dihydropicolinate reductase (jojE) gene, complete cds; poly(A) polymerase |
| | (jojI) gene, complete cds; biotin acetyl-CoA-carboxylase ligase (birA) gene, |
| | complete cds; jojC, jojD, jojF, jojG, jojH genes, complete cds's.” |
| 8617 | “>control: wyeHumanDT1a: DAPM_at; L38424; Bacillus subtilis |
| | dihydropicolinate reductase (jojE) gene, complete cds; poly(A) polymerase |
| | (jojI) gene, complete cds; biotin acetyl-CoA-carboxylase ligase (birA) gene, |
| | complete cds; jojC, jojD, jojF, jojG, jojH genes, complete cds's.” |
| 8618 | “>control: wyeHumanDT1a: DAP3_at; L38424; Bacillus subtilis |
| | dihydropicolinate reductase (jojE) gene, complete cds; poly(A) polymerase |
| | (jojI) gene, complete cds; biotin acetyl-CoA-carboxylase ligase (birA) gene, |
| | complete cds; jojC, jojD, jojF, jojG, jojH genes, complete cds's.” |
| 8619 | >control: wyeHumanDT1a: LYSA5_at; X17013; Bacillus subtilis lys gene |
| | for diaminopimelate decarboxylase (EC 4.1.1.20). |
| 8620 | >control: wyeHumanDT1a: LYSAM_at; X17013; Bacillus subtilis lys gene |
| | for diaminopimelate decarboxylase (EC 4.1.1.20). |
| 8621 | >control: wyeHumanDT1a: LYSA3_at; X17013; Bacillus subtilis lys gene |
| | for diaminopimelate decarboxylase (EC 4.1.1.20). |
| 8622 | “>control: wyeHumanDT1a: PHE5_at; M24537; Bacillus subtillis |
| | sporulation protein (spoOB), GTP-binding protein (obg), phenylalanine |
| | biosynthesis associated protein (pheB), and monofunctional prephenate |
| | dehydratase (pheA) genes, complete cds.” |
| 8623 | “>control: wyeHumanDT1a: PHEM_at; M24537; Bacillus subtillis |
| | sporulation protein (spoOB), GTP-binding protein (obg), phenylalanine |
| | biosynthesis associated protein (pheB), and monofunctional prephenate |
| | dehydratase (pheA) genes, complete cds.” |
| 8624 | “>control: wyeHumanDT1a: PHE3_at; M24537; Bacillus subtillis |
| | sporulation protein (spoOB), GTP-binding protein (obg), phenylalanine |
| | biosynthesis associated protein (pheB), and monofunctional prephenate |
| | dehydratase (pheA) genes, complete cds.” |
| 8625 | “>control: wyeHumanDT1a: THR5_at; X04603; B. subtilis thrB and thrC |
| | genes for homoserine kinase and threonine synthase (EC 2.7.1.39 and EC |
| | 4.2.99.2, respectively).” |
| 8626 | “>control: wyeHumanDT1a: THRM_at; X04603; B. subtilis thrB and thrC |
| | genes for homoserine kinase and threonine synthase (EC 2.7.1.39 and EC |
| | 4.2.99.2, respectively).” |
| 8627 | “>control: wyeHumanDT1a: THR3_at; X04603; B. subtilis thrB and thrC |
| | genes for homoserine kinase and threonine synthase (EC 2.7.1.39 and EC |
| | 4.2.99.2, respectively).” |
| 8628 | “>control: wyeHumanDT1a: TRP5_at; K01391; B. subtilis tryptophan (trp) |
| | operon, complete cds.” |
| 8629 | “>control: wyeHumanDT1a: TRPM_at; K01391; B. subtilis tryptophan (trp) |
| | operon, complete cds.” |
| 8630 | “>control: wyeHumanDT1a: TRP3_at; K01391; B. subtilis tryptophan (trp) |
| | operon, complete cds.” |
| 8631 | “>control: wyeHumanDT1a: 18SRNA5_Hs_at; M10098; Human 18S rRNA |
| | gene, complete.” |
| 8632 | “>control: wyeHumanDT1a: 18SRNAM_Hs_at; M10098; Human 18S rRNA |
| | gene, complete.” |
| 8633 | “>control: wyeHumanDT1a: 18SRNA3_Hs_at; M10098; Human 18S rRNA |
| | gene, complete.” |
| 8634 | >control: wyeHumanDT1a: BACTIN5_Hs_at; X00351; Human mRNA for |
| | beta-actin. |
| 8635 | >control: wyeHumanDT1a: BACTINM_Hs_at; X00351; Human mRNA for |
| | beta-actin. |
| 8636 | >control: wyeHumanDT1a: BACTIN3_Hs_at; X00351; Human mRNA for |
| | beta-actin. |
| 8637 | “>control: wyeHumanDT1a: GAPDH5_Hs_at; M33197; Human |
| | glyceraldehyde-3-phosphate dehydrogenase (GAPDH) mRNA, complete cds.” |
| 8638 | “>control: wyeHumanDT1a: GAPDHM_Hs_at; M33197; Human |
| | glyceraldehyde-3-phosphate dehydrogenase (GAPDH) mRNA, complete cds.” |
| 8639 | “>control: wyeHumanDT1a: GAPDH3_Hs_at; M33197; Human |
| | glyceraldehyde-3-phosphate dehydrogenase (GAPDH) mRNA, complete cds.” |
| 8640 | “>control: wyeHumanDT1a: PYRCRB5_Hs_at; U04641; Human pyruvate |
| | carboxylase (PC) mRNA, complete cds.” |
| 8641 | “>control: wyeHumanDT1a: PYRCRBMA_Hs_at; U04641; Human pyruvate |
| | carboxylase (PC) mRNA, complete cds.” |
| 8642 | “>control: wyeHumanDT1a: PYRCRBMB_Hs_at; U04641; Human pyruvate |
| | carboxylase (PC) mRNA, complete cds.” |
| 8643 | “>control: wyeHumanDT1a: PYRCRB3_Hs_at; U04641; Human pyruvate |
| | carboxylase (PC) mRNA, complete cds.” |
| 8644 | “>control: wyeHumanDT1a: TRANSFR5_Hs_at; M11507; Human |
| | transferrin receptor mRNA, complete cds.” |
| 8645 | “>control: wyeHumanDT1a: TRANSFRM_Hs_at; M11507; Human |
| | transferrin receptor mRNA, complete cds.” |
| 8646 | “>control: wyeHumanDT1a: TRANSFR3_Hs_at; M11507; Human |
| | transferrin receptor mRNA, complete cds.” |

[0100] In many embodiments, the nucleic acid arrays of the present invention include at least one mismatch or perfect mismatch probe for each perfect match probe stably attached to the nucleic acid arrays. A perfect mismatch probe has the same sequence as the corresponding perfect match probe except for a homomeric substitution (A to T, T to A, G to C, and C to G) at or near the center of the perfect mismatch probe. For instance, if the perfect match probe has 2n nucleotide residues, the homomeric substitution in the perfect mismatch probe is either at the n or n+1 position, but not at both positions. If the perfect match probe has 2n+1 nucleotide residues, the homomeric substitution in the perfect mismatch probe is at the n+1 position. The center location of the mismatched residue is more likely to destabilize the duplex formed with the target sequence under hybridization conditions. Each perfect match probe and its corresponding perfect mismatch probe can be stably attached to different discrete regions on a nucleic acid array.

[0101] The present invention also features protein arrays for detecting or monitoring expression profiles of drug target genes. Each protein array of the present invention includes probes which can specifically bind to protein products of human drug target genes. In one embodiment, the probes on a protein array of the present invention are antibodies. Many of these antibodies can bind to their corresponding proteins with an affinity constant of at least 10⁴ M⁻¹, 10⁵ M⁻¹, 10⁶ M⁻¹, 10⁷ M⁻¹, or stronger. Suitable antibodies for the present invention include, but are not limited to, polyclonal antibodies, monoclonal antibodies, chimeric antibodies, single chain antibodies, synthetic antibodies, Fab fragments, or fragments produced by a Fab expression library. Other peptides, scaffolds, antibody mimics, high-affinity binders, or protein-binding ligands can also be used to construct the protein arrays of the present invention.

[0102] Numerous methods are available for immobilizing antibodies or other probes on a protein array of the present invention. Examples of these methods include, but are not limited to, diffusion (e.g., agarose or polyacrylamide gel), surface absorption (e.g., nitrocellulose or PVDF), covalent binding (e.g., silanes or aldehyde), or non-covalent affinity binding (e.g., biotin-streptavidin). Exemplary methods for protein array fabrication include, but are not limited to, ink-jetting, robotic contact printing, photolithography, or piezoelectric spotting. The method described in MacBeath and Schreiber, SCIENCE, 289: 1760-1763 (2000) can also be used. Suitable substrate supports for a protein array of the present invention include, but are not limited to, glass, membranes, mass spectrometer plates, microtiter wells, silica, or beads.

[0103] The protein-coding sequence of a drug target gene can be determined by any method known in the art. In one example, the protein-coding sequence of a drug target gene is obtained based on the sequence annotation provided by NCBI or other sequence databases. In another example, the protein-coding sequence of a drug target gene is extracted from the corresponding parent sequence using an ORF prediction program.

[0104] In one embodiment, a substantial portion of all of the probes on a protein array of the present invention consists of drug target gene probes. In another embodiment, a substantial portion of all of the probes on a protein array of the present invention consists of antibodies that specifically recognize the protein products of the parent sequences selected from Attachments A or B. The number, specificity or combination of probes on a protein array of the present invention can be determined using the same method as described above for the manufacture of nucleic acid arrays.

D. Applications

[0105] The nucleic acid arrays of the present invention can be used for expression profiling of drug target genes. The nucleic acid arrays of the present invention can also be used for the detection, identification, or evaluation of agents that can modulate the expression profiles or functions of drug target genes. In addition, the nucleic acid arrays of the present invention can be used to assess the specificity or toxicity of a drug or a drug candidate. Furthermore, the nucleic acid arrays of the present invention can be used to analyze drug-drug interactions.

[0106] Numerous protocols are available for conducing nucleic acid array analysis. Exemplary protocols include those provided by Affymetrix in connection with the use of its GeneChip arrays. Samples amenable to nucleic acid array hybridization can be prepared from any human cell or tissue. Where a nucleic acid array includes probes for non-human drug target genes, samples can be prepared for cells or tissues of the corresponding non-human species.

[0107] The sample for hybridization to a nucleic acid array can be either RNA (e.g., mRNA. or cRNA) or DNA (e.g., cDNA). Various methods are available for isolating RNA from tissues. These methods include, but are not limited to, RNeasy kits (provided by QIAGEN), MasterPure kits (provided by Epicentre Technologies), and TRIZOL (provided by Gibco BRL). The RNA isolation protocols provided by Affymetrix can also be used.

[0108] In one embodiment, the isolated RNA is amplified or labeled before being hybridized to a nucleic acid array. Suitable RNA amplification methods include, but are not limited to, reverse transcriptase PCR, isothermal amplification, ligase chain reaction, and Qbeta replicase method. The amplification products can be either cDNA or cRNA. In one embodiment, the isolated mRNA is reverse transcribed to cDNA using a reverse transcriptase and a primer consisting of oligo d(T) and a sequence encoding the phage T7 promoter. The cDNA is single stranded. The second strand of the cDNA can be synthesized using a DNA polymerase, combined with an RNase to break up the DNA/RNA hybrid. After synthesis of the double stranded cDNA, T7 RNA polymerase is added to transcribe cRNA from the second strand of the doubled stranded cDNA. In one embodiment, the originally isolated RNA can be hybridized to a nucleic acid array without amplification.

[0109] cDNA, cRNA, or other nucleic acid samples can be labeled with one or more labeling moieties to allow for detection of hybridized polynucleotide complexes. The labeling moieties can include compositions that are detectable by spectroscopic, photochemical, biochemical, bioelectronic, immunochemical, electrical, optical or chemical means. The labeling moieties include radioisotopes, chemiluminescent compounds, labeled binding proteins, heavy metal atoms, spectroscopic markers, such as fluorescent markers and dyes, magnetic labels, linked enzymes, mass spectrometry tags, spin labels, electron transfer donors and acceptors, and the like.

[0110] Nucleic acid samples can be fragmented before being labeled with detectable moieties. Exemplary methods for fragmentation include, for example, heat or ion-mediated hydrolysis.

[0111] Hybridization reactions can be performed in absolute or differential hybridization formats. In the absolute hybridization format, polynucleotides derived from one sample are hybridized to the probes in a nucleic acid array. Signals detected after the formation of hybridization complexes correlate to the polynucleotide levels in the sample. In the differential hybridization format, polynucleotides derived from two samples are labeled with different labeling moieties. A mixture of these differently labeled polynucleotides is added to a nucleic acid array. The nucleic acid array is then examined under conditions in which the emissions from the two different labels are individually detectable. In one embodiment, the fluorophores Cy3 and Cy5 (Amersham Pharmacia Biotech, Piscataway, N.J.) are used as the labeling moieties for the differential hybridization format.

[0112] Signals gathered from the nucleic acid arrays can be analyzed using commercially available software, such as those provided by Affymetrix or Agilent Technologies. Controls, such as for scan sensitivity, probe labeling and cDNA or cRNA quantitation, can be included in the hybridization experiments. Hybridization signals can be scaled or normalized before being subject to further analysis. For instance, hybridization signals for each individual probe can be normalized to take into account variations in hybridization intensities when more than one array is used under similar test conditions. Hybridization signals can also be normalized using the intensities derived from internal normalization controls contained on each array. In addition, genes with relatively consistent expression levels across the samples can be used to normalize the expression levels of other genes. In one embodiment, probes for certain maintenance genes are included in the nucleic acid array. These genes are chosen because they show stable levels of expression across a diverse set of tissues. Hybridization signals can be normalized or scaled based on the expression levels of these maintenance genes.

[0113] In one embodiment, probes for certain exogenous transcripts are included in the nucleic acid array. These transcripts can be chosen such that they show no similarity to eukaryotic transcripts. In one example, eleven exogenous transcripts at different known concentrations are spiked in to each sample. The array is first scaled to a trimmed-mean target value of 100. Based on the scaled hybridization signal of these eleven probe sets, a standard curve can be drawn such that all transcripts present in the sample can be converted from a signal value to a more meaningful concentration value. In another example, a standard curve correlating the signal value read off of the array and known frequency (molarity) can be generated when the array image is read and the probe set expression values are generated. From this standard curve, each signal value can then be converted to a parts per million or picomolarity value. The exogenous controls spiked into each sample can include, for instance, E. coli BioB-5, E. coli BioB-M, E. coli BioB-3, E. coli BioC-5, E. coli BioC-3, E. coli BioD-3, E. coli BioD-5, Bacteriophage P1 Cre-5, Bacteriophage P1 Cre-3, E. coli Dap-5, B. subtilis Dap-M, and B. subtilis Dap-3. These transcripts can be monitored by control probe sets as discussed below.

[0114] The control probes can also include probes for human non-drug target genes. These non-drug target genes include, but are not limited to, genes encoding beta-actin, glyceraldehyde-3-phosphate dehydrogenase (GAPDH), transcription factor ISGF-3, 18S rRNA, pyruvate carboxylase (PC), or transferrin receptor.

[0115] In one embodiment, the nucleic acid arrays of the present invention are used to detect, identify, or evaluate agents that can modulate the expression profiles of drug target genes. Typically, an agent of interest is first contacted with a cell preparation. mRNA is extracted from the cell preparation and then hybridized to a nucleic acid array of the present invention. Hybridization signals before and after the contact are compared to determine if the agent modulates the expression profile of any drug target gene.

[0116] Any type of agents can be evaluated using the present invention. For instance, the agent can be a small molecule, an antibody, a toxin (including a recombinant immunotoxin), a substrate or pseudosubstrate recognizable by a drug target gene product, or a naturally-occurring factor or an analog thereof. Exemplary naturally-occurring factors include, but are not limited to, endocrine factors, paracrine factors, autocrine factors, intracellular factors, and factors interacting with cell receptors. In one embodiment, the agent of interest is an antisense RNA or a double stranded RNA having RNA interference effect (RNAi). Once a lead compound is identified, its derivatives or analogs can be further screened or tested for the optimal modulation effect.

[0117] Any in vitro or in vivo assay system can be used in combination of the nucleic acid arrays of the present invention to identify agents capable of modifying the expression profile of drug target genes. Exemplary assay systems include, but are not limited to, in vitro transcription and translation systems, cell lines, primary cell cultures, and tissue cultures. In one embodiment, high-throughput screen methods or compound libraries are employed.

[0118] The modulatory effect of an agent in humans or animal models can also be evaluated using the nucleic acid arrays of the present invention. For instance,. an agent can be first administered to a human or animal. A nucleic acid sample is then prepared from the human or animal, and hybridized to a nucleic acid array of the present invention. Hybridization signals are analyzed to determine the effect of the agent on the expression of drug target genes in the human or animal.

[0119] An agent identified by the present invention may modulate the expression profile of a drug target gene by any known or unknown mechanism. In one embodiment, the agent can bind to the 5′ untranslated regulatory sequence of the drug target gene, thereby suppressing or enhancing the transcription of the gene. In another embodiment, the agent can modulate the activity of a transcription factor, which in turn controls the expression of the drug target gene. In yet another embodiment, the agent can regulate the degradation, splicing, or other modifications of the RNA transcripts of the drug target gene. In still another embodiment, the agent can affect the expression or function of another protein which is involved in a signal transduction cascade that regulates the drug target gene.

[0120] The nucleic acid arrays of the present invention can also be used to evaluate the effect of a compound on the function of a drug target gene. For instance, a drug target gene may be involved in the regulation of the expression of other drug target genes. By monitoring the expression profiles of these downstream drug target genes, the modulatory effect of a compound on the function of the upstream drug target gene can therefore be determined.

[0121] In another embodiment, the nucleic acid arrays of the present invention can be used to assess the specificity or toxicity of a drug candidate. An ideal drug candidate modulates only the specified drug target gene(s) without significantly affecting the expression and function of other drug target genes. The nucleic acid arrays of the present invention allow for the identification of compounds that only modulate particular drug target genes but not others. Accordingly, the present invention provides an effective and inexpensive way to conduct the drug specificity/toxicity analysis, thereby accelerating the drug development process.

[0122] In yet another embodiment, the nucleic acid arrays of the present invention can be used to investigate drug-drug interactions. Simultaneous administration of several drugs is often necessary to achieve desired therapeutic objectives. For instance, in cancer chemotherapy, antimicrobial therapy or AIDS treatment, drug combination is usually desirable in order to delay the emergence of.drug resistant tumor cells, microbes or viruses. However, drug combination may also cause unexpected adverse effects. These adverse effects can be the results of an unintended activation or suppression of certain signaling pathways. The expression profiles of the components in these signaling pathways can be monitored using the nucleic acid arrays of the present invention, which allows one to determine if a drug combination will produce any unintended effect in these pathways.

[0123] The hybridization data generated from the nucleic acid arrays of the present invention can be stored in a database for future analysis. This database can be used as an informational translator that takes information on a gene directly to a compound that has been found to affect the expression of that gene. For instance, if the database reveals that compound X alters the expression of drug target gene Y, and a paper is published reporting that the expression of drug target gene Y is sensitive to a particular signal transduction pathway, then compound X becomes a candidate for modulataing that signal transduction pathway. This effectively leverages the value of the publicly available data on the identification of potential drug candidates.

[0124] The agents identified in the present invention can be used to treat patients who have diseases or conditions that are associated with abnormal expression of drug target genes. These agents can be used to correct or reduce the abnormalities in the expression profiles of drug target genes. As used herein, treatment includes therapeutic treatments as well as prophylactic or preventative measures. Those in need of treatment can include individuals already having a particular medical disorder as well as those who may ultimately acquire the disorder (i.e., those needing preventative measures).

[0125] The present invention features pharmaceutical compositions comprising the agents identified by the present invention. Each pharmaceutical composition includes an effective amount of an agent that is sufficient to treat the patient or animal in need thereof. The pharmaceutical composition can also include a pharmaceutically acceptable carrier. Non-limiting examples of suitable pharmaceutically acceptable carriers include solvents, solubilizers, fillers, stabilizers, binders, absorbents, bases, buffering agents, lubricants, controlled release vehicles, diluents, emulsifying agents, humectants, lubricants, dispersion media, coatings, antibacterial or antifungal agents, isotonic and absorption delaying agents, and the like, that are compatible with pharmaceutical administration. The use of these media and carriers for pharmaceutically active substances is well-known in the art.

[0126] A pharmaceutical composition of the present invention can be formulated to be compatible with its intended route of administration. Examples of routes of administration include parenteral, intravenous, intradermal, subcutaneous, oral, inhalation, transdermal, rectal, transmucosal, topical, and systemic administration. In one example, the administration is carried out by using an implant.

[0127] Solutions or suspensions used for parenteral, intradermal, or subcutaneous application can include the following components: a sterile diluent such as water for injection, saline solution, fixed oils, polyethylene glycols, glycerine; propylene glycol or other synthetic solvents; antibacterial agents such as benzyl alcohol or methyl parabens; antioxidants such as ascorbic acid or sodium bisulfate; chelating agents such as ethylenediaminetetraacetic acid; buffers such as acetates, citrates or phosphates; and agents for the adjustment of tonicity such as sodium chloride or dextrose. pH can be adjusted with acids or bases, such as hydrochloric acid or sodium hydroxide. The parenteral preparation can be enclosed in ampoules, disposable syringes or multiple dose vials made of glass or plastic.

[0128] A pharmaceutical composition can be administered to a patient in a sufficient dosage such that the active compound in the pharmaceutical composition can modulate the expression profile of a drug target gene of interest. Suitable therapeutic dosages for a compound can range, for example, from 5 mg to 100 mg, from 15 mg to 85 mg, from 30 mg to 70 mg, or from 40 mg to 60 mg. Dosages below 5 mg or above 100 mg can also be used. Compounds can be administered in one dose or multiple doses. The doses can be administered at intervals such as once daily, once weekly, or once monthly. Dosage schedules for administration of a compound can be adjusted based on, for example, the potency of the compound, the half-life of the compound, and the severity of the patient's condition. In one embodiment, the compound is administered as a bolus dose, to maximize its circulating level. In another embodiment, continuous infusions are used after the bolus dose.

[0129] Toxicity and therapeutic efficacy of a compound can be determined by standard pharmaceutical procedures in cell culture or experimental animal models. For instance, the LD₅₀ (the dose lethal to 50% of the population) and the ED₅₀ (the dose therapeutically effective in 50% of the population) can be determined. The dose ratio between toxic and therapeutic effects is the therapeutic index, and can be expressed as the ratio LD₅₀/ED₅₀. In many instances, compounds which exhibit large therapeutic indices are selected.

[0130] The data obtained from cell culture assays and animal studies can be used in formulating a range of dosages for use in humans. The dosage of such compounds may lie within a range of circulating concentrations that exhibit an ED₅₀ with little or no toxicity. The dosage may vary within this range depending upon the dosage form employed and the route of administration utilized. For any compound used according to the present invention, a therapeutically effective dose can be estimated initially from cell culture assays. A dose may be formulated in animal models to achieve a circulating plasma concentration range that exhibits an IC₅₀ (i.e., the concentration of the test inhibitor which achieves a half-maximal inhibition of symptoms) as determined by cell culture assays. Levels in plasma may be measured, for example, by high performance liquid chromatography. The effects of any particular dosage can be monitored by suitable bioassays. Examples of suitable bioassays include DNA replication assays, transcription-based assays, GDF protein/receptor binding assays, creatine kinase assays, assays based on the differentiation of pre-adipocytes, assays based on glucose uptake in adipocytes, and immunological assays.

[0131] The dosage regimen for the administration of composition can be determined by the attending physician based on various factors which modify the action of the compound, the site of pathology, the severity of disease, the patient's age, sex, and diet, the severity of any inflammation, time of administration and other clinical factors. In many instances, systemic or injectable administration is initiated at a dose which is minimally effective, and the dose is increased over a preselected time course until a positive effect is observed. Subsequently, incremental increases in dosage is made limiting to levels that produce a corresponding increase in effect while taking into account any adverse affects that may appear. The addition of other known factors to a final composition may also affect the dosage.

[0132] The present invention also contemplates a collection of polynucleotides. In one embodiment, the polynucleotide collection comprises at least 1, 2, 5, 10, 50, 100, 500, 1,000, or more probes capable of hybridizing under stringent or nucleic acid array hybridization conditions to the tiling sequences selected from Attachment C, or the complements thereof. In another embodiment, the polynucleotide collection comprises at least 1, 2, 5, 10, 50, 100, 500, 1,000, or more tiling sequences selected from Attachment C, or the complements thereof. In yet another embodiment, the polynucleotide collection comprises at least 1, 2, 5, 10, 50, 100, 500, 1,000, or more sequences selected from SEQ ID NOs: 1-4,272, or the complements thereof.

[0133] Furthermore, the present invention contemplates a collection of probes capable of binding to the protein products encoded by the parent sequences selected from Attachments A or B. These probes can be antibodies or other high-affinity binders. In one embodiment, the probe collection includes at least 1, 2, 5, 10, 50, 100, 500, 1,000, or more antibodies, each of which is capable of binding to the protein product of a different parent sequence selected from Attachments A or B.

[0134] It should be understood that the above-described embodiments and the following examples are given by way of illustration, not limitation. Various changes and modifications within the scope of the present invention will become apparent to those skilled in the art from the present description.

### E. EXAMPLES

### Example 1

### Nucleic Acid Array

[0135] The tiling sequences depicted in Attachment C were submitted to Affymetrix for custom array design. Affymetrix selected probes for each tiling sequence using its probe-picking algorithm. Non-ambiguous probes with 25 bases in length were selected. Sixty-eight probe-pairs were requested for each tiling sequence with a minimum number of acceptable probe-pairs set to thirty-five. The final array was directed to 4,180 human transcripts and 81 endogenous and exogenous control probes sets. The perfect match probes on the final array are shown in Attachment G and depicted in SEQ ID NOs: 116,338-303,284. The qualifier of each probe, which indicates the corresponding tiling sequence from which the probe was derived, is also provided in Attachment G.

### Example 2

### Nucleic Acid Array Hybridization

[0136] 10 μg of biotin-labeled sample DNA/RNA is diluted in 1×MES buffer with 100 μg/ml herring sperm DNA and 50 μg/ml acetylated BSA. To normalize arrays to each other and to estimate the sensitivity of the nucleic acid arrays, in vitro synthesized transcripts of control genes are included in each hybridization reaction. The abundance of these transcripts can range from 1:300,000 (3 ppm) to 1:1000 (1000 ppm) stated in terms of the number of control transcripts per total transcripts. As determined by the signal response from these control transcripts, the sensitivity of detection of the arrays can range, for example, between about 1:300,000 and 1:100,000 copies/million. Labeled DNA/RNA are denatured at 99° C. for 5 minutes and then 45° C. for 5 minutes and hybridized to the nucleic array of Example 1. The array is hybridized for 16 hours at 45° C. The hybridization buffer includes 100 mM MES, 1 M [Na⁺], 20 mM EDTA, and 0.01% Tween 20. After hybridization, the cartridge(s) is washed extensively with wash buffer (6×SSPET), for instance, three 10-minute washes at room temperature. The washed cartridge(s) is then stained with phycoerythrin coupled to streptavidin.

[0137] 12×MES stock contains 1.22 M MES and 0.89 M [Na⁺]. For 1000 ml, the stock can be prepared by mixing 70.4 g MES free acid monohydrate, 193.3 g MES sodium salt and 800 ml of molecular biology grade water, and adjusting volume to 1000 ml. The pH is between about 6.5 and about 6.7. 2× hybridization buffer can be prepared by mixing 8.3 ml of 12×MES stock, 17.7 ml of 5 M NaCl, 4.0 ml of 0.5 M EDTA, 0.1 ml of 10% Tween 20 and 19.9 ml of water. 6×SSPET contains 0.9 M NaCl, 60 mM NaH₂PO₄, 6 mM EDTA, pH 7.4, and 0.005% Triton X-100. In some cases, the wash buffer can be replaced with a more stringent wash buffer, which can be prepared by mixing 83.3 ml of 12×MES stock, 5.2 ml of 5 M NaCl, 1.0 ml of 10% Tween 20 and 910.5 ml of water.

[0138] The foregoing description of the present invention provides illustration and description, but is not intended to be exhaustive or to limit the invention to the precise one disclosed. Modifications and variations are possible consistent with the above teachings or may be acquired from practice of the invention. Thus, it is noted that the scope of the invention is defined by the claims and their equivalents.

1. A nucleic acid array comprising polynucleotide probes stably attached to one or more substrate supports, wherein a substantial portion of all polynucleotide probes that are stably attached to the nucleic acid array consists of probes for drug target genes.

2. The nucleic acid array according to claim 1, wherein each said drug target gene is selected from the group consisting of kinase genes, phosphatase genes, protease genes, G-protein coupled receptor genes, nuclear hormone receptor genes, and ion channel genes.

3. The nucleic acid array according to claim 2, wherein said substantial portion of all polynucleotide probes includes at least 25% of all polynucleotide probes that are stably attached to the nucleic acid array.

4. The nucleic acid array according to claim 2, wherein said substantial portion of all polynucleotide probes includes at least 45% of all polynucleotide probes that are stably attached to the nucleic acid array.

5. The nucleic acid array according to claim 1, wherein said substantial portion of all polynucleotide probes includes probes for at least ten kinase genes, probes for at least ten phosphatase genes, probes for at least ten protease genes, probes for at least ten G-protein coupled receptor genes, probes for at least ten nuclear hormone receptor genes, and probes for at least ten ion channel genes.

6. The nucleic acid array according to claim 1, wherein said substantial portion of all polynucleotide probes includes probes for at least fifty kinase genes, probes for at least fifty phosphatase genes, probes for at least fifty protease genes, probes for at least fifty G-protein coupled receptor genes, probes for at least fifty nuclear hormone receptor genes, and probes for at least fifty ion channel genes.

7. The nucleic acid array according to claim 6, wherein said substantial portion of all polynucleotide probes is stably attached to one substrate support.

8. The nucleic acid array according to claim 7, wherein said substantial portion of all polynucleotide probes includes one or more probes for an ADAMTS4 gene.

9. The nucleic acid array according to claim 1, wherein said substantial portion of all polynucleotide probes comprises at least 500 probes, each of which is capable of hybridizing under stringent or nucleic acid array hybridization conditions to a different respective tiling sequence selected from Attachment C, or the complement thereof.

10. The nucleic acid array according to claim 9, wherein said substantial portion of all polynucleotide probes comprises at least 35 probes for each said different respective tiling sequence, or the complement thereof.

11. The nucleic acid array according to claim 10, comprising a mismatch probe for each probe selected from said substantial portion of all polynucleotide probes.

12. The nucleic acid array according to claim 1, wherein said substantial portion of all polynucleotide probes comprises each probe selected from Attachment F, or the complement thereof.

13. A method for identifying or evaluating agents capable of modulating expression profiles of drug target genes, comprising the steps of:
contacting one or more cells with a candidate molecule;
preparing a nucleic acid sample from said one or more cells; and
hybridizing the nucleic acid sample to the nucleic acid array of claim 2 to detect any change in hybridization signals before and after said contacting,
wherein a change in the hybridization signals of a drug target gene is indicative that the candidate molecule is capable of modulating the expression profile of said drug target gene.

14. The method according to claim 13, further comprises the step of administering an effective amount of the candidate molecule to a mammal in need thereof, wherein the candidate molecule is capable of modulating the expression profile of said drug target gene which is selected from the group consisting of a kinase gene, a phosphatase gene, a protease gene, a G-protein coupled receptor gene, a nuclear hormone receptor gene, and an ion channel gene.

15. A method for identifying or evaluating agents capable of modulating expression profiles of drug target genes, comprising the steps of:
administering an agent to a human or animal;
preparing a nucleic acid sample from said human or animal; and
hybridizing the nucleic acid sample to the nucleic acid array of claim 2 to detect any change in hybridization signals before and after said administering,
wherein a change in the hybridization signals of a drug target gene is indicative that the candidate molecule is capable of modulating the expression profile of said drug target gene in said human or animal.

16. A nucleic acid array comprising polynucleotide probes stably attached to one or more substrate supports, wherein a substantial portion of all polynucleotide probes that are stably attached to the nucleic acid array is capable of hybridizing under stringent or nucleic acid array hybridization conditions to corresponding tiling sequences selected from Attachment C, or the complements thereof.

17. The nucleic acid array according to claim 16, wherein said substantial portion of all polynucleotide probes includes at least 100 probes, each of which is capable of hybridizing under stringent or nucleic acid array hybridization conditions to a different corresponding tiling sequence selected from Attachment C, or the complement thereof.

18. The nucleic acid array according to claim 17, wherein said substantial portion of all polynucleotide probes includes at least 45% of all polynucleotide probes that are stably attached to the nucleic acid array.

19. A method, comprising the steps of:
selecting a plurality of polynucleotides, each said polynucleotide capable of hybridizing under stringent or nucleic acid array hybridization conditions to a different respective drug target gene; and
stably attaching said plurality of polynucleotides to one or more substrate supports, wherein a substantial portion of all polynucleotide probes that are stably attached to the nucleic acid array consists of said plurality of polynucleotides.

20. A probe collection comprising:
at least one polynucleotide capable of hybridizing under stringent or nucleic acid array hybridization conditions to a tiling sequence selected from Attachment C, or the complement thereof; or
at least one probe capable of binding to a protein product encoded by a parent sequence selected from Attachments A or B.

The application's sequence listing, which the Patent Office published only in electronic form, follows.

SEQUENCE LISTING (303284 sequences)

SEQ ID NO: 1 - DNA, 600 bp, Homo sapiens
ttttccccagacggcagccgcctctacacacaccaggtggccaccaggtggtaccgagcccccgagctcctgtatggygcccgccagtatgaccagggcgtcgatctgtggtctgtgggctgcatcatgggggagctgttgaatgggtccccccttttcccgggcaagaacgatattgaacagctttgctatgtgcttcgcatcttgggcaccccaaaccctcaagtctggccggagctcactgagctgccggactacaacaagatctcctttaaggagcaggtgcccatgcccctggaggaggtgctgcctgacgtctctccccaggcattggatctgctgggtcaattccttctctaccctcctcaccagcgcatcgcagcttccaaggctctcctccatcagtacttcttcacagctcccctgcctgcccatccatctgagctgccgrttcctcagcgtctagggggacctgcccccaaggcccatccagggcccccccacatccatgacttccacgtggaccggcctcttgaggagtcgctgttgaacccagagctgattcggcccttcatcctggaggggtgaggatcctgagaa

SEQ ID NO: 2 - DNA, 1016 bp, Homo sapiens
gtcgacccacgcgtccggcggctcctctacacaggcaagacagcctgtaaccatgccgacgaggtctggccaggcctctatctcggagaccaggacatggctaacaaccgccgggagcttcgccgcctgggcatcacgcacgtcctcaatgcctcacacagccggtggcgaggcacgcccgaggcctatgaggggctgggcatccgctacctgggtgttgaggcccacgactcgccagcctttgacatgagcatccacttccagacggctgccgacttcatccaccgggcgctgagccagccaggagggaagatcctggtgcattgtgctgtgggcgtgagccgatccgccaccctggtactggcctacctcatgctgtaccaccaccttaccctcgtggaggccatcaagaaagtcaaagaccaccgaggagaggccgagccccaggccactgtcactctttgtgggaggggacggggagtgaggttgggcagtgtggtggatgggcacccaggaagggttgaccagggaaggaggcagctaggctgtagatggaagatggtcctgggattcgaacaccgctgggatctggccagggtgctccctgggattcacagtcccttcccctctttgtgcccaagtgtttccctctctccctcaccaaaaacaaaaagggccatctctgcccctgcactttgtgcagaaagtcagggatacggcaagcatgaatgcaatggtgtagagttgtgtgaaacccctagcatagagacagacagcgaagagatggtgtgaaaagcttgcagaaccagacagagaaccccacagactttccactccaagcacaggaggaggtagctagcgtgtgagggttggcactaggcccacggctgctgcttgggccaaaaacatacagaggtgcatggctggcagtcttgaaattgtcactcgcttactggatccaagcgtctcgaggataaataaagatcatgaaaaaaaaaaaaaaaaagggcggccgc

SEQ ID NO: 3 - DNA, 497 bp, Homo sapiens
  misc_feature (396)..(396): n is a, c, g, or t
tctgcctccactgctctgtgctgggatcatggaacttgcactgctgtgtgggctggtggtgatggctggtgtgattccaatccagggcgggatcctgaacctgaacaagatggtcaagcaagtgactgggaaaatgcccatcctctcctactggccctacggctgtcactgcggactaggtggcagaggccaacccaaagatgccacggactggtgctgccagacccatgactgctgctatgaccacctgaagacccaggggtgcggcatctacaaggacaacaacaaaagcagcatacattgtatggatttatctcaacgctattgtttaatggctgtgtttaatgtgatctatctggaaaatgaggactccgaataaaaagctattactawttnaaaaaaaaaaaaaaaaaaaaaaaaaaaaaaaaaaaaaaaaaaaaaaaaaaaaaaaaaaaaaaaaaaaaaaaaaaaaaaaaaaaaaaaaaaaaaaaaaaaaa

SEQ ID NO: 4 - DNA, 1400 bp, Homo sapiens
  misc_feature (947)..(947): n is a, c, g, or t
  misc_feature (965)..(965): n is a, c, g, or t
  misc_feature (985)..(985): n is a, c, g, or t
  misc_feature (1321)..(1322): n is a, c, g, or t
  misc_feature (1339)..(1339): n is a, c, g, or t
  misc_feature (1354)..(1355): n is a, c, g, or t
agaaatgttactgtgtcacttttccctcgggaggaaattgtttggtaatatagaaaggtgtatgcaagttgaatttgctgactccagcacagttaaaaggtcaatattcttttgacctgattaatcagtcagaaagtccctataggatagagctggcagctgagaaattttaaaggtaattgataattagtatttgtaactttttaaagggctctttgtatagcagaggatctcatttgactttgttttgatgagggtgatgccctctcttatgtggtacaataccattaaccaaaggtaggtgtccatgcagattttattggcagctgttttattgccattcaactagggaaatgaagaaatcacgcagccttttggttaaatggcagtcaaaattttcctcagtgtatttagtgtgttcagtgatgatatcactggttcccaactagatgcttgttggccacgggaagggaaatgacttgttctaattctaggttcacagaggtatgagaagcctgaactgaagaccattttcaagagggacggtatttatgaatcagggttaggctccatatttaaagatagagccagttttttttttaaatagaacccaaattgtgtaaaaatgttaattgggttttttaaacattgttttatcaagtcactgttaagtagaagaaagccatggtaaactgatacataacctaaattataaaagcagaaacctaactcactcgtcaagggaagttaccttttgaggaaagttaaagtacttttttccctatctgtatctatagcaacaacccagaacttacaaacttctccaaagattttattgattgttatatcaaatcagaatgtaaacatgaactcttgcatatatttaaaattgtgttggaacatttgaacatgaatgctgtttgggtacttaagaaattrattcagtnggattatcattatgtganactggcagattgcagtgcanccttatgccaataaaatgtaatttarcagccccagatattgttgaatattcaacaataacaagaaaagcttttcatctaagttttatgctttaattttttttctttttttttctttttcttttgtttccttggtactaattttaatttttatttggaagggagcagtataaagcttatttgtatttagtagtgtatctcatagatacagacaaggcaagagatgataagctgtttaaatagtgkttaatattgattgggggtggggagaaagaaaaagtgtattacttaaagatactatatacsktttktatatcattaaatctttaaaagaaatnnaataaatttattgtttncaaaaaaaaaacccnntaaaaaaaaaagggcggcccctctagaggatccctcgaggggccc

SEQ ID NO: 5 - DNA, 600 bp, Homo sapiens
ctgctgctcctctaggcctcactcaacaaccaagcgcctggaggacgggacagatggacagacagccaccctgagaacccctctgggaaaatctattcctgccaccactgggcaaacagaagaatttttctgtctttggagagtattttagaaactccaatgaaagacactgtttctcctgttggctcacagggctgaaaggggcttttgtcctcctgggtcagggagaacgcggggaccccagaaaggtcagccttcctgaggatgggcaacccccaggtctgcagctccaggtacatatcacgcgcacagcctggcagcctggccctcctggtgcccactcccgccagcccctgcctcgaggactgatactgcagtgactgccgtcagctccgactgccgctgagaagggttgatcctgcatctgggtttgtttacagcaattcctggactcgggggtattttggtcacagggtggttttggtttagggggtttgtttgttgggttgttttttgttttttggttttttttaatgacaatgaagtgacactttgacatttccaaaaaaaaaaaaaaaaaaaaaaaaaaaaaaaaaaaaa

SEQ ID NO: 6 - DNA, 600 bp, Homo sapiens; identical to SEQ ID NO: 5

SEQ ID NO: 7 - DNA, 316 bp, Homo sapiens
gctgccctgggtgaacagcagtgaggctyggcccccaactcagtcctgtccctgccgcttccatccaggcactgaaggaggcgtccgagagtgctcggcaggacttccarcgtgaggctgagctgctcaccatgctgcagcaccagcacatcgtgcgcttcttyggcgtctgcaccgagggccgccccctgctcatggtcttcgagtatatgcggcacggggacctcaaccgcttcctccggtaccagcacctggcctcagcgctggccccggcccctggctctgggccccgtcttcccttccctatagacatccc

SEQ ID NO: 8 - DNA, 1400 bp, Homo sapiens
gctttccttctaatctaaatgtagaagctgggagctatgtttcctttcactgtagagctactgcagaaccacagcctgaaatctactggataacaccttctggtcaaaaactcttgcctaataccctgacagacaagttctatgtccattctgagggaacactagatataaatggcgtaactcccaaagaagggggtttatatacttgtatagcaactaacctagttggcgctgacttgaagtctgttatgatcaaagtggatggatcttttccacaagataacaatggctctttgaatattaaaataagagatattcaggccaattcagttttggtgtcctggaaagcaagttctaaaattctcaaatctagtgttaaatggacagcctttgtcaagactgaaaattctcatgctgcgcaaagtgctcgaataccatctgatgtcaaggtatataatcttactcatctgaatccatcaactgagtataaaatttgtattgatattcccaccatctatcagaaaaacagaaaaaaatgtgtaaatgtcaccaccaaaggtttgcaccctgatcaaaaagagtatgaaaagaataataccacaacacttatggcctgtcttggaggccttctggggattattggtgtgatatgtcttatcagctgcctctctccagaaatgaactgtgatggtggacacagctatgtgaggaattacttacagaaaccaacctttgcattaggtgagctttatcctcctctgataaatctctgggaagcaggaaaagaaaaaagtacatcactgaaagtaaaagcaactgttataggtttaccaacaaatatgtcctaaaaaccaccaaggaaacctactccaaaaatgaacaaaaaaaaaaaaagcgaaagactgcagttgtgctaaaaacaaaacaaaacaaacaaacaaamaaaaaarwaaaaaaagattactttcgagagagaagtttaagcttcaccaatgctgctcctgaccaatggaaatatgtacaacttcagcattttaagtaactggcttcaaggggtactgtggcaaccaaataaaataactccattttctaaaactttcatgtaacttttatgtctggactacagttcaagtggacaaaaacatttctgtattttttttaagtaaataagagtagttgaactgagcaatacctcctcctgtgttgtattacacatattagccacgagtttttgcagtgaccagataaacttgaattgacacgtggtgtaataaaatggacaaattctgtagagtagacacagtgagtatgtggacctcttttataaggaaaaatacattttggattaaaatcaattgcttctgtcttgttttgtttctaaataaagaataatttctggg

SEQ ID NO: 9 - DNA, 1187 bp, Homo sapiens
gctcacagagcccacagctccatggtaggagtcaatctgccacagaaggctggtgggtttttgatgaagaaggagctgaactactttgcaaaggccttggagagcccagagcgacccttcctggccatyctgggcggagctaaagttgcagacmagatccagctcatcaataatatgctggacaaagtcaatgagatgattattggtggtggaatggcttttaccttccttaaggtgctcaacamcatggagattggcacttctctgkttgatgaararggrgccmagattgtcaaagacctaatgtccaaagctgagaaraakggtgtgaagattaccttgcctgttgactttgtcactgytgacaaktktgatgagaatgccaagactggccaagccactgtggcttctggcrtacctgctggctggatgggcttggactgtggtcctgaaagcagcaagaagtatgctgaggctgtcactcgggctaagcagattgtgtggaatggtcctgtgggggtatttgaatgggaagcttttgcccggggaaccaaagctctcatggatgaggtggtgaaagccacttctaggggctgcatcaccatcataggtggtggagacactgccacttgctgtgccaaatggaacacggaggataaagtcagccatgtgagcactgggggtggtgccagtttggagctcctggaaggtaaagtccttcctggggtggatgctctcagcaatatttagtactttcctgccttttagttcctgtgcacagcccctaagtcaacttagcattttctgcatctccacttggcattagctaaaaccttccatgtcaagattcagctagtggccaagagatgcagtgccaggaacccttaaacagttgcacagcatctcagctcatcttcactgcaccctggatttgcatacattcttcaagatcccatttgaattttttagtgactaaaccattgtgcattctagagtgcatatatttatattttgcctgttaaaaagaaagtgagcagtgttagcttagttctcttttgatgtaggttattatgattagctttgtcactgtttcactactcagcatggaaacaagatgaaattccatttgtaggtagtgagacaaaattgatgatccattaagtaaacaataaaagtgtccattgaaa

SEQ ID NO: 10 - DNA, 1187 bp, Homo sapiens; identical to SEQ ID NO: 9

SEQ ID NO: 11 - DNA, 600 bp, Homo sapiens
  misc_feature (550)..(550): n is a, c, g, or t
attctaacttttatttttatcagttacacatgatcataatttaaaaagtcaaggcttataacaaaaaagccccagcccattcctcccattcaagattcccactccccagaggtgaccactttcaactcttgagtttttcaggtatatacctccatgtttctaagtaatatgcttatattgttcacttcttttttttttattttttaaagaaatctatttcataccatggaggaaggctctgttccacatatatttccacttcttcattctctcggtatagttttgtcacaattatagattagatcaaaagtctacataactaatacagctgagctatgtagtatgctatgattaaatttacttatgtaacttttattgtctttggcattaacagtgtttcaaaaaattttctgtgtatacccatcagtgattcattcccaaatcttctagaagcataagtgtctcaatatattaaaacatattgaataatccttgttagagttatccctgcaggagtccttagtgctcctttatccaatttgtacttgangccctctaggcagggtgtacagctagctgttgctctggtatttcctataa

SEQ ID NO: 12 - DNA, 600 bp, Homo sapiens; identical to SEQ ID NO: 11
  misc_feature (550)..(550): n is a, c, g, or t

SEQ ID NO: 13 - DNA, 600 bp, Homo sapiens
gatgcagcccctagaagtggctttcaccacctcatccatgagagctttggttccccgggcaaaagcttcccattcaaatacccccacaggaccattccacacaatctgcttagcccgagtgacagcctcagcatacttcttgctgctttcaggaccacagtccaagcccatccagccagcaggtaygccagaagccacagtggcttggccagtcttggcattctcatcamamttgtcarcagtgacaaagtcaacaggcaaggtaatcttcacaccmttyttctcagctttggacattaggtctttgacaatctkggcyccytyttcatcaamcagagaagtgccaatctccatgktgttgagcaccttaaggaaggtaaaagccattccaccaccaataatcatctcattgactttgtccagcatattattgatgagctggatctkgtctgcaactttagctccgcccagratggccaggaagggtcgctctgggctctccaaggcctttgcaaagtagttcagctccttcttcatcaaaaacccaccagccttctgtggcagattgactcctaccatggagctgtgggctctgtgagc

SEQ ID NO: 14 - DNA, 600 bp, Homo sapiens; identical to SEQ ID NO: 13

SEQ ID NO: 15 - DNA, 1400 bp, Homo sapiens
ggtcaggcctggctcataggctcttcctggccccatcctgtcccacagaggcctgcccgacagccccagcaacttgctgcgcttcatccaggaggtgcacgcacattacctgcatcagcggccgctgcacacgcccatcattgtgcactgcaggtagagggtgggcctgagggtctctcctctatgggctcttggcctagcctcataccccggcctcataaccccttcttggcacagctctggtgtgggccgcacgggagcctttgcactgctctatgcagctgtgcaggaggtggaggctgggaacggaatccctgagctgcctcagctggtgcggcgcatgcggcagcagagaaagcacatgctgcaggagaaggtgatgatctgggcatatggggctgggatgggccttctgtcccagggtgacgggcccctgcccagctgacctggccaaatgcacctgtgcagctgcacctcaggttctgctatgaggcagtggtgagacacgtggagcaggtcctgcagcgccatggtgtgcctcctccatgcaaacccttggccagtgcaagcatcagccagaaggtgaggaaggttccgtggaagctgctgggagagccacagccttgggaatccctctcctcactcactctgtcttctcagaaccaccttcctcaggactcccaggacctggtcctcggtggggatgtgcccatcagctccatccaggccaccattgccaagctcagcattcggcctcctggggggttggagtccccggttgccagcttgccaggccctgcagagcccccaggcctcccgccagccagcctcccagagtctaccccaatcccatcttcctccccaccccccctttcctccccactacctgaggctccccagcctaaggaggagccgccagtgcctgaagcccccagctcggggcccccctcctcctccctggaattgctggcctccttgaccccagaggccttctccctggacagctccctgcggggcaaacagcggatgagcaagcataactttctgcaggcccataacgggcaagggctgcgggccacccggccytctgacgaccccctcagccttctggatccactctggacactcaacaagacctgaacaggttttgcctacctggtccttacactacatcatcatcatctcatgcccacctgcccacacccagcagagcttctcagtgggcacagtctcttactcccatttctgctgcctttggccctgcctggcccagcctgcacccctgtggggtggaaatgtactgcaggctctgggtcaggttctgctcctttatgggacccgacatttttcagctctttgctattgaaataataaaccaccctgttctgtgaaaaaaaaaa

SEQ ID NO: 16 - DNA, 1400 bp, Homo sapiens; identical to SEQ ID NO: 15

SEQ ID NO: 17 - DNA, 1400 bp, Homo sapiens
agctcatcgacttcggttcgggtgcgctgctcaaggacacggtctacaccgacttcgacggcamccgagtgtacagccccccggagtggatccgcyamcamcgckamcamgggcgctcggccamcgtgtggtcgctgggcgtgcttctctacgatatggtgtgtggggacatccccttcgagcaggacgaggagatcctccgaggccgcctgctcttccggaggagggtctctccagagtgccagcagctgatccggtggtgcctgtccctgcggccctcagagcggccgtcgctggatcagattgcggcccatccctggatgctgggggctgacgggggcgycccggagagctgtgacctgcggctgtgcaccctcgaccctgatgacgtggccagcaccacgtccagcagcgagagcttgtgaggagctgcacctgactgggagctaggggaccacctgccttggccagacctgggacgcccccagaccctgactttytcctgcgtgggccgtctcctcctgcggaagcagtgacctctgacccctggtgaccttcgctttgagtgccttttgaacgctggtcccgcgggacttggttttctcaagctctgtctgtccaaagacgctccggtcgaggtcccgcctgccctgggtggatacttgaaccccagacgcccctctgtgctgctgtgtccggaggcggccttcccatctgcctgcccacccggagctctttccgccggcgcagggtcccaagcccacctcccgccctcagtcctgcggtgtgcgtctgggcacgtcctgcacacacaatgcaagtcctggcytccgcgcccgcccgcccacgcgagccgtacccgccgccaactctgttatttatggtgtgaccccctggaggtgccctcggcccaccggggctatttattgtttaatttatttgttgaggttatttcctctgagcagtctgcctctcccaagccccaggggacagtggggaggcaggggagggggtggctgtggtccagggaccccaggccctgattcctgtgcctggcgtctgtcctggccccgcctgtcagaagatgaacatgtatagtggctaacttaaggggagtgggtgaccctgacacttccaggcactgtgcccagggtttgggttttaaattattgactttgtacagtctgcttgtgggctctgaaagctggggtggggccagagcctgagcgtttaatttattcagtacctgtgtttgtgtgaatgcggtgtgtgcaggcatcgcagatgggggttctttcagttcaaaagtgagatgtctggagatcatatttttttatacaggtatttcaattaaaatgtttttgtacatagaaaaaaaaaaaaaaaaaaaaaaagggcgg

SEQ ID NO: 18 - DNA, 600 bp, Homo sapiens
agctgctgctcccagccaccttcctctctgcagagcttgcccttctgcagaagtcctttcatgtgaatatccaggatacaatgattggtgagctgcccccacaaaccaccaagaccctggctcgcttcattcctgaagtggctgtagcttatcccaagtcaaagcccttgacgacccagatcaagataaagaagcctcccaaggtcactatgaagacaggcaagagcctgctgcacctccacagcaccctggagatgttcgcagctcggtggcggagcaaggctccaatgtccctctttctcctagaagtgcacttcaatctgaaggtccagtactcagtgcaygagaaccagctgcagatggccacttctttggacagattactgagcttgtcccggaagtcctcatcgattggcaacttcaatgagagggaattaactggcttcatcaccagctatctcgaagaagcctacatcccagttgtcaatgatgtgcttcaagtggggctcccactcccggactttctggccatgaattacaayctggctgagctggacatagtagagmwtgsssksatsmtggaacytgmmgcwsrkmtga

SEQ ID NO: 19 - DNA, 600 bp, Homo sapiens; identical to SEQ ID NO: 18

SEQ ID NO: 20 - DNA, 600 bp, Homo sapiens
ggaggcagattaaggaaccagtgaaatttgttccacaggatgtgccaccagaacccaagaagattccgataagaaacacgagaaccagaggacgaaaacgaagcttcgttcctgaggaagaaaaacatgaggaaagagttcctagagagagaagacaaagacagtctgtgttgcaaaagaagcccaaggctgaagatttaagaactgaatgtgcaacttgcaagggaactggagacaatgaaaatcttgtcaggtrtgatgaatgcagactctgctaccattttggctgtttggatcctcctttgaaaaagtctcctaaacagacaggctacggatggatatgtcaggaatgtgattcttcatcttccaaggaagatgaaaatgaagctgaaagaaaaaatatatctcaggagctcaacatggaacagaaaaatccaaagaaataaaagattttctgtagtgtttttgaaaagtttgcagcttatgtaatagcagataaaatttctaattgtaaaatgttaaattgagcggccgcgaattcctgcagcccgggggatccactagttctagagcggccgccaccgcggtggagctccagct

SEQ ID NO: 21 - DNA, 600 bp, Homo sapiens; identical to SEQ ID NO: 20

SEQ ID NO: 22 - DNA, 600 bp, Homo sapiens
caccgattatgtagctacgagatggtaccgagctcctgaacttcttgtgggagatactcagtatggttcttcagtcgatatatgggctattggttgtgtttttgcagagctcctgacaggccagccactgtggcctggaaaatcagatgtggaccaactttatctgataatcagaacactagtagagacggggtttcgccatgttgaccaggctggtctcgaactcttgacgtcaagtgatccacctgccgtagcctctcaaagtgctggaattacaggaaaattaatcccaagacatcaatcaatctttaaaagtaacgggtttttccatggcatcagtatacctgagccagaagacatggaaactcttgaggaaaagttctcagatgttcatcctgtggctctgaacttcatgaaggggtgtctgaagatgaatccagatgacagattaacctgttcccaactcctggagagctcctactttgattcttttcaagaggcccaaattaaaagaaaagcacgtaatgaaggaagaaacagaagacgccaacaggtacwkmsgctcrwrwktggctgctgcagctctgctccaggctgcat

SEQ ID NO: 23 - DNA, 1400 bp, Homo sapiens
ccaaatggagttgctgatggagtgatcaaaagcgtattatggcaaacacttcaagctcttaatttctgtcatatacataactgtattcacagagatataaaacctgaaaatattctaataactaagcaaggaataatcaagatttgtgacttcgggtttgcacaaattctgagttggacttcatctttctctggtgcctccttgattggcttaatagttgaccttctgaattctttttctgccaattcagagatttttctcctggcttggatccattgctgrmamaktrwttcaccawgrsrycmakgcwcatctygaacttctggcctcaagtgatccttccacctcggcctcccaaagtgctggattgcaagtgtgagccaccgtgcccagccagatttttcaaacaataactactgagagctcacaagattgtttttagtgggaacacaatttcgaacaaattcttgagaacgcattccaggagatgcctacaccgattatgtagctacgagatggtaccgagctcctgaacttcttgtgggagatactcagtatggttcttcagtcgatatatgggctattggttgtgtttttgcagagctcctgacaggccagccactgtggcctggaaaatcagatgtggaccaactttatctgataatcagaacactagtagagacggggtttcgccatgttgaccaggctggtctcgaactcttgacgtcaagtgatccacctgccgtagcctctcaaagtgctggaattacaggaaaattaatcccaagacatcaatcaatctttaaaagtaacgggtttttccatggcatcagtatacctgagccagaagacatggaaactcttgaggaaaagttctcagatgttcatcctgtggctctgaacttcatgaaggggtgtctgaagatgaatccagatgacagattaacctgttcccaactcctggagagctcctactttgattcttttcaagaggcccaaattaaaagaaaagcacgtaatgaaggaagaaacagaagacgccaacaggtcagaggctgtgtttggctgctgcagctctgctccaggctgcattgagaatcgatttcgagtgtcttctcattcagggacccagccaaggagcagctcatatgggaaatatgcccttctcatggcagaggcccgaacttgaatacctaatgtctgtcaggagtgacttccgctcaaaagttaaagtgctataaaaataattccttttttgtttttgrttggctgcctttcaaagtgagacaaggtggacaccaagacctttcatttgtactggtgtagtgattgctagcttaataaatattgggaattgatgtataaaaccctagactatgaaaatatcaaaaaaaaaaaaa

SEQ ID NO: 24 - DNA, 600 bp, Homo sapiens
aatgacacgattctttaccaaattggatgcagacaaatcttatcaatgcctgaaagagacttgtgagaagttgggctatcaatggaagaaaagttgtatgaatcaggttactatatcaacaactgataggagaaacaataaactcattttcaaagtgaatttgttagaaatggatgataaaatattggttgacttccggctttctaagggtgatggattggagttcaagagacacttcctgaagattaaagggaagctgattgatattgtgagcagccagaaggtttggcttcctgccacatcttcctagagaagattatcctgtcctgcaaactgcaaatagtagttcctgaagtgttcacttccctgtttatccaaacatcttccaatttattttgtttgttcggcatacaaataatacctatatcttaattgtaagcaaaactttggggaaaggatgaatagaattcatttgattatttcttcatgtgtgtttagtatctgaatttgaaactcatctggtggaaaccaagtttcaggggacatgagttttccagcttttatacacacgtatctcatttttatcaaaacattttgttt

SEQ ID NO: 25 - DNA, 600 bp, Homo sapiens
tgcgtcatgggccgcagccggtcagccaccctggtcctggcctacctgatgatccacaaggacatgaccctggtggacgccatccagcaagtggccaagaaccgctgcgtcctcccgaaccggggctttttgaagcagctccgggagctggacaagcagctggtgcagcagaggcgacggtcccagcgccaggacggtgaggaggaggatgrcagggagctgtaggcccgactcacagggccagcagaggcacttggggacagaggggagaggcagaacatagccctggcctaggactccagagaagggatggtgaaaccgaagctcgactcttccaaaccatcttgttcaacttccccatgtgtgctggggacagggaggacccagagctgcccccgggcagagctgagcgctcagcctctcagcaaaatgggagggacgggctccccggctctgggtcacagaggagcatgccacgctgcaccaagtcycctgctttggttttgtttttttggtgagaaggaagagggaaaakwttttaaawtgtggggcwttatttttgtaaatatccttcgggctttgtttaaaaacaaaaaaaaa

SEQ ID NO: 26 - DNA, 1052 bp, Homo sapiens
ctgcccggcttctaacaggccactgaccggtactcactggggacccacgctctaagttgttgatctctagaaccgattttggaaaaggatttgccttattgaagaagacaggatcattcttctttctttcccatttaagaataatcgttattaagaatatcgtttaagaataatcgttatttctctcttctcakacctactgaacgtgaacgaacagaaaggctaattaaaaccaaattaagggagatcatgatgcagaaggatttggagaatattacatccaaagagataagaacagagttggaaatgcaaatggtgtgcaacttgcgggaattcaaggaatttatagacaatgaaatgatagtgatccttggtcaaatggatagccctacacagatatttgagcatgtgttcctgggctcagaatggaatgcctccaacttagaggacttacagaaccgaggggtacggtatatcttgaatgtcactcgagagatagataacttcttcccaggagtctttgagtatcataacattcgggtatatgatgaagaggcaacggatctcctggcgtactggaatgacacttacaaattcatctctaaagcaaagaaacatggatctaaatgccttgtgcactgcaaaatgggggtgagtcgctcagcctccaccgtgattgcctatgcaatgaaggaatatggctggaatctggaccgagcctatgactatgtgaaagaaagacgaacggtaaccaagcccaacccaagcttcatgagacaactggaagagtatcaggggatcttgctggcaagcttcctaggcttgattcatggagggagggacaagccctggggagagaaaagcacagaatttgagtcagtagatctggtttccattcctggttcaccctcttgctgcaaccctgagaagttacttcacatttctcatccttacctgaccccatctataaaatgaaaatcaagagatccatctcacagggttattgtgaataaaaatgtgtttgaatgtttataaaaaaaaaaaaaaaaaaa

SEQ ID NO: 27 - DNA, 1052 bp, Homo sapiens; identical to SEQ ID NO: 26

SEQ ID NO: 28 - DNA, 1400 bp, Homo sapiens
agctttgtggcagaattccctgcatgtgtgataactgatcttgttttattttttggcattgcaactgtggcatagttacaatttctgtttgttcatcacatttaaaattggaagagaacgcgcttgatggatagagcgccttcagtgtactgtttcttattaactttactttttttaaatcaacttgctatagactttatatacattttgttaaatatagttcctagtgacatagaaacgatgcgtagttttcatttactaattacaaatgttgaggcctaattctgaaagtcctcatatttaaaggctagacaacgtaatgaaatttttaactatttgtatgtcattttgaaagtgtactgctttatggtaaaagtgtttttcatttgttcattgttttcattatttgtgatcatgttgtctttcaatacaggcataaaccttccactcttgaacaaagcagctgctttttaaaagcggtaattgcttctttaccttttatttcttttgtaaatgaagcttttctttaagaatgtgactttaaagtgttgtctattgcataaaacagttgacactcacttattgtaaagtgaagattgttctactgcatgtgaagtggaccatgcagatttctgtatgttctcagtatgcatcactagataataaagtcttttgtgaacaaggcatttgtagccatttttaaaagtttttgtcttcagtgctggtaagtcaggtaaaccataaatagttaaaagcaaccttttgtttttttcctgaaagtttttaattgaaagtattattagttaaagatgtaaacctagccaaaattaccagtttattaataattaggatcctaattatttcaaaaaatcctacaaatattgtcagctttcagtgtagtgagattattcctgtaggttatggggtataattcaggatttaactaatgtttctgctattttctcacttttccttttgatggtgcggaaagagaaaaaggaaaacggggcacaggccattcgacgccttctccaaggggtctgatttgctgagacaccagcttcaccttcttaacaaggcacctaattacaacaagcatgcacattttggtgcattcaagaatggaaaatcagaatagcagcattgattcttctggtgcagctcagtggaagatgatgacaaccagaagacatgagctaagggtaagggactgttctgaagaacctttccatttagtgatcaagatatggaagctgatttctgaaaatgctcagtgtgtactctaattatttatggtaccatttgaattgtaacttgcattttagcagtgcatgtttctaattgacttactgggaaactgaataaaatatgcctcttattatcaaaaaaaaaaaaaaagg

SEQ ID NO: 29 - DNA, 1400 bp, Homo sapiens
  misc_feature (1376)..(1376): n is a, c, g, or t
  misc_feature (1386)..(1386): n is a, c, g, or t
gsgccckcasmtgcagccccgcacctgccgcttgcacctgcagccccgcgctctacccggttcaagcatggctgaccaggcgcccttcgacacggacgtcaacaccctgacccgcttcgtcatggaggagggcaggaaggcccgcggcacgggcgagttgacccagctgctcaactcgctctgcacagcagtcaaagccatctcttcggcggtgcgcaaggcgggcatcgcgcacctctatggcattgctggttctaccaacgtgacaggtgatcaagttaagaagctggacgtcctctccaacgacctggttatgaacatgttaaagtcatcctttgccacgtgtgttctcgtgtcagaagaagataaacacgccatcatagtggaaccggagaaaaggggtaaatatgtggtctgttttgatccccttgatggatcttccaacatcgattgccttgtgtccgttggaaccatttttggcatctatagaaagaaatcaactgatgagccttctgagaaggatgctctgcaaccaggccggaacctggtggcagccggctacgcactgtatggcagtgccaccatgctggtccttgccatggactgtggggtcaactgcttcatgctggacccggccatcggggagttcattttggtggacaaggatgtgaagataaaaaagaaaggtaaaatctacagccttaacgagggctacgcyarggactttgaccctgccgtcactgagtacatccagaggaagaagttccccccagataattcagctccttatggggcccggtatgtgggctccatggtggctgatgttcatcgcactctggtctacggagggatatttctgtaccccgctaacaagaagagccccaatggaaagctgagactgctgtacgaatgcaaccccatggcctacgtcatggagaaggctgggggaatggccaccactgggaaggaggccgtgttagacgtcattcccacagacattcaccagagggcgccggtgatcttgggrtcccccgacgacgtgctcgagttcctgaaggtgtatgagaagcactctgcccagtgagcacctgccctgcctgcatcyggagaattgcctctacctggaccttttgtctcacacagcagtaccctgacctgctgtgcaccttacattcctagagagcagaaataaaaagcatgactatttccaccatcaaatgctgtagaatgcttggcactccctaaccaaatgctgtctccataatgccactggtgttaagatatattttgagtggatggaggagaaataaacttattcctccttaaaaaaaaaaaaaaaaaaggggattccgatatcaagctgtgggaaaaccgtnggacctcganggggggggcccggt

SEQ ID NO: 30 - DNA, 1400 bp, Homo sapiens
  misc_feature (1396)..(1396): n is a, c, g, or t
  misc_feature (1398)..(1398): n is a, c, g, or t
acttttccagcagaaagtttttgtgggtatgggcactggccttggctttgagcaagcttgatgaatgttggatatttctggatttcagggtggcccggtggaaatcctgccctttctgtacctgggcagtgcgtatcacgcttcccgcaaggacatgctggatgccttgggcataactgccttgatcaacgtctcagccaattgtcccaaccattttgagggtcactaccagtacaagagcatccctgtggaggacaaccacaaggcagacatcagctcctggttcaacgaggccattgacttcatagactccatcaagaatgctggaggaagggtgtttgtccactgccaggcaggcatttcccggtcagccaccatctgccttgcttaccttatgaggactaatcgagtcaagctggacgaggcctttgagtttgtgaagcagaggcgaasatcatctctcccaacttcagcttcatgggccagmtgctgcagtttgagtcccaggtgctggctccgcactgttcggcagaggctgggagccccgccatggctgtgctcgaccgaggcacctccaccaccaccgtgttcaacttccccgtctccatccctgtccactccacgaacagtgcgctgagctaccttcagagccccattacgacctctcccagctgctgaaaggccacgggaggtgaggctcttcacatcccattgggactccatgctccttgagaggagaaatgcaataactctgggaggggctcgagagggctggtccttatttatttaacttcacccgagttcctctgggtttctaagcagttatggtgatgacttagcgtcaagacatttgctgaactcagcacattcgggaccaatatatagtgggtacatcaagtccatctgacaaaatggggcagaagagaaaggactcagtgtgtgatccggtttctttttgctcgcccctgttttttgtagaatctcttcatgcttgacatacctaccagtattattcccgacgacacatatacatatgagaatataccttatttatttttgtgtaggtgtctgccttcacaaatgtcattgtctactcctagaagaaccaaatacctcaatttttgtttttgagtactgtactatcctgtaaatatatcttaagcaggtttgttttcagcactgatggaaaataccagtgttgggtttttttttagttgccaacagttgtatgtttgctgattatttatgacctgaaataatatatttcttcttctaagaagacattttgttacataaggatgacttttttatacaatggaataaattatggcatttctattgaaaaaaaaaaaaaaaaaaaaaaaaaaaaaaaaaaaaaaaaaaaaaaaaaaaaagngngg

SEQ ID NO: 31 - DNA, 600 bp, Homo sapiens
  misc_feature (500)..(500): n is a, c, g, or t
  misc_feature (582)..(582): n is a, c, g, or t
  misc_feature (584)..(584): n is a, c, g, or t
  misc_feature (590)..(590): n is a, c, g, or t
cggggctgaaggctagcaaaccgagcgatcatgtcrcacaaacaaattyactattyggacaratacgacsacgaggagtttgastatcgacatgtcatgctgcccaaggacatakccmasctggkccctammwcccatytgatgtctgaatctgaatggaggaatcttggcrwtcagmagagtcagggatgggtccatwatatgatccatgaaycagaacctcdcatcttgctgttccggcrcccacyacccragaarmcaamgaaatgaasctggcwagctacttttcakcctcaakctttwcacavhtgwccttmcttcctaacatctttmtgataacattattawgytgccttcytgtttctcactytgatatttaaaagatgttcaatacactgtttgaatgtgctggtaactgctttgcttcttgagtagagccaccaccaccatagcccagccagatgagtgctctgtggaccacagcctaagctgagtgtgancccagaagccacgatgtgctctgtatccagacacacttggcagatggaggaagcatctgattgagacatggtgtacaggtcngnaatgcngtttgttttc

SEQ ID NO: 32 - DNA, 600 bp, Homo sapiens
gggtcaggagaccgctgcttctgggcataagtcctgcaaggaaagcaacatggaaaacagccccaactcacccatgagggatgaaaagcactcttgagaaaggcatgtgttgtttaagccattgagattttagagctttttgtcactatctgtcaagactgatactactggggcttttcctattgatttgggagttctttacatattaaaaaaatgtgagcctttgtgatacgaattcaatttgttttcctgtcttttgacatttgactttgcataaaagtttatctgtgcataattttatatgtagttgaattcatcaatcttttattttgtatggctttttggttatgtataatacttagatcctccttatactctgagtttctttctttttaattctcctgtatttccttctagtataattaaatctgtaaaaagtaagatggaagagtggtacagttttctttatccagtctgtccttgatgggcatttaggtagactggataaagaaaatgtgatacatatacaccatggaacactatgtgtattaatccactctcacactgctatgaagagatacctgagactgggtaatttag

SEQ ID NO: 33 - DNA, 600 bp, Homo sapiens; identical to SEQ ID NO: 32

SEQ ID NO: 34 - DNA, 1400 bp, Homo sapiens
ctctagtaaaggggaagaggctgctggttatgcccaggagtctcaaagggaggaggccagctgagtaggcagcctggtgagggggggcaggggatgggcaggagggtgggagagtggatgaggggcttctcactgtacatagagtcactggcatgatgccctcgctcccccatgcccccacatcccagtggggcataactaggggtcacgggagagcagtctcgtctcctgtgtgtatgtgtgtgagtggtgggcaggccagtggcagggccggccccagcccctgcatggattccttgtggcttttctgtcttttgctagcttcaccagtttctgttccttgtgggatgctgctctagggatactcagggggctcctgctctccttccccttcccttcttgcctcaccattcccctaggcaggccctgcaggtcccacactctcccaggccctaaacttgggcggccttgccctgagagctggtcctccagcgaggccctgtcagcggtcttaggctcctgcacatgaaggtgtgtgcctgtggtgtgtgggctgctctaggagcagatacaggctggtatagaggatgcagaaaggtagggcagtatgtttaagtccagacttggcacatggctagggatactgctcactagctgtggaggtcctcaggagtggagagaatgagtaggagggcagaagcttccatttttgtccttcctaagaccctgttatttgtgttatttcctgcctttccgagtcctgcagtgggctgccctgtaccctgaacctcatgagcctctaagggaaaggaggaacaattaggacgtggcaatgagacctggcagggcagagtacaagcccagcacccagtgtcccagccttactgggtccttaccctgggccaaacagggagggctgatacctccttgctcttcctagatgcccacctcctacaatctcagcccacaagtcctctccaccctagggggcttgctgcatggcaataactcataatctgatttggaggtttgccctttacaggggcagattttctgctcagttcaacaatgaaatgaagaggaactccctctttctacagctcacttctatcagaggcccaggtgcctcagagccacattgagttgctttttctgggatgaggaagtagggttaaactccccagtttcctgagggaggctcctgacaggtgccctttgtcagaccctaccacagcctggataggcagccacattggtcctcgcccttgctcggcactccgtggtggtcctgcccttctccctgcatgcctgtgggtctgctctggtgtgtgaaggtcggtgggttaactgtgtgcctactgaacctggcaaataaacatcaccctgcaaagccaaaaaaa

SEQ ID NO: 35 - DNA, 600 bp, Homo sapiens
gtaccattattattgttgtcattgttgttattattattgtatatttctgttacataaagtctttcaaataagaaatccttgcatttttgtaacactgagtctattcagctccaattttcatccatgtttttaattattattatcctgattcttaattattataaattctatagcatatcctttggctttggaagctgagcagtaagagctgatgacttcctaacactaggtacaagttaaatgaacatttttacagtaactttgtttagaaagtaatctcttccacacaacagtgtagtgctggagagggcatgataaagatggcattaggcagagatgaggggaatacataaaggaggggaaaaagtaattcatacacaagggacggtgagttcaattcactttagtgaagaccctctaggagtaagatactgtgggaaaacagataccaataagtatatcatgcttgccctagagagtttgcaatctacctagagagaaaggaaggtgaaacttgagagatctatatacataggtaaagattgtagtgcatggttttgaggcacattatccctacaacaaattttgataacagaagac

SEQ ID NO: 36 - DNA, 600 bp, Homo sapiens; identical to SEQ ID NO: 35

SEQ ID NO: 37 - DNA, 600 bp, Homo sapiens
cactgtggcctggaaaatcagatgtggaccaactttatctgataatcagaacactaggaaaattaatcccaagacatcaatcaatctttaaaagtaacgggtttttccatggcatcagtatacctgagccagaagacatggaaactcttgaggaaaagttctcagatgttcatcctgtggctctgaacttcatgaaggggtgtctgaagatgaatccagatgacagattaacctgttcccaactcctggagagctcctactttgattcttttcaagaggcccaaattaaaagaaaagcacgtaatgaaggaagaaacagaagacgccaacagrwwcwdmbgytsvcwvwbatrscwgswagcmrcatctscyccasrcctgatggaagaaaacaagtcctccagttaaaatttgatcaccttccaaacatttaggaaaatgttctttcaagtgcaaagtaatttaatatgtacacattttgtacaagtgagataggaattctcagtgtttcaaatgcaaatgagccatatgaaaattaagatgccttctagaattggtttgctctgatcattgctgattcctttccccatgcttttacat

SEQ ID NO: 38 - DNA, 600 bp, Homo sapiens; identical to SEQ ID NO: 37

SEQ ID NO: 39 - DNA, 600 bp, Homo sapiens
  misc_feature (480)..(480): n is a, c, g, or t
gcacgagtccccccgtgcagccaagaacgttcccaggcagaactccgctcccctgctccaaactgctctcctagggaatggggaaaggccccctggggcgaaggaagcgccccccttgacactctcgctggtgaagccaagcgggaggggagctgcgccctccctgacctcccaggctgcggctcaggtggccaaccaggccctgatccggggtgactggaaccggggcggtggggtgagggtggccagcgtacaacaggtccctccccggcttcctccggaggcccggcccggccggaggatgttcagcacctctgccttgcagggtgcccaggggggtgccagggctttgcttggaggctactcccaagcctacgggactgtctgccactcggcactgggccacctgcccctgctggaggggcaccatgtgtgagccgccctactcccttcacctggccctctgttcctgccccagcnccttccccagacccctctccagtctcctgcaccccttagccctccctgctttgcctggcccgttgaagttccagggagcttgcccgggtctcctcgggggagcagatgagggccctgccc

SEQ ID NO: 40 - DNA, 1400 bp, Homo sapiens
tgctgtgactggtgaggaggacttgggctctggagatgtaaacaggttacccagctgggagagaggacatctgctggctggtgtggcgtccagcactgatgtgtctaccttctctgaaggtgactgcaaggagcctgacaagtgctgctggagacacaagcagtgcactgggcacatcatctaccctttcgcctctgactgtgtccgccacagcctgcacctacactctgtcaaccactgcaactgtaattctaggctgaaggactcttcagaggatagcagcagctcccggggcgcgggcccaacctgctcccatgtcatcgagtccccttgctttgagctcacaccggaggaggagcatgtggagcgattccggtatggctggtgcaaaagctacagacctgtctctgtggcagtgatccaccatccactctaccatgagtgtggggcagatgatctaaatgaagaagaggaagaggaggaggaggaaaagcaagccccccatcccgacacaggtggggcccgccaccgcctcccctgacctaggcaccagcatggccactggtacccctgactccacagcgcccatcaccatctggcgctctgagagccccacagggaagggtcagggcagcaaggtgatcaagaaggtaaagaagaaaaaggaaaaagagaaagacaaggaggagatggatgagaaggcaaagctgaagaaaaaagccaagaaaggccagttgactaagaagaaaagcccggttaaattggagccttccccgccagacgtgagccgatcattaagcgcaagacagctggccaggatgtccgagtccagcccagaaagccgggaagagctggagagcgaggacagttacaatggccgggggcagggagaactgtccagcgaggatattgtggaatcatcatcgcccaggaagagagagaacacagtccaggccaaaaagacaggggcaaagccctcacaagccaggaaggtaaacaagagaaaatctcccccaggatcaaaccccaacctcagttgaggccagggtggtcagggtgcagaataaatgccatcgagcctgtggctggccctctgctgctgttctctccctccaacctggctgtttcttgcggggcaaggggtgggctcagggctgcaggggtttctcaaaggcaatccagctttcacaaaggaagcccatgggaaggcaggtgggagggaaaggaaggggcacagccctatttcttcctacctgctaggacaaggtggaagagtgtatctggggtgggaaggagggcttcccctctctgctgcgagagactggtctgtgtgaaatccacttctgggacaggcagtactgtctgcagcgatacccccaataaacggaactttttaaccc

SEQ ID NO: 41 - DNA, 1400 bp, Homo sapiens; identical to SEQ ID NO: 40

SEQ ID NO: 42 - DNA, 868 bp, Homo sapiens
tcagccgtctcaacaacaggcatcacctgaatatcttacctcccctcaagagttctcaccagccttagtttcctacacttcatcacttccagctcaggttggaaccataatggactcctcctatagtgccaataggcaagtatttttccagtcagttgctgataaagaggccattgcaaatttcacaaatcagaagaacatcagcaatccacctgatatgtcagggtggaatccttttggagaggataatttctctaagttaacagaagaggaactattggacagagaatttgaccttctaagatcaagtaagggacacttgaaggcttattttgcttcacagtaaaataacagctctattattattcagcaaggccaaagacttttgagaatgtgtatggaaaattctttttgtgcatttgagggcaaaattcaggccatcttcttatacatatactatcaaattatgttgtgtgcattagaaatcagttgcttgatagtagctattaaacccaatattgctgatagtatgctaatatcctaaaacttaaatattgcatatctatgaatgttaaattcagaatatctctaaaacatggaaaattgatgtttcaataaaaagggagacattttattattttgccttactaatgattttgcagctctgtttttctgcacactcaatagaaaatattgtgggtctgagatgccctttgaaaatgcctgaaagaaaacatgggctactacattatgttaatgttttgtaatgtccttttaatgagtggtgacataaaagggctgctttgttgtcctgatatggcaaaaattaaataaattctttttcactttaaaaaaaaaaaaaaaaaaa

SEQ ID NO: 43 - DNA, 868 bp, Homo sapiens; identical to SEQ ID NO: 42

SEQ ID NO: 44 - DNA, 1400 bp, Homo sapiens
atggctcaggagaggctctttgatttttaaagttttggggtggggggttgtgtgtggtttctttcttttgaattttaatttaggtgttttgggtttttttcctttaaagagaatagtgttcacaaaatttgagctgctctttggcttttgctataagggaaacagagtggcctggctgatttgaataaatgtttctttcctctccaccatctcacattttgcttttaagtgaacactttttccccattgagcatcttgaacatactttttttccaaataaattactcatccttaaagtttactccactttgacaaaagatacgcccttctccctgcacataaagcaggttgtagaacgtggcattcttgggcaagtaggtagactttacccagtctctttccttttttgctgatgtgtgctctctctctctctttctctctctctctctctctctctctctctctgtctgtctcgcttgctcgctctcgctgtttctctctctttgaggcatttgtttggaaaaaatcgttgagatgcccaagaacctgggataattctttactttttttgaaataaaggaaaggaaattcagactcttacattgttctctgtaactcttcaattctaaaatgttttgttttttaaaccatgttctgatggggaagttgatttgtaagtgtggacagcttggacattgctgctgagctgtggttagagatgatgcctccattcctagagggctaataacagcatttagcatattgtttacacatatatttttatgtcaaaaaaaaaacaaaaacctttcaaacagagcattgtgatattgtcaaagagaaaaacaaatcctgaagatacatggaaatgtaacctagtttagggtgggtatttttctgaagatacatcaatacctgaccttttttaaaaaaataattttaaaacagcatactgtgaggaagaacagtattgacatacccacatcccagcatgtgtaccctgccagttcttttagggatttttcctccaaagagatttggatttggttttggtaaaaggggttaaattgtgcttccaggcaagaactttgccttatcataaacaggaaatgaaaaagggaagggctgtcaggatgggataatttgggaggcttctcattctggcttctatttctatgtgagtaccagcatatagagtgttttaaaaacagatacatgtcatataatttatctgcacagacttagaccttcaggaaacataggttaagcccccttttacaaagaaaaagtaaacatacttcagcatcttggagggtagttttcaaaactcaagtttcatgtttcaatgccaagttcttattttaaaaaataaaatctacttataagaaaaaaaaaaaaaaaaa

SEQ ID NO: 45 - DNA, 1400 bp, Homo sapiens; identical to SEQ ID NO: 44

SEQ ID NO: 46 - DNA, 600 bp, Homo sapiens
  misc_feature (499)..(499): n is a, c, g, or t
  misc_feature (547)..(547): n is a, c, g, or t
  misc_feature (570)..(570): n is a, c, g, or t
  misc_feature (586)..(586): n is a, c, g, or t
atcaatagaatgtggaagaagtgactgtatgccagttccaagcctaggtttcaagaggccttataaatgtctgttggaaccttacccagccatgaacatgttgagtgagcatgctggagaatgagagaccacatgaagcagaaacatgctttcctagctgaagtcatactagcccaaccaacatggcagctaacacatgaatgaggccaatcaagaccagaagaaccactcaagcagatcccagcccaaattgcccattcacacaatcaggagctaaataaattactgttgtcttaaaaaaaaaaaaaaaarggcggccgctctagaggatccaagcttacgtacgcgtgcatgcgacgtcatagctcttctatagtgtcacctaaattcaattcactggccgtcgttttacaacgtcgtgactgggaaaaccctggcgttacccaacttaatcgccttgcagcacatccccctttcgccagctggcgtaatagcgaanaggcccgcaccgatcgcccttcccaacagttgcgcagcctgaatggcnaatgggacgccgccctgtagcgntgcattaagcgcggcnggtgtggtggttac

SEQ ID NO: 47 - DNA, 600 bp, Homo sapiens; identical to SEQ ID NO: 46
  misc_feature (499)..(499): n is a, c, g, or t
  misc_feature (547)..(547): n is a, c, g, or t
  misc_feature (570)..(570): n is a, c, g, or t
  misc_feature (586)..(586): n is a, c, g, or t

SEQ ID NO: 48 - DNA, 824 bp, Homo sapiens
cacagcggccaatgtctggcagtgggcacatgggggtcggggggtgtaggtgccaagcgccatggcttagacccgagattggagtccggccgccccccgacagcagccgcctcctgccyyccgtgcgctsctaggcgccaccatgtcgggagacaaacttctgagcgaactcggttataagctgggccgcacaattggagagggcagctactccaaggtgaaggtggccacatccaagaagtacaagggtaccgtggccatcaaggtggtggaccggcggcgagcgcccccggacttcgtcaacaagttcctgccgcgagagctgtccatcctgcggggcgtgcgacacccgcacatcgtgcacgtcttcgagttcatcgaggtgtgcaacgggaaactgtacatcgtgatggaagcggccgccaccgacctgctgcaagccgtgcagcgcaacgggcgcatccccggagttcaggcgcgcgacctctttgcgcagatcgccggcgccgtgcgctacctgcacgatcatcacctggtgcaccgcgacctcaagtgcgaaaacgtgctgctgagcccggacgagcgccgcgtcaagctcaccgacttcggcttcggccgccaggcccatggctacccagacctgagcaccacctactgcggctcagccgtacgcgtcacccgagtcatgcatttcttgagcacctactgtctgccaggccccagagctcatggcgaagagacttgggcccatccctgccgaaaacgagacaattgaaaagtcaagtaaaataaaagaatgacatggaaataaaaaaaaaaaaaaa

SEQ ID NO: 49 - DNA, 824 bp, Homo sapiens; identical to SEQ ID NO: 48

SEQ ID NO: 50 - DNA, 1400 bp, Homo sapiens
ttctaaaactgaaactgaaacaaacgattcccctagagtaaacgcgcgtgacggagaggttcagatatgaacagacagacacagatatggtcgaatccaatcggatcgctcggatcggatcagatcgggaaacgatactgttcacgttgccgttgccgatccgaaatcgctttcgaattccatttcgagttcagatccgtttccggtttcgattcgaaccccttcaaatgaacaccgacaacgttgagttccattgcgttaattgaaatttcacaaatacgcctatgttttattacaattattaactaattatacatataaatttatataaattaaagatacatatacatatatttaaaagtaaagcaaccacaaacagaaattamraaammmwwwrwwwwmattgtttgtaaaacgatgcgaggagcgaccgcgaccatcaaaaggcaatacaaaataaatattgaattatacaaattaaaaccgaaacgaaaccgatacaaacagaaatccactaagaaacaaagatatgataaatgcaatgatcagaaagaatcctgactaccattgctgtcactgtcacgattatggattatattaactactaaatattacacctacgagtactacctaaactacatatatatttatgttaaatgcgtatcgcaattatagttatacaaacaaacaaatatcactgatgaagtgaacgtgagatataactgcaaaaagtaaaattaacttaagcctaactcaactaaaacgatctaaactgaactaaagtgcgtggtgttttcgcccaaatcattattttatagtagccacaataaaacaccaaaagaagttgctaattttgtaacgatgatcttgaattttatttagcgatctttgtatttatatgtatgtgtatgtatgtatggatctgtatttgtatttcgatatgagcttgaattaaattgtatccgtggatcatacaatcaatcaatatcaatatcaaccaaccaaccaaccaaccaaccaaccaagcagccagccaacaaactaacgatcttgcaattcataatcacccagaagccagatgtgcagcgtatctagtaattaagcataccacgtagtcactaaaaaacaatacaaagcgatacatgaaaaccaatttaacttaaattcaaggaataacaatgtattaccactagtgcatgtgaccattttatttgtacagctgattatctatagatcgtgttatcatcgggcgccttcagtggctcgatcagtagttatctatacatattaagtttcaaagaaataacgcataattaaaacaattgataatttaataaatccataataaacgatgtgaaacatttgcgagcaaaagaaaaaaaaaaaaaaaaaaaaaaaaa

SEQ ID NO: 51 - DNA, 1400 bp, Homo sapiens
tgggaaaggccattggcaaagaggccggaggggcagctggctctaaagtcagtgaggcccttggccaagggaccagagaagcagttggcactggagtcaggcaggttccaggctttggcgcagcagatgctttgggcaacagggtcggggaagcagcccatgctctgggaaacactgggcacgagattggcagacaggcagaagatgtcattcgacacggagcagatgctgtccgcggctcctggcagggggtgcctggccacagtggtgcttgggaaacttctggaggccatggcatctttggctctcaaggtggccttggaggccagggccagggcaatcctggaggtctggggactccgtgggtccacggataccccggaaactcagcaggcagctttggaatgaatcctcagggagctccctggggtcaaggaggcaatggagggccaccaaactttgggaccaacactcagggagctgtggcccagcctggctatggttcagtgagagccagcaaccagaatgaagggtgcacgaatcccccaccatctggctcaggtggaggctccagcaactctgggggaggcagcggctcacagtcgggcagcagtggcagtggcagcaatggtgacaacaacaatggcagcagcagtggtggcagcagcagtggcagcagcagtggcagcagcagtggcggcagcagtggcggcagcagtggtggcagcagtggcaacagtggtggcagcagaggtgacagcggcagtgagtcctcctggggatccagcaccggctcctcctccggcaaccacggtgggagcggcggaggaaatggacataaacccgggtgtgaaaagccagggaatgaagcccgcgggagcggggaatctgggattcagggcttcagaggacagggagtttccagcaacatgagggaaataagcaaagagggcaatcgcctccttggaggctctggagacaattatcgggggcaagggtcgagctggggcagtggaggaggtgacgctgttggtggagtcaatactgtgaactctgagacgtctcctgggatgtttaactttgacactttctggaagaattttaaatccaagctgggtttcatcaactgggatgccataaacaaggaccagagaagctctcgcatcccgtgacctccagacaaggagccaccagattggatgggagcccccacactccctccttaaaacaccaccctctcatcactaatctcagcccttgcccttgaaataaaccttagctgccccacaaaaaaaaaaaaaaaaaaaaaaaaaaaaaaaaaaaaaaaaaaaaaaaaaaaaaaaaaaaaaaaaaaaaaaaaaaaaaaaaaaaaaaaaaaaaaaaaaaaaaaaaaaaaaaaa

SEQ ID NO: 52 - DNA, 1400 bp, Homo sapiens; identical to SEQ ID NO: 51

SEQ ID NO: 53 - DNA, 1400 bp, Homo sapiens
gggcgactgcagccctggagcccaggaagccgcacggggtgaagcggcatcaccacaagcacaacttgaagcaccgctacgagctgcaggagaccctgggcaaaggcacctacggcaaagtcaagcgggccaccgagaggttttctggccgagtggttgctataaaatccgttcgtaaggacaaaattaaggatgaacaagacatggttcacatcagacgagagattgagatcatgtcatctctcaaccatcctcatatcatcagtatttatgaagtgtttgagaacaaagataagattgtgatcatcatggaatatgccagcaaaggggagctgtacgattacatcagtgagccggcgacgcctcagtgagagggagacccggcacttcttccggcagatcgtctctgcttgtgcactattgtcacaaggaacggtgtggtccaccgggacttgaagctgaaaaagasmascagwgagaatcaggttactactcttccccagagcgcagtgagtcttcggagctgttggacagtaatgatgtgatgggcagcagcatcccctcccccagccccccggacccagccagggtaacctcccacagcctctcctgccggaggaagggcatcttgaaacacagcagcaaatactcagcgggcaccatggacccagccctggtcctctccttacttctgtgggccttgcaccgtcttagtttacacatctgccaaaggggtagaattacacttctttttacaggtaaatgtcaaggcacaatcagttttcaggaagtgcttcaagaccccaggtgaaatgaaaatgctaagtaccctctgaatggccatgcctgttaccaggtgctgcttcttcagatgatggggagcacttttcagggtgaaattcaggcgagttttgcccaggcctgctgtcttgagtacaaatgtgaatgatcgactgactgcttgttgccaaactggaaatgttctgtagggatttactggcatggtatcattcctagaagaaaaaaagagagaaacttgactgcacattaaaaaaaaaaaaaaatccacattgtgacttttatttaatttctattttttttggtaataaaaagttgacttttttatttgaatttgtcttttttatttattggtctgaaaggcatttcaaaggtattataataatatattggtgtaatttaattggtgcaacatgctttatggctcctgtcaaaattggttttcactcatttgattggtttgagcccagaacagcctacaggggaaagacaagctggataaccacccaaagtgtttgtattttcgttggaaactgatttttgtttcattttggtttttgtttctgtttttatttttaaattaaataaattgcaatgaactg

SEQ ID NO: 54 - DNA, 1400 bp, Homo sapiens; identical to SEQ ID NO: 53

SEQ ID NO: 55 - DNA, 600 bp, Homo sapiens
attgagcatgacatcttccccagcagccacctcctctgagatccctcaccttctccaaaccagatccaatcaaacctcagcccgaggaaacatgctccccaacgtgctctcctgtgcttctgttttgtccccctgctggggggacaggagagggagtggtgaggccctgggcctccagagcctggctctgctttgtgctgtggcttagccggaggggacgtggccaagggtgaggtggccaaaaccagaaccagcagtctcctgccttgttccctccctggccctcaggccctccttccagggatgtctctccagctctactttatgtcctgaagctgacccgaggtcttcctatctggaatgactagagggagccaagaggatggggtgggggccagggccccccagggcctatcgtgggagagcctgggcaggatcccatcagaaaggtgctgactaaactggttgcccggacactcaacagcctccacctccctttctaccctcacagctcctggggccttcctggctctggcccagaaagtgattcatttgtaaattatcatggttttctttctgcattaaaatgctcatttccgg

SEQ ID NO: 56 - DNA, 600 bp, Homo sapiens; identical to SEQ ID NO: 55

SEQ ID NO: 57 - DNA, 1400 bp, Homo sapiens
cggcaatctcggctgggaacccgacatcaagctgacggatgagatggtgatgatcatggggggcaagatggaggccacacccttcaagtggttcatggagatgtgtgtccaggctacctggctgtgcggtgagcctgggtgaggrccagggtggaggcggagggggtgtgtggaacgttctgagatcccctttaggatgaagggaatcsggttccagagagtgaggtaggtgctagcagccacctgctgacctacacctgtcctttggtcacctctgtctgcccacctgtgccartaaattcttgctctgggcatctaattccaaccaccttccccacaatcctgcccacgccttcagccatgggctctccctttctgggcatcccatccaccctgtcaccaaagcctgagcacctgccaccccacaggctacgtgccaaagatgggctttgtcccagtttcatatacaggtcacttggccaaggccacagtccaacctgggttcatccccactgccccgcagagaaaggcaggtcagcgtgtctgcatcccacccaggtgcagaagccatggccggcagccttatgtgggggacagggcaggacactcagcctgtccagagtgcgtatgggcagcccttgcctgggcagtacgggtgaccgagtgcagcagatcgaaagttgcctcggggatgtgcaagatgtggcaggcgaggtgggtggcaggagcccacacctgaggctgttggcatcagccagtccacaggactacaggcagggccaccacctaggctggcctctgcccaccgctccctcctgtctctccccaggccctacatggatgtggtcgtctccctggtcactatcatgttggacacgggcctgccctgttttcgcggccagacaatcaagttcttgaagcacaggtttagccccaacatgactgagcgcgaggctgcaaatttcatcatgaaggtcatccagagctgcttcctcagcaacaggagccggacctacaacatgatccagtactatcagaatgacatcccctactgaggaggggaccttcgagggcctctgccccatgtgcccttgaagctgccccacaatcatggagccctgcgacctacccgccctgccgccacatgcagtggaggagaggcctgtggcccgaagagcctggtagcgcctcctggggcagcacgtgggtggcgcaggcttagtaacgccgtggactgcagcgacaatcagtggatggtgctgtctatgcacaggtgtgagtcctctgtttgcactggacatattccctacctgttttatttcataggtacatgaagtattgtgtataaaaaaagagataagatttaaccaacatcaacaaaataaaaacccaaaatagtg

SEQ ID NO: 58 - DNA, 1400 bp, Homo sapiens; identical to SEQ ID NO: 57

SEQ ID NO: 59 - DNA, 1400 bp, Homo sapiens
ccgcgtgctggtgctgctgaacccgcgcggcggcaagggcaaggccttgcagctcttccggagtcacgtgcagccccttttggctgaggctgaaatctccttcacgctgatgctcactgagcggcggaaccacgcgcgggagctggtgcggtcggaggagctgggccgctgggacgctctggtggtcatgtctggagacgggctgatgcacgaggtggtgaacgggctcatggagcggcctgactgggagaccgccatccagaarcccctgtgtakcctcccagcaggctctggcaacgcgctggcascttccttgaaccattatgctggctatgagcaggtcaccaatgaagacctcctgaccaactgcacgctattgctgtgccgccggctgctgtcacccatgaacctgctgtctctgcacacggcttcggggctgcgcctcttctctgtgctcagcctggcctggggcttcattgctgatgtggacctagagagtgagaagtatcggcgtctgggggagatgcgcttcactctgggcacyttcctgcgtctggcagccytgcgcacytaccgcggccgactggcytacctccctgtaggaagagtgggttccaagacacctgcctcccccgttgtggtccagcagggcccggtagatgcacaccttgtgccactggaggagccagtgccctctcactggacagtggtgcccgacgaggactttgtgctagtcctggcactgctgcactcgcacctgggcagtgagatgtttgctgcacccatgggccgctgtgcagctggcgtcatgcatctgttctacgtgcgggcgggagtgtctcgtgccatgctgctgcgcctcttcctggccatggagaagggcaggcatatggagtatgaatgcccctacttggtataygtgcccgtggtcgccttccgcttggagcccaaggatgggaaaggtrtgtttgcagtggatggggaattgatggttagcgaggccgtgcagggccaggtgcacccaaactacttctggatggtcagcggttgcgtggagcccccgcccagctggaagccccagcagatgccaccgccagaagagcccttatgaycymtgrgycgmsctgwgccttagtgtctacttgcaggacccttcctccttccctagggctgcagggcctgtccacagctcctgtgggggtggaggagactcctctggagaagggtgagaaggtggaggctatgctttggggggacaggccagaatgaagtcctgggtcaggarcccagctggctgggcccagctgcctatgtaaggccttctagtttgttytgagacccccaccccacgaaccaaatccaaataaagtgacattcccarmmwraaaaaaaaaaaaaaa

SEQ ID NO: 60 - DNA, 1400 bp, Homo sapiens; identical to SEQ ID NO: 59

SEQ ID NO: 61 - DNA, 1400 bp, Homo sapiens
tgtgggaccagggagaatgcccacaggccccagggcctttttgagcccagggcgctctctgcacaggcctgctacaacttcatccgaagcatggccgcctacagcctcctgctgttcctgctgcagatcaaggacagacacaacggcaacattatgctggacaagaagggccatatcatccacatcggtcagccagccacagcgccaccctyctctcccttcaccccggcacccaggggtggatagggatccccaccccacagagaggagaatgcccargaccaccctgccaggartgtcagggtccarctctgaggtccgaactgtcggccaccaagctgttctgctgtararggtgcctggccccggscccagggagctggggcgagagccgccattgctctgagtcagaagctggagctgggcggagtggggctcgtccaggttcagtgccccagcttggctccttcctccacttcctcccttctctttctctgcctgctgccccaccacccaccccatcactgtctccaagaaaacacaacctgccttttgggggtggagggggtgctcctgttgcagagtccttttccactcctcaaaacagaccactcgtccttgcccgccctggctcctacccagtcacaggcagctctttggtgttttgcagactttggcttcatgtttgaaagctcgccgggcggcaatctcggctgggaacctgacatcaagctgacggatgagatggtgatgatcatggggggcaagatggaggccacacccttcaagtggttcatggagatgtgtgtccaggctacctggctgtgcggccctacatggatgtggtcgtctccctggtcactatcatgttggacacgggcctgccctgttttcgcggccagacaatcaagttcttgaagcacaggtttagccccaacatgactgagcgcgaggctgcaaatttcatcatgaaggtcatccagagctgcttcctcagcaacaggagccggacctacaacatgatccagtactatcagaatgacatcccctactgaggaggggaccttcgagggcctctgccccatgtgcccttgaagctgccccacaatcatggagccctgcgacctacccgccctgccgccacatgcagtggaggagaggcctgtggcccgaagagcctggtagcgcctcctggggcagcacgtgggtggcgcaggcttagtaacgccgtggactgcagcgacaatcagtggatggtgctgtctatgcacaggtgtgagtcctctgtttgcactggacatattccctacctgttttatttcataggtacatgaagtattgtgtataaaaaaagagataagatttaaccaacatcaacaaaataaaaacccaaaatagtg

SEQ ID NO: 62 - DNA, 600 bp, Homo sapiens
cagaaactgccatagttaattgccwttycaagaatgktgtaaataacycaggkggccgtttaattcycaatgtaaatataattaactagmcatcyttcctatatttgkgtcycagttttaaagctatttctggatgcttgagtcttaccgtaattgataacaaaaagaggttattgagaatatctatgatttacagagtaagttattctagacctcaagagtgaaatgtaggggaggagacatttgtgtgttaaactaatggaaatgctcatttaatagatattcactgaaagtattagttttggtttattgtagaaaagttgaggttttatggagatttttgtaaaaaatggtttatttcctaaataaatatctctttttcttttttctcccagaaaatgttaatctatgatccagccaaacgaatttctggcaaaatggcactgaatcatccatattttaatgatttggacaatcagattaagaagatgtagctttctgacaaaaagtttccatatgttatgtcaacagatagttgtgtttttattgttaactcttgtctatttttgtcttatatatatttctttgttatcaaacttc

SEQ ID NO: 63 - DNA, 600 bp, Homo sapiens; identical to SEQ ID NO: 62

SEQ ID NO: 64 - DNA, 1400 bp, Homo sapiens
ggtctttttcagtcatcccagtttgtacagacttagcttctgaactctaagaatgccaaagggaccgacgagactccccatcacagcgagctctgtccttacatgtatttgatgtgcatcagcggaggagaacactggcttggccctgctccgctgagtgtctgtgaaatacctctactttccctcccatatccagaacaaaatgatacttgacatccttccacaaaagtcagcctaaagaagttatggtatcatatgttaaactaagctttcaaaaaccttagtgaaatagcaagtgactgctttcaagcagcagtcgacatgtaaatgaaggtgttcttagaattcgcattttgccagctcagcgcacctccacaacgaatgaaatgctccgtatgatttgcacaaatgacatagacctccccaaaagttaactggctctccttcctcacacagttcatcataacccaaccccccacccccgggtcatgaaaatcacagaacttataaacacattgaaccctagatctcaggcttcctgacctaccgccagtggccccttgctggccaccctatagggtcctccttccctggcagccccccatgtgggagaaatacctgattctcccaatctgcagtgggagagctttgctgaattccatcccaaagtcaaacatgggcaagaggtgaggatttcacttttaccctcaagtccgatttgtctgtgattttaaactaactgtgtatgtattgatgtttggaagattgtttgaattttaaagtgataatagtacttaatgttatccagtattgttcatcgagacctgaagccgagtaacatccacttcaccgatggctacgagatcaaggaggacatcggggtgggctcctactcagtgtgcaagcgatgtgtgcataaagccacagacaccgagtatgccgtgaagatcattgataagagcaagagagacccctcggaagagattgagatcctcctgcggtacggccagcacccgaacatcatcaccctcaaggatgtctatgatgatggcaagtttgtgtacctggtaatggagctgatgcgtggtggggagctcctggaccgcatcctccggcagagatwcttctcggagcgcgaagccagtgacgccctgtgcaccatcaccaagaccatggactacctccattcccagggggttgttcatcgagacctgtttagaggattcagctttgtggcctcaagcctgatccaggagccctcacagcaagatctgcacaaagtcccagttcacccaatcctgctttgtaattcatgtttgagatgggtggccactgtacagatatttattacgctttccagactttctgaatagatttttttgaataaacatggttttatg

SEQ ID NO: 65 - DNA, 1400 bp, Homo sapiens
  misc_feature (1346)..(1346): n is a, c, g, or t
  misc_feature (1360)..(1360): n is a, c, g, or t
  misc_feature (1376)..(1376): n is a, c, g, or t
tttcgcctgactgatttttacttggcatttaagttccccttagcactgccagattctaaaaggttatattctttttaaaaaagaagagaaagaaagaaggaaagaagacaaagaaagaataaaaacctccgagtgttaactacttttycctttcttcttttttttataaagaatacattctttcacatcttgaatttctgtgaattttagtttccattctttctgcctttkcaaaccagacacctaaattatacgtsgaagmtgttaaaaagttgtttttttttttttaatggaaaatatccaagaagcagcccaggagtatctgacatggtggaatggaatcagttagaaagcgaagaaatcactaaaaaaagttacttctttttttccccaccagttataatcttcaaccttactagtttataacagtttaatgtcctatagaaggatcctccactaaagttataattttaagtatagtcatatagagagatccctaatcccctgggtaatctagatactaaaggtggggaagaacagtcatattgacattctttaatccaaaaccactgtttgaaattagtaaggatattttcagcattcccaaaaacatgttattagcacgttgagctgaaaacgtttttcttcctcagtgagtacagaaaccaaagcagtctgcgtgtatgtctatgtatagactgtatcgtacctgggctcatggagtagtctaaatttaaaacgtcctctcttctacctccaatgaaaatgtttccgtgtgtggcgtctgatcttccaccgtgtgtgtggtcgtctgctggtgtagcgctgtttaaggagcgctgtgtgctgctagtgttccacgatgtgtgtggtcgtctgctggtgtagtagcactgtttgaggagcactgtgcgccgctagtgtgggtttacacttatgagtgttgtcattacatgtgttctgctcttctctccctctcctgcccctgccctgctccatcagagagagctgcaggtctctgctgccgcctagtagttccctgtcacaaagggatgccaaggcttaccgatctgtctgtcaaaaccaaagatgtctgggaaatccctcgagaatccctgcagttgatcaagagactgggaaatgggcagtttggggaagtatggatgggtatgctgagactcaattactctcttattagcttccccgtttggaagatcccaaacaccaaagatggaaggtgaaaataaagactgcgtgaccgggaagaaagtttgaattactaatagtggggaataataatttcagttttggttttaaacattctggaattcctaaaaaaaaaaaanaaaaaaaaaaaacncgggggggggcccggnacccaattccccccaaaggggggg

SEQ ID NO: 66 - DNA, 600 bp, Homo sapiens
cagcacaagataaccgtgcaggcctctcccaacttggacaaacggcggagcctgaacagcagcagttccagtcccccgagcagccccacaatgatgccccgactccgagccatacagttgacttcwgatgaaagcaataaaacttggggaaggaacacagtctttcgacaagaagaatttgaggatgtaaaaaggaattttaagaaaaaaggttgtacctggggaccaaattccattcaaatgaaagatagaacagattgcaaagaaaggataagacctctctccgatggcaacagtccttggtcaactatcttaataaaaaatcagaaaaccatgcccttggcttcattgtttgtggaccagccagggtcctgtgaagagccaaaactttcccctgatggattagaacacagaaaaccaaaacaaataaaattgcctagtcaggcctacattgatctacctcttgggaaagatgctcagagagagaatcctgcagaagctgaaagctgggaggaggcagcctctgcgaatgctgccacagtctccattgagatgactcctacgaatagtctgagtagatccccccagagaaagaaaacc

SEQ ID NO: 67 - DNA, 600 bp, Homo sapiens; identical to SEQ ID NO: 66

SEQ ID NO: 68 - DNA, 600 bp, Homo sapiens
cttggaccagttgtggctccttccttgagtctctgccatgccctctccatgggtgcagatgcctgtcctgttctcggccatatgcccagtgcccggcatgggtcctggatcacagaactcatttcatgagtgttttcgagggggtttgggtgagggcttgggtggaaggtggctgcagacccccaagggatcctccaaggatgctgtgtagataagtaagaagtagtgtttccatgctctgtgtacgtgccggacgagtgggaggtgtctcgagagaagatcaccctccttcgagagctggggcagggctccttcggcatggtgtatgagggcaatgccagggacatcatcaagggtgaggcagagacccgcgtggcggtgaagacggtcaacgagtcagccagtctccgagagcggattgagttcctcaatgaggcctcggtcatgaagggcttcacctgccatcaygtggtgagtccagtgggggtgggacaygggctggctttcctgacccttccctttctctgcctcctcctcctgcacagagcgacagaggacacagggtgtawcctcctacccacccctcactccactaagctt

SEQ ID NO: 69 - DNA, 600 bp, Homo sapiens; identical to SEQ ID NO: 68

SEQ ID NO: 70 - DNA, 1400 bp, Homo sapiens
aagatggtcccaaatgactgtaagccagacttgaagcatgtcaaaaaggtgtacagctgtgaccttacgacgctcgtgaaagcacataccactaagcggccaatggtggtagacatgtgcatcagggagattgagtctagaggtcttaattctgaaggactataccgagtatcaggatttagtgacctaattgaagatgtcaagatggctttcgacagagatggtgagaaggcagatatttctgtgaacatgtatgaagatatcaacattatcactggtgcacttaaactgtacttcagggatttgccaattccactcattacatatgatgcctaccctaagtttatagaatctgccaaaattatggatccggatgagcaattggaaacccttcatgaagcactgaaactactgccacctgctcactgcgaaaccctccggtacctcatggcacatctaaagagagtgaccctccacgaaaaggagaatcttatgaatgcagagaaccttggaatcgtctttggacccacccttatgagatctccagaactagacgccatggctgcattgaatgatatacggtatcagagactggtggtggagctgcttatcaaaaacgaagacattttattttaaatttttaatttgaggggaaaagaaatgttttacagatgaaggaatgttttatagtaatttaatttgctcctgtagctgcattatttcttgattagaggtttgggcatataaccagattaaagtgaaggaactttctgttgtttttgtagcaccgctcagctgtcttgtaaaacagtgaacacacgctttctggttctagtaatcctgggtgtttatcacgttcagagaaactcaagctattgcatgattagccccctatctggcaaggaaaccccatacagaagaaacaacaaacctgcgcctgcaccgcctctgcgtcctgggtagtctgtgcttgtaatccagcatgtttcacagagtaagcctgttgtgactttgcttttggggtctatgtcattggtttctgatgcttgtacaaacacgcacacacaaatggataaaacagcacctctggctgttacattaccataaaccatatcacatgcctacattttacaaatgatttctggkttctcttagttcttctctaacatagwactttctttccagcaaaagcaaaatgtgttttcagatttgttactttaataaaggttatccataccaataaaaagtgtacaacacagcattttctgttaaattattattggttttcagttgtaatttggtattttttctggcatgcgtttattaatttattaaattggcttttagaaawaaaaaatattgatagcttacttttttctcataagaataaaaaaaaaaaa

SEQ ID NO: 71 - DNA, 1400 bp, Homo sapiens; identical to SEQ ID NO: 70

SEQ ID NO: 72 - DNA, 1400 bp, Homo sapiens
atgcttaatgcctttgaaattttgtaatcaaaaaaaagctttgaaaaaatctaaaggggagagtattctttaaagtttttaacataagcttgtcaatgcacatgtagatggttagcatgtttagcaaaccttgtgaaattataataagtttgtagttacatgtgaaactctaaatgcatggcaactgttaatgtcataacagtttagttattttgttctgttctgtcatgtgccacaaaatatgtacttttttcacttttttccctttgtatatcagttacgggttacaactggttcattctgaaaacaacaacaacaaaagtccattcatattttttaacaattgtataaggtgcccaagtaattcactacagcctaaagccttgcctttgtaatttgacttctgacatgttggcaatcaaagcatgcacttgtaacaatgaaaaagaaaaagcattttatattactactcaataaaatgtgcatgaacttacagaattctcatccttccactgagtccgctgaagggatttatgtgcacaaccaccatgtggtcttctaggtgctggcccaccaccacacatcacaggctgatttccacaggcttcttcctaggggcctcgtgatctgaggggtggtgcctacttccactgtaagaaagaatcttggtggatttgtgtctcaaatcagataagagaagcctgtttaaagagcagatgccatcttctggcttcctcaaggagccagttaaaaaaccagagcattcctttttattgaaaaataaaattaatttgttatcaggttgtttcagttgtattggatgccctatctatctgctamagcaaaaagtactaggctactaagtgcattttcatcacagaaaagagttgcatttgtattaacaagaaatttgtatacccacggcttcagctactatctaatcatcacccgaagatttaagatacaccaaatttcagtttgtttgtaacattgttcatctttagtgcactttgttttatataataaagtatgcctgttatattaaataataagaatatggcaattagcgatatagcatacccaaacaaagatgttctcgatacagtctggcaaagactatcccaaggttattttaatgaattcagacattttttcctgtggatatttctccatcctaaaaaaagtggcaaccaaggaaaatatttagatgcaacttactagagtgatgatgtgaaagaaatggtgattctggtatcatggtgtttattttctttcttataactgcagagaaaatatcctgactaaaaaaawttcatttttttggattcctttcttttacaaattgtgctgaggcaactatggcatagaaataaacatttgacattaaaataaraaaaaaa

SEQ ID NO: 73 - DNA, 600 bp, Homo sapiens
  misc_feature (435)..(435): n is a, c, g, or t
ggcaagtcttcttaggatctgatcccagttttctggaagcaatcctaccccagcccawkcttcccagagtcgagccttaatccttctcacttctcagtgtcagagcagaaatgaatcctggggttgactgtgtccattcgggttattagcagctaagaagcccagacgagtagtgtgagctgccttgggagcctcagtgagggcactgggactggcctcactctcttgcccccagcctagtgggctttctcctctgtctctccggtggccccaggcaatcgactgcatcacgcagggacgtgagttggagcggccacgtgcctgcccaccagaggtctacgccatcatgcsgggctgctgggcagcgggagccccagcaacgccacagcatcaaggatgtgcacgcccggctgcaagccctggcccaggcacctnctgtctacctggatgtcctgggctagggggccggccaggggctgggagtggttagcccggaatactggggcctgccttagcatcccccatagcttccacagccccagggtgatctcaaagtatctaattcaccttaacatgtgggaagggacaggtggggcttgg

SEQ ID NO: 74 - DNA, 600 bp, Homo sapiens; identical to SEQ ID NO: 73
  misc_feature (435)..(435): n is a, c, g, or t

SEQ ID NO: 75 - DNA, 506 bp, Homo sapiens
attattggtggtggaatggcttttaccttccttaaggtgctcaacaacatggaggtaggaaacaaatgccaagtggatgtgaaatagctctccatgataatagcaggttgtataaatgtaaaaagaaaacagtcttttgacatgagccctgaaaattcccatttttatttattttggcaagtctttcgtctttgcattgttcctttatattgtattgtgtctggttcctgtctgctttgtgaggcagtcttgttcttagtatagatgctgacctccatcattttggctcccctgtgtagattggcacttctctgtttgatgaagagggagccaagattgtcaaagacctaatgtccaaagctgagaagaatggtgtgaagattaccttgcctgttgactttgtcactgctgacaagtttgatgagaatgccaagactggccaagccactgtggcttctggcatacctgctggctggatggtgagtcacttgagtgggttggtagtg

SEQ ID NO: 76 - DNA, 446 bp, Homo sapiens
tagaggcgaaatcagcacgtggtggctcaaatctccttatggatagtgtttcttccttccagcttttcatgtttcaacttttgcggggcctggcgtacatccaccaccaacacgttcttcacagggacctgaaacctcagaacttactcatcagtcacctgggagagctcaaactggctgattttggtaagtcgcccctcgggtctcattctgggctgtgaacaatgatgcttttgtgtgcacttgtttaagcgttgactgggcctggcctttgaaaactggaggcccaagaacatgatgctttgtgaggatatcaaactaccacaaaggaagtgtgaggcacgaaacagggagggattggtagctttctaggattccaccaagtcccagtttagtcagatggccaaaagctgggcacccttgctgccccactgccagttttgata

SEQ ID NO: 77 - DNA, 446 bp, Homo sapiens; identical to SEQ ID NO: 76

SEQ ID NO: 78 - DNA, 446 bp, Homo sapiens
tatcaaaactggcagtggggcagcaagggtgcccagcttttggccatctgactaaactgggacttggtggaatcctagaaagctaccaatccctccctgtttcgtgcctcacacttcctttgtggtagtttgatatcctcacaaagcatcatgttcttgggcctccagttttcaaaggccaggcccagtcaacgcttaaacaagtgcacacaaaagcatcattgttcacagcccagaatgagacccgaggggcgacttaccaaaatcagccagtttgagctctcccaggtgactgatgagtaagttctgaggtttcaggtccctgtgaagaacgtgttggtggtggatgtacgccaggccccgcaaaagttgaaacatgaaaagctggaaggaagaaacactatccataaggagatttgagccaccacgtgctgatttcgcctcta

SEQ ID NO: 79 - DNA, 446 bp, Homo sapiens; identical to SEQ ID NO: 78

SEQ ID NO: 80 - DNA, 450 bp, Homo sapiens
ttgtgagtttttgaaatctctgtgattttttactttgcaggtacgaaaaacgtttttcaccttagcattttgtgacttttgtcgaaagctgcttttccagggtttccgctgtcaaacatgtggttataaatttcaccagcgttgtagtacagaagttccactgatgtgtgttaattatgaccaacttgagtaagtaatccaaaaatatctcttttctacctaccattttacacttaaattttcttaatgtgaagctacgatgtctaaaagtctgtgagggtttttcttccatacgattgttatagagaattttttttaagtgtagttagagaataatatgtggaatggacagtatttctctcccaaattgtaatgctggttcagctatacagttaatttatattttatattatcgtttaattaatcaagacccctaacccatagaaacca

SEQ ID NO: 81 - DNA, 450 bp, Homo sapiens
tggtttctatgggttaggggtcttgattaattaaacgataatataaaatataaattaactgtatagctgaaccagcattacaatttgggagagaaatactgtccattccacatattattctctaactacacttaaaaaaaattctctataacaatcgtatggaagaaaaaccctcacagacttttagacatcgtagcttcacattaagaaaatttaagtgtaaaatggtaggtagaaaagagatatttttggattacttactcaagttggtcataattaacacacatcagtggaacttctgtactacaacgctggtgaaatttataaccacatgtttgacagcggaaaccctggaaaagcagctttcgacaaaagtcacaaaatgctaaggtgaaaaacgtttttcgtacctgcaaagtaaaaaatcacagagatttcaaaaactcacaa

SEQ ID NO: 82 - DNA, 450 bp, Homo sapiens; identical to SEQ ID NO: 81

SEQ ID NO: 83 - DNA, 476 bp, Homo sapiens
agcaaactgtacccccgaccaccttgggcacatgtcattctgaattctggaggctatatcatggccacatccttaaccttggcaaaataaactttctaaattgactgagccctgtctcagatattttgggttaatactcatgaaatatctatttaggtgaatattcttaatgtttctaggaactatcttaaatttccaaaaacattgatgtagaatttggggcaaattaaaatatatttcaaagctttatcttcaagaacaagcagcaagagcttaccataggaaaactcaattttcgtgctatttctataaaatcttcatttctttctttgacttgtgactgccctgcagcaaagtggctacagacgaagcaaaggctggttgtatggaagagcattcggattgcaactgctcccttatttccagttgcacctcccattccagtcttcacagtatcaactgcaacatccctttga

SEQ ID NO: 84 - DNA, 472 bp, Homo sapiens
ttcaatttttctgtgagttgggttgaagcagaggagtcacaatctcagcaacgagcaagattcatgtataagagccccaatctcacttgaagatggttttccagtaggggagtcagcactacaggtgtgttgaatcatggttcgtatgttaccaaaccacctgtgaatcagatccatgtataagagtaattatttcaatctttgactgctttttatgtgcatgatttattacctcattcctaggccctgttcatgtgggagaatgtcaatcgtgtcagctaggtgtacatacaagtgttctcacctcattgctgctctctgttattacactctctgtatcattaaggctttatgtgatatacctgagtgttataatccttcgtgaaatttatacaagtgaaaagcccaggactttaccaatggctgtgagactggctgtgagagtcagttatctctactggatgggtccagg

SEQ ID NO: 85 - DNA, 472 bp, Homo sapiens; identical to SEQ ID NO: 84

SEQ ID NO: 86 - DNA, 477 bp, Homo sapiens
tcaacttccgttttgagtgtttactgattttctttttttaattttattaggatatgatgtttcagcttctccgaggtctggactttcttcattcacaccgagtagtgcatcgcgatctaaaaccacagaacattctggtgaccagcagcggacaaataaaactcgctgacttcggccttgcccgcatctatagtttccagatggctctaacctcagtggtgagtgagagagtgctgtccttttattaaacttatttttcctattttgaatgacagtctgtccctcttccatgtctctaatgttagtactgcccatgactagttggtggatagaatgtctttgcccatttttatatggcagtgggtaggcagaaagcattctgcttacagctacagtcacatccagcctgggcttgttgtggacaggatccattgcagaaatagcctgttgcatcttagccactggacaggaatcagt

SEQ ID NO: 87 - DNA, 477 bp, Homo sapiens
actgattcctgtccagtggctaagatgcaacaggctatttctgcaatggatcctgtccacaacaagcccaggctggatgtgactgtagctgtaagcagaatgctttctgcctacccactgccatataaaaatgggcaaagacattctatccaccaactagtcatgggcagtactaacattagagacatggaagagggacagactgtcattcaaaataggaaaaataagtttaataaaaggacagcactctctcactcaccactgaggttagagccatctggaaactatagatgcgggcaaggccgaagtcagcgagttttatttgtccgctgctggtcaccagaatgttctgtggttttagatcgcgatgcactactcggtgtgaatgaagaaagtccagacctcggagaagctgaaacatcatatcctaataaaattaaaaaaagaaaatcagtaaacactcaaaacggaagttga

SEQ ID NO: 88 - DNA, 477 bp, Homo sapiens; identical to SEQ ID NO: 87

SEQ ID NO: 89 - DNA, 576 bp, Homo sapiens
gccccaaggagaaaaagaagcttttataaaataggacaaaaatacaagataaactattttatttttggccctcaacttggaccttggctttcttttgtttcagtgacacaaatgaagttgatgtgcccttgaataccagggtgggcaccaaacgctacatggctcccgaagtgctggacgaaagcctgaacaaaaaccacttccagccctacatcatggctgacatctacagcttcggcctaatcatttgggagatggctcgtcgttgtatcacaggaggtgggagtttgagtagtttctgattatgttgatttactcatcattttaaaaataacagctccagttatataactttttagtttttaatttttgtgggcacatagtaggtgtatatattattggataaggagttattttgatacaggcatgccatgtgtaataatcacatcttggagaattggatatctgtcccttcagacatttatcctttgtttcaccaaccagttatactccttgagttatttttaagtgtacaattaaattattactaactgtagtcctccccgttgtgctata

SEQ ID NO: 90 - DNA, 583 bp, Homo sapiens
tcagttaggagttgggtgggggcggcaagcattttcttgattacaataatatgttataaaattatgcttcaggattaggttattttccttctctcacctttaaatggcacaaccagaaaagcaatctgtatggaaaggggttgaggctgtttaaaaaatactcactctggaccccgtgtcctccagacttagcggtttgtcgcctttcctgggtgacaatgatgctgagacgctgaacaacatcctggcctgcaggtgggacttagaggatgaagaatttcaggacatctcggaggaggccaaggagttcatctctaagcttctgattaaggagaagaggtaacgcaagttcgtcctgtgctccgggcgcagtagggatgataaggaagcagggcctaccaccagggctgttcgaatttattctcttactaacatctgtgatgcttgcgcaaagtcatggatagaatgaggtttgagcctcttgacccagtctactgagatctgggactgctttggtcatgaagctacacaaacctttctcttcctgccatttatcatatggccataccagccatggactcct

SEQ ID NO: 91 - DNA, 583 bp, Homo sapiens; identical to SEQ ID NO: 90

SEQ ID NO: 92 - DNA, 583 bp, Homo sapiens
aggagtccatggctggtatggccatatgataaatggcaggaagagaaaggtttgtgtagcttcatgaccaaagcagtcccagatctcagtagactgggtcaagaggctcaaacctcattctatccatgactttgcgcaagcatcacagatgttagtaagagaataaattcgaacagccctggtggtaggccctgcttccttatcatccctactgcgcccggagcacaggacgaacttgcgttacctcttctccttaatcagaagcttagagatgaactccttggcctcctccgagatgtcctgaaattcttcatcctctaagtcccacctgcaggccaggatgttgttcagcgtctcagcatcattgtcacccaggaaaggcgacaaaccgctaagtctggaggacacggggtccagagtgagtattttttaaacagcctcaacccctttccatacagattgcttttctggttgtgccatttaaaggtgagagaaggaaaataacctaatcctgaagcataattttataacatattattgtaatcaagaaaatgcttgccgcccccacccaactcctaactga

SEQ ID NO: 93 - DNA, 583 bp, Homo sapiens; identical to SEQ ID NO: 92

SEQ ID NO: 94 - DNA, 468 bp, Homo sapiens
cttgccattcacccactttccagcaagcacagatgtacaggtatcagggaacatggggaagaaaccccaggctccagaagcaatggcacaggctcaccttccaagctctgctcatttcgctgggactcatttcccagggatccctcactctgacccatagccttcctgacctgttgtgtgaaactcactccacaaaccctgtactttctgataacagctctcttccttttttatctgggccacctcttggtgtggtgcagggatcctgatgtgggaggtgttcagcctggggaagcagccctatgacttgtatgacaactcccaggtggttctgaaggtctcccagggccacaggctttaccggccccacctggcatcggacaccatctaccagatcatgtacagctgctggcacgaggcaagtgtattctctgggtgggctggaaggggtctcaggcacatccgggg

SEQ ID NO: 95 - DNA, 468 bp, Homo sapiens; identical to SEQ ID NO: 94

SEQ ID NO: 96 - DNA, 535 bp, Homo sapiens
tctggagggtaagaagtttgtcccacgarrwwtctcttactttgcctccgcagtatacacgtacatccaaagccggttctaccgatccccagaagtgatcctgggccacccctacgacgtggccattgacatgtggagcctgggctgcatcacggcggagttgtacacgggctaccccctgttccccggggagaatgaggtggagcagctggcctgcatcatggaggtacgcggagggctggcggtcggctcccacggagaccgtgggcttggccctcagacacggggctgcaccagactcgcccaggaccatggcctgcataccttgttgttgttgttgttgttgagtattccctaaaaggarttttgaaattgtgtactcccttgtacttgtcaagtcgacatctaacgttttatcataaatttaaatagttgcagaggatgtcatttccatcatattgtaaatagtgacattttaaaataaaattacaccgctctttcaaaaatatccaaaagaatgcaaaaccagacggac

SEQ ID NO: 97 - DNA, 466 bp, Homo sapiens
ccccactacaatttgatggctctgcatcacttaggtattcgtttttctgttaagtgagtgattacaaaggaattaaaataaaattttacagatgagggaaaaaaatctttagtttcctccatatttgtctgccaatagaaacatttggtcacatctgaattttgtacttcagtgtactcatcaattttaagcactatttgatcataatgggaaaaagtattcttccattgaaaaataacattttgacccagtttctggagcaaatgcaaataattacaccaaactctgtgtactgaccactgagatactcaaggatgaggtagagttttccaccagtctgaaaggcataaattaaatccacgatgaagggatgctttacttcctccagaatattccgttctgcttttgtatgagctgtatctttagcatttcttactatcattgcctaaaggaaaagagatcatct

SEQ ID NO: 98 - DNA, 466 bp, Homo sapiens; identical to SEQ ID NO: 97

SEQ ID NO: 99 - DNA, 600 bp, Homo sapiens
caagggcccctctgttgaacaaatggcccccctcctccccagatcagccgcatcgagtatatccactccaagaacttcatccaccgggacgtcaagcccgacaacttcctcatggggctggggaagaagggcaacctggtctacatcatcgacttcggcctggccaagaagtaccgggacgcccgcacccaccagcacattccctaccgggaaaacaagaacctgaccggcacggcccgctacgcttccatcaacacgcacctgggcattggtgagggagccaggcctggagcagtgtgcacccggggccactggctggggcccagctctctggagccctctcaccccctaccctgatggaggcccccaggctcttttctagtgagaaagtccccaccccgtctgcccccaagctcgtgcttattccgtgtccttgcacagtcgggtcttccccttcgtaagccaagctgtgtgtgccgggcgccttccctggccctgcttcctcctccgccctgttggtgcaggctggaagatacaggctcagaggtttaacatgggttgcttaaggtcatgcagcttagctaatgccaaagctggact

SEQ ID NO: 100 - DNA, 600 bp, Homo sapiens
ttgtaaaggcactgtcagagaatctggagttgaatgattattccagatactgtataacctgcataactttttgtctttaagtcgtgtttgtaaaagaagtaattgctagaaacatttgataatgtacaaagtagtctataatgactgttcagtacatttttaatatttttttggytatatccaactttttgtaaatatactggaagcttgataataaaatgtatttcctatcaccatacttttccatgtgaaaacctgagcctatttctagtataagtatccaaagaaaagtttgacctggttgtgttattttaccagaccttggtaaaagaactattttggaaacagtatttgtaaatggaactaatgctatatttaaaaacactgatttttttttaacctgccaaaaataaaaaaaagctcattttataattttctactaaatttgagttgattatctggaggtctcatttcttgtaaagtataactttttcagaaactaccaccaaattatccaactgttatactaccagaaggctttaaaaagttaaaaacctaatatcaaactttctaggtgttaagatataaggcattgcctga

SEQ ID NO: 101 - DNA, 600 bp, Homo sapiens; identical to SEQ ID NO: 100

SEQ ID NO: 102 - DNA, 1400 bp, Homo sapiens
cacacacacacacacacacaaacacaaaggacagtcatacattttgatatttgagccattcctaaagatttggggttttctaaaactaaagaatctaggaaccttgcctgcgaccaatcatggagccacgtgagctgatcgtggctgcacctggggggagggtagggaggaggggcatgccacctaatgatcaagccctataattagcttctcattaragccgtgatggtgatgtgtgctgtctaaaatccaatgttgtgggtagagagaatgagtttgtgactaggagagactaaacttttgttttccttacccagtataaatatatatatatatatttaatctatttttattagaagtttttctgctctttcttacataaaagaaccccaagcatgcatctttcatgtgtgtaaataattcatttctgggctaatttcaaaagaatcccaatattgctgtatagaaagagaactagcttgcacattttaggtctgtgaaattttgtgagacttttcctgcactggacagtaaaaaaataataaaagacaaaaacaaatttaaaaaaaaaatttaagccacaaaaaaaggcacatagggaattatgtcaaatgtgtttgtgtccttaggcaaagctgtgggagtcttgaaatgtcacagtagtaaataacttattactttttgacaagttcttttttttctgttggaacactgaattcttctgtgcatatgtacatatgaatacaaatcgaaggcctctacctcctgggagttatacaacttgggcttgtttacctccacatgctgatgatgactattttttttttttttgagttcagtgtggagacttgaaacttgaatgtcccttccaacttttatattaaaaataaaaagacaaggraaattgaagatcatttttcacctgtacaaggaatactaatggatcgtcttaaaattggtctaggaaaaaaccttggtgtgtgttatggacaattaactgttaaagttattgtaagttatctgtatttagcagagtattttcaacttgagtgatctgagctgaatttgaagactattaataagttatgtttggaagttttaacytcaatgaagtaattatttgctgtgaaagaaacaaacattgaattactaaacaaagatggtgcaatatctttgttttttttttatgaggctcctgagaatcaacccaactgaagcatttcaattcacttgaatgagaaacgtgtttagtatcaaaagagcccaaraagacmctggtgtgaaaggtacaatctcaraggttggtcaattaccgtggcacactttctggtcactttgtacaatgtaratttgaagtacagtggtgaaaacattaaatgtgacatttgaaaaaaaaaaaa

SEQ ID NO: 103 - DNA, 1400 bp, Homo sapiens; identical to SEQ ID NO: 102

SEQ ID NO: 104 - DNA, 1400 bp, Homo sapiens
agaagcttggctttggtactggggtaaatgtgtacctaatgaaaagatctccaagaggtttgtctcattctccttgggctgtaaaaaagattaatcctatatgtaatgatcattatcgaagtgtgtatcaaaagagactaatggatgaagctaagattttgaaaagccttcatcatccaaacattgttggttatcgtrcttttactgaagccaatgatggcagtctgtgtcttgctatggaatatggaggtgaaaagtctctaaatgacttaatagaagaacgatataaagccagccaagatccttttccagcagccataattttaaaagttgctttgaatatggcaagagggttaaagtatctgcaccaagaaaagaaactgcttcatggagacataaagtcttcaaatgttgtaattaaaggcgattttgaaacaattaaaatctgtgatgtaggagtctctctaccactggatgaaaatatgactgkgactgmccytgaggcttgktaccattggcaccarasccwtggraacccmaaraagctgtggargagaatggkgttattmctgacaaggcagacatatttgcctttggccttactttgkgggaaatgatgactttatcgattccacacattaatctttcaaatgatgatgatgatgaagataaaacttttgatgaaagtgattttgatgatgaagcatactatgcagcgttgggaactaggccacctattaatatggaagaactggatgaatcataccagaaagtaattgaactcttctctgtatgcactaatgaagaccctaaagatcgtccttctgctgcacacattgttgaagctctggaaacagatgtctagtgatcatctcagctgaagtgtggcttgcataaataactgtttattccaaaatatttacatagttactatcagtagttattagactctaaaattggcatatttgaggaccatagtttcttgttaacatatggataactatttctaatatgaaatatgcttatattggctataagcacttggaattgtactgggttttctgtaaagttttagaaactagctacataagtactttgatactgctcatgctgacttaaaacactagcagtaaaacgctgtaaactgtaacattaaattgaatgaccattacttttattaatgatctttcttaaatattctatattttaatggatctactgacattagcactttgtacagtacaaaataaagtctacatttgtttaaaacaaaaaaaaaaaaaaaaaattgcggccgctctagagtatccctcaaagaggcccaagcttacgcgtacccagctttcttgtacaaagtggtgccgatatgtgagacgaatgatggctagatcgacgatcgc

SEQ ID NO: 105 - DNA, 1400 bp, Homo sapiens; identical to SEQ ID NO: 104

SEQ ID NO: 106 - DNA, 600 bp, Homo sapiens
tgcctttatttctctttaaggaccagaaccaggaatactrtatcgaaaaattagtctgtggatttaacactgacttagcatatagcttaaagttgctcttttggtttttaacttcctccatacataagcttcaaggacaataagatgttaaaraggaggaaataattatttttattttgacactgtgacagttttggtaactaggatcctagggagggaaatgtttgcctgttgaacttctttctgttatgagaggatttagttaggtcattaagatgttgatcacacagcttcaatcacaatatgccaagtataacctggtttcgttagaggtgtctacagtccagatgttcttcgtaataaaagcaaagtttttgaacctctgagtccaaagcaggctggttggcataatatgtaatttgaaaaataaaatcttatcttgcagcactatcagtatgttgaatttattatgtatattatttctaatatccgaaactaaatacttgattttttaatatgtgtgtttattttatgatattgctattaaatttttattatcyaaaaaaaaaaaaaaaaaaaaaaactgcggccgcaagctta

SEQ ID NO: 107 - DNA, 1400 bp, Homo sapiens
aatcatcaggaawtcawtgtctttgtctctgatttctacatcagccttggaaaatgagcacacttttcattctcagctcttgggggccagccttactttgctcttatatgttgcactgtggatgtttggggctttggctgtttctttgtattaccctttggacttggtttttagcttcgtttttggagccacaastttaagcttcagtgcrttcttcrtggtccaccattgtgttaatagggaggatsttagacttgcgtggatcatgacttgctgcccaggacggagctcgtattcagtgcaagtcaacgtccagccccccaactctaatgggacgaatggagaggcacccaaatgccccaatagcagtgcggagtcttcatgcacaaacaaaagtgmttcaascttcaaaaattcctcccagggctgcaaattaacaaacttgcaggcggctgcagctcagtgccatgccaattctttacctttgaactccacccctcagcttgataatagtctgacagaacattcaatggacaatgatattaaaatgcacgctggcgcctttagaagttcagtttcgaacaaatgtgcactcaagccgccaccataaaaacagaagtaaaggacaccgggcaagccgactcacagtcctgagagaatatgcctacgatgtcccaacgagcgtggaaggaagcgtgcagaacggcttacctaaaagccggctgggcaataacgaaggacactcgaggagccgaagagcttatttagcctacagagagagacagtacaacccaccccagcaagacagcagcgatgcttgtagcacacttcccaaaagtagcagaaattttgaaaagccagtttcaaccactagtaaaaaagatgcgttaagggaagccagctgtggttgaacttsaaaatcagcaaaaatcttatggcctcaacttggccattcagaatggaccaattaaaagcaatgggcaggagggacccttgctcggtaccgatagcactggsaatgttassactggattatggaaacacgaaactactgtgtaacattgctgggcttcctaggcagaaattcatataaactstgatactcacattccttsaagctatgagcatttaaaaactgtttacagscaccatagggattcaaaagaatttggaataaactttgaagttttggattttacttatttttatccccaaattgttgctattttttaggatctgaaacaaaatctttctaaaacattgttttagttgtcaaagcaccaacaggacattttgggatgtgaaatgtaatttcttggaatctgtaatttgtacttaatatttcaggcttgtatttaatataataaataggtgtttgttawwrwrwmaaaaaaaaaaaa

SEQ ID NO: 108 - DNA, 600 bp, Homo sapiens
aaaccacttagatagtagttttttcataaatgctcatcatatttatgttccgctgtacatgttcagtataaatatatgtgtagtgaagctactgtgagtctttaaatggaaagagcaaatgagaagtggtttggatacacttgatgagagatgagagtgtcacattaataatttttaagactcttaggcagctatgggtttcttttgatcatttttgttctttattcatttgaacacgtttttgaagttcttcaaaactagtcagtttgaattttgacagctattcaatatgtgatctccaagtttaaaaaaatttttttccagacttccctaatcctaaaatgcgagtttttatttttaataactgtaccaaggaataagtatgaaaacagttctctgttaccatattttgtattctggaccacttactggtgaaagcaaccatgcaaaagaaattaatttggccaggcacagtggctcatgcctgtaatcccagcactttgagaggccaaggtgggtagatcatctgaggtcaggaattcaagaccagcctggccaacatggtgaaaccctgtctctagtaaaaatccaaaaaaaaaa

SEQ ID NO: 109 - DNA, 600 bp, Homo sapiens
tatattgtaacaattatttttaatgcattgtattttgaagtaacggttcagttaaatttttcacctgctgtgtaactgaaacacaattacagtttataatcatctgtagaagtctggagataattttgcaactcatgttatgggttaaatgaatatttttgtaaaagtaaaagcaacaaatttataaattgattatttgaaactttacaacacaattgcatcccaaatacaaattgtattgcttattcattatagctattcgtcctaaaacactggagtatgcttcacctagaaacagattacaggacgaatagctataatgaataagcaatacaatttgtatttgggatgcaattgtgttgtaaagtttcaaataatcaatttataaatttgttgcttttacttttacaaaaatattcatttaacccataacatgagttgcaaaattatctccagacttctacagatgattataaactgtaattgtgtttcagttacacagcaggtgaaaaatttaactgaaccgttacttcaaaatacaatgcattaaaaataattcggacgcgtgggtcgacccgggaattccggacgcggtattaa

SEQ ID NO: 110 - DNA, 600 bp, Homo sapiens; identical to SEQ ID NO: 109

SEQ ID NO: 111 - DNA, 600 bp, Homo sapiens
gtgccatccatgacctgggggttgtctttgggaaggaggaccttgatgatgctttcaaagatgatcgatttccagagtatggcaaagtggagtttgtattttcttatgggccagagaaaattcaaggcatggagsacctggagaacgggccgagcgtgtctgtggactataacacctctgaccccctcatccgctgggactcctacgacaacttcagtgggcatcgagatgacggcatggaggaggtggtgggacacacgcaggggccactagatgggagcctgtatgctaaggtgaagaagaaagactccctgcacggcagcaccggggctgttaatgccacacgtcctacactgtcggccacccccaacacgtggaacacacgctttctgtgtatttatatagatggaaatatactttatattttgtatcatcgtgcctatagccgctgccaccgtgtataaatcctggtgtatgctccttatcctggacatgaatgtattgtacactgacgcgtccccactcctgtacagctgctttgtttctttgcaatgcattgtatggctttataaatgataaagttaaagaaaaaaaaaaaaa

SEQ ID NO: 112 - DNA, 600 bp, Homo sapiens; identical to SEQ ID NO: 111

SEQ ID NO: 113 - DNA, 1400 bp, Homo sapiens
acccatgagatgtacttgaacgtaatgagaagattcagccaagcattgttgaagggtgataagtctgtcagagttatgcgttctttgctggctgcacaacagacatttgtagatcggttggtgcatctaatgaaggcagtacaacgcgaaagtggaaatcgtaagaaaaagaatgagagactacaggcattgcttggagataatgaaaagatgaatttgtcagatgtggaacttatcccgttgcctttagaaccccaagtgaaaattagaggaataattccggaaacagctacactgtttaaaagtgcccttatgcctgcacagttgttttttaagacggaagatggaggcaaatatccagttatatttaagcatggagatgatttacgtcaagatcaacttattcttcaaatcatttcactcatggacaagctgttacggaaagaaaatctggacttgaaattgacaccttataaggtgttagccaccagtacaaaacatggcttcatgcagtttatccagtcagttcctgtggctgaagttcttgatacagagggaagcattcagaacttttttagaaaatatgcaccaagtgagaatgggccaaatgggattagtgctgaggtcatggacacttacgttaaaagctgtgctggatattgcgtgatcacctatatacttggagttggagacaggcacctggataaccttttgctaacaaaaacaggcaaactcttccacatagactttggatatattttgggtcgggatccaaagcctcttcctccaccaatgaagctgaataaagaaatggtagaaggaatggggggcacacagagtgagcagtaccaagagttccgtaaacagtgttacacggctttcctccacctgcgaaggtattctaatctgattttgaacttgttttccttgatggttgatgcaaacattccagatattgcacttgaaccagataaaactgtgaaaaaggttcaggataaattccgcttagacctgtcggatgaagaggctgtgcattacatgcagagtctgattgatgagagtgtccatgctctttttgctgcagtggtggaacagattcacaagtttgcccagtactggagaaaatgaaactgggattgacccatcaagatgcttggctcaataagaaaaccacgttaggagcaacctttgtatattggagacttcagagtaaccagcaaggaagagaaatcttaatcttcaagttaccatattttccaaatattacatggtacctgagttctgcttccttggatgtcattgcttaaatatagtcttgaagggcttgttttgaaatattgtatatattttttcaaatgtatacattgttaataaattaagaaatgagaaaaaaaaaaaaa

SEQ ID NO: 114 - DNA, 1400 bp, Homo sapiens; identical to SEQ ID NO: 113

SEQ ID NO: 115 - DNA, 600 bp, Homo sapiens
acggaccttcttattcctctcycctaacaccatcgtttccactcttctcagtgtaggtaaccgtctatggtgtgttttttcattaatgacaaaaaaaaaarggtttcaactggattatttaaatattggtaaatattgtgcawwarrrwwwrwwwwwmmwkktaagaagtatgtcctttgtatctctaagttacatgacctatatcttttcctctttaatagtagttttatgttaacctttaagagatttgtttttcctcaaaggagaatttaaaggtatttttttaaaattctaataagaggatcagccgggtgcaatgactcatgcctgtaatcccagcacgttgggaggccaagtcgggcggatcacaaggtcaggagatcaaggccatcctggttctatactgtgtagattgctggctactaaaaatacaaaaaattagccgggcgtggtggcacacacctagtagtcccggctactcgggtaggctgaggcaggagaattgcttgaacccgggagacggaggttgcagtgagctgagatcgtgccactgcactccagcctgggtgacagagcaagactctgtctcaaaaaaaaaa

SEQ ID NO: 116 - DNA, 600 bp, Homo sapiens; identical to SEQ ID NO: 115

SEQ ID NO: 117 - DNA, 1400 bp, Homo sapiens
tttttgaggaccttgataaaaaattagcactagcctccaggttttacatcccagagggctgcattcaaagatgggcagctgaaatggtggtagcccttgatgctttacatagagagggaattgtgtgccgcgatttgaacccaaacaacatcttattgaatgatagaggacacattcagctaacgtattttagcaggtggagtgaggttgaagattcctgtgacagcgatgccatagagagaatgtactgtgccccagaggttggagcaatcactgaagaaactgaagcctgtgattggtggagtttgggtgctgtcctctttgaacttctcactggcaagactctggttgaatgccatccagcaggaataaatactcacactactttgaacatgccagaatgtgtctctgaagaggctcgctcactcattcaacagctcttgcagttcaatcctctggaacgacttggtgctggagttgctggtgttgaagatatcaaatctcatccattttttacccctgtggattgggcagaactgatgagatgaacgtaatgcagggttatcttcacacattctgatcttctctgtgacaggcatctccagcactgaggcacctctgactcacagttacttatggagcaccaaagcatttggataargaccgttataggaaatgggggggaaatggctaaaagagaacaattygtttacaattacaagatattagctaattgtgccaggggctgttatatacatatatacacaaccaaggtgtgatctgaatttaatccacatttggtgttgcagatgagttgtaaagccaactgaaagagttccttcaagaagttcctctgataggaagctagaagtgtagaatgaagttttacttgacagaaggacctttacatggcagctaacagtgctttttgctgaccaggattggtttatatgattaaattaatatttgcttaataatacactaaaagtatatgaacaatgtcatcaatgaaacttaaaagcgagaaaaaagaatatacacataatttctgacggaaaacctgtaccctgatgctgtataatgtatgttgaatgtggtcccagattatttctgtaagaagacactccatgttgtcagctttgtactctttgttgatactgcttatttagagaagggttcatataaacactcactctgtgtcttcaacagcatctttctttccccatctttctattttctgcaccctctgcttgttccctcatattctgttcttccgactcctgctaacacacatgcaacaaaaaagggaagggagtgcttatttccctttgtgtaaggactaagaaatcatgatatcaaataaacatggtgaaacattaaaaaaaaaaaaaaaaaaaaaa

SEQ ID NO: 118 - DNA, 1400 bp, Homo sapiens
gtcacgtaggtttgctgccttcagaataccgcaatttaattgcgggaatataataatattgggactgtttcacagcacaaactcatctttacagtgttgatcaatgcatcagttaagaaataatgccacctcaggaattaactggcattgggaacatttgcctcattctcctgctatcctcttcattcacccctgccactgtaatatctataagtacttaagagacttgtgagcaaaacatactatttataacagtatatgattgatttatgcttatgtggttgttcagtttgttcccatgtaactcgtttgttttaaatattttgccagatttcttgtatttattccacatcattatgcctataatgtgccgctttgtgattgggcatttgcctacttttctttcataattagtgatatatgcgatgtaaaaccactagtaaaggtacattttaatacttgttattttatactgaattagccttggaggttgactgtgcaatgttatttactgttgtaattactgtaataccaacatatgggccccatctgcacactcctgaaaaacagaaagtgtattcaaattttatcagtttaaagaaaataaagctgtgataaatactgtaattccaacctacattagaaggtctaagtgtaggtgatgtgccattccataatggcttccagactagggtgaattttatgttctgtactgtactgtgatgtagctttcttctgtaacagttatgttttaaaattaagtgagttttttttttgccttagcaaagggtggtgtttgaaaaaaaaaatgtgtagcccctttttaacctagtgttcattcaaaaaaaaattgatgcaaatctttattcactttcactggtgcacactgaaattttacttgaacagttctcataataaagcacttgtcttttgctctttatcagaatgtgaattacctgttttctggtacaaaagtattctgtatgaggagtttattgtatgtgttctaaatttagttggcaaagggtgaagctgtgaaggttttcaagattattgaaactatgaaggtttcttgtcattatgacaagaaagtttaatctttttataggaattcctgtcactgaaatacgtttttaaaaaaatagactcatgtgttttccacggtagaaactgatatttttttacattttctcactgtggccaactcttctgtgtttgtagaaaggaatttgacttcaatatcttttatgaactaaaaatgaaatcttgatactcactttagatttttcattttatgtgttcatgacaacataaatatttttcaaagatttagaggaattttgcaatgtgtttgcataaataaataccagtttatgttcaccggctatgtgataccagga

SEQ ID NO: 119 - DNA, 1400 bp, Homo sapiens; identical to SEQ ID NO: 118

SEQ ID NO: 120 - DNA, 600 bp, Homo sapiens
ctcataccctccctccctaccctaaccaagttccttggccatgcagaaagcatccctcacccatcctagaggccaggcaggagcccttctatacccacccagaatgagacatccagcagatttccagccttctactgctctcctccacctcaactccgtgcttaaccaaagaagctgtactccggggggtctcttctgaataaagcaattagcaaatcatgtatatgtgtgtgtgtatgcattgccctatgcactgttagcatgagaacaaacaggggtaggggttaaaaatacaggctctgagtctggtgtagtgctgtgtgcctgttgtcccagctgctcgggaggctgaggctgaagtgcaaggattgcttgagctcacagaagttcaaggccagcctgggcaacacagggagaccttatctttataaaaacaaaacaaaacaaacgaaaaaaatagcttctggagtcagactggctgtgtcaaatccccgctcccccatctcactaagccttagttctttcatctagatggagataacactggtgcctcctgcatgggcatgtttgagaattagaatgatgacaaatgaaaagctt

SEQ ID NO: 121 - DNA, 600 bp, Homo sapiens
agtgatgtctggtccttcggggtgttaatgtgggagatcttcactttagggggctcgccctacccagggattcccgtggaggaactttttaagctgctgaaggaaggacacagaatggataagccagccaactgcaccaacgaactgtacatgatgatgagggactgttggcatgcagtgccctcccagagaccaacgttcaagcagttggtagaagacttggatcgaattctcactctcacaaccaatgagatctgaaagtttatggcttcattgagaaactgggaaaagttggtcaggcgcagtggctcatgcctgtaatcccagcactttgggasgccgaggcaggcggatcatgaggtcaggagttccagaccagcctggccaacatggtgaaaccctgtctctactaaagatacaaaaaattagccgggcgtgttggtgtgcgcctgtaatcccagctactccgggaggctgaggcaggagagtcacttgaaccggggaggcggaggttacagtgagccgagatcatgccattgcattccagccttggcgacagagcgagactccatctaaaaaaaaaaaaaaaaaaaaaaaaaa

SEQ ID NO: 122 - DNA, 600 bp, Homo sapiens; identical to SEQ ID NO: 121

SEQ ID NO: 123 - DNA, 600 bp, Homo sapiens
acgcaaaggcggccggcagggtttggttttggaaggtttgcgtgctcttcacagtcgggttacaggcgagttccctgtggcgtttcctactcctaatgagagttccttccggactcttacgtgtctcctggcctggccccaggaaggaaatgatgcagcttgctccttcctcatctctcaggctgtgccttaattcagaacaccaaaagagaggaacgtcggcagaggctcctgacggggccgaagaattgtgagaacagaacagaaactcagggtttctgctgggtggagacccacgtggcgccctggtggcaggtctgagggttctctgtcaagtggcggtaaaggctcaggctggtgttcttcctctatctccactcctgtcaggcccccaagtcctcagtattttagctttgtggcttcctgatggcagaaaaatcttaattggttggtttgctctccagataatcactagccagatttcgaaattactttttagccgaggttatgataacatctactgtatcctttagaattttaacctataaaactatgtctactggtttctgcctgtgtgcttatgttaaaaaaaaaaaaaaa

SEQ ID NO: 124 - DNA, 1400 bp, Homo sapiens
tggacatctccacaggacacatgattctggcatacatggaggatcaccttcggaaccgggaccggttggccaaggagtggcaggctctgtgcgcctaccaagcagagccaaacacctgtgccgccgcacaggatgagagcaacatcaagaagaaccgccatcctgacttcctaccctatgaccatgcccgaatcaagctgaaagtggagagcagcccttctcggagtgattacatcaacgccagccccatcatcgagcatgaccctcggatgccggcctacatagccacacagggaccactgtcccacaccatcgcggacttctggcagatggtgtgggagagtggctgcactgtcatcgttatgctgaccccgttggtggaggacggtgtcaaacagtgtgaccgctactggccggatgaaggatcttccctctaccasgtctatgaggtgaacctggtgtcggagcacatctggtgcgaggacttcctggtgcggagcttctaccttaagaacgtgcagacccaggagacgcgcacgctcactcagttccacttcctcagctggccggcagagggcactccggcctccacccggccgctgctggacttccgcaggaaagtgaacaagtgctacagaggccgctcctgccccatcatagtgcactgcagtgacggtgcagggaggacaggcacctacatccttattgacatggtcctgaatcgcatggccaaaggagtgaaggagattgatattgctgccaccctggagcatgtccgtgaccagcggcctggacttgtccgttctaaggaccagtttgagtttgcgctgacagccgtggcagaggaggtgaatgctatcctcaaggccctgccccagtgaccccctgggcgcctcagtgggcatcctggcctcggctccttctgcctgtgtgagcatctgtgcacccactcttcagcccctacccatctgccaccttggtctgacttggccatgggagcctttcccaacccagtgtggaagggagtcgggagggaaggaaggggtaggctcgccctgctttatccatgctagaaccatggtatcccatgggaagcagacagcaggcaaggagaggcgtggacaccsgccacaggtgtgcccgagccccatcctacctgagtctctgtctccctctctggatatgtgcgtccccactcccaccagcctaccacctatagacaaagcagaacgaggaaaccccagctcccccaaccctgctaccactggcctgccaccttgaccctgctcaaccttctccctctagcacaagggaacatttctagaaaagtaaaatctacttttgtatcagtgtgaataaagttagtgtgttgtctgtgcagctgcaaaaaaaaaaaaaaa

SEQ ID NO: 125 - DNA, 1400 bp, Homo sapiens
ggtaaacagttgcctactccagtgggtgcagttcagcaagatcctgctctgtcatcaaacagagaagcacatcaacacagagataagatgcaacaatccaaaaaccaggttgtaagttctacaaatggagagttaaacacagatgaccccaccgcagacgttcaaatgcacccatcacagcccctactgaagtagaagtgatggatgaaaccaactgccagaaagtgttgaacatgtggtgctgctgttttttcaaacgaaggaaaaggaaaaccatacagcgccacaaatgactctggacacagacagatcctggggagttacttacatgttcatctgctgtcttgtgattaaaatcatctctgtagtgaccacgtatattttcaaggactcactcttagaaacaaaaatgtcatactttcatacttcattttgtggttgtcttacattctttttctttttttttttctctaatttaacctttatggaagctttaaagttttgtcaaaaacatgagtgcttttgccccatcagtgaatggaatggaccaatgaggtggtatcaatgaatatagttccatagaacatttccagaagttcttctgttgtagaaagcagtacagtatcttaagtgtcaaccagttatatacctaatctggttttttataacttctgtaagagcataatcaaacaggaattttcttttctcagtggataatacaacagagaaaacagagttgcccaaatatttaaaagaagttattccttgagaagttcatattttgtgacatctgcattgatttcagtattactgatggtactgttattcataagtcatattaacattctctccgtgaaatcatggtacagtcgctgcccagaggtactgaggaaaaagcaatatgggttcggcagatggtggtggtaaaatgaatcttaaggagtgtggtaaatatgcgtccgcttttgttgcatcactatgtgaagtactgtgttgcagaagtggcaaaagcgcttatttttaaaaatgcaaaatatttgtacaatgtaactttatgcttccaaataataatgtatgttagacagcaagaaatgaatactttaaaaagtgatgtatgttggagttataaagaaatacactaaggagaggtagtaaatgtgaaccttgttgcagtgtataaggtggaagcctaaagaaatctcaccgaaacttactgctgaatgattacattctcccttaagcagaaaactttggatgtgccatgcaatggtgtctgtgtaattattttgctctttgattaaaaaaaagacccccagcaataaaaagtgggtcactctaaaaaaaaaaaaaaaaaaaaaaaaaaaaaaaaaaaaaaaaaaaaaacgacagcaacggaattc

SEQ ID NO: 126 - DNA, 600 bp, Homo sapiens
gattctggtaaaccagttctccgaacccatttgtacatccatcacgccattgacttggcaacagaagaggtgtcgcagatgcagctatgctcccaggctgcagaggagctcattactaggatatgtgacgcagccacaattcactgtcttttggagcaagaactggcccatgctgtgaatgcctgctcccatgccctgaataaagccaacccaaggtgcccggagagtcttacaagagacactgccactgaaatagccatcaatgtgaaggcgctgtataatgaaacagaatctttgctagttggcagggttcctttgcagctggaatcgccacatgaagagcgagtatccaatgccttacactctgtggaggtggaattacagaaactgacagagattccttggctttattatatcttacacccaaatgargatgaggaacctcctatggattgcaccaaaaggaacaacagaagcaccgtatttcgaatagtgccaaagtttaaaaaggaaaaggttcagaagcagaagacaagttcacagcctggatctggggataccgaaagtgggtcatgtgaagcgaattctccagggaattaa

SEQ ID NO: 127 - DNA, 600 bp, Homo sapiens
cgcaaactggcggaacggttgggggttcagcagccggcgctttactggcacttcaggaacaagcgggcgctgctcgacgcactggccgaagccatgctggcggagaatcatagcacttcggtgccgagagccgacgacgactggcgctcatttctgactgggaatgcccgcagcttcaggcaggcgctgctcgcctaccgccagcacaatggatctcgagggatcttccatacctaccagttctgcgcctgcaggtcgcggccgcactactctttgatgtattactcatattaccaaggaataactggcgggcacagggtcaggtgctgaagggacattgtgagaagtgacctagaaggcaagaggtgagccctctgtcacgctggcataagggccgcttgagggctctttggtcaagcagtaacgccagtgtctgggaaggcacctgttactcagcagaccatgaaagggcgtctccctttccttggagcagtcagggaacactctgctccaccagcttcttgtgggagsctggatattatccaggcctgcccgcagtcatccggaggcctaacccctccctgtggtgcttcagtggtc

SEQ ID NO: 128 - DNA, 1400 bp, Homo sapiens
  misc_feature (615)..(615): n is a, c, g, or t
agcatccgatttctcttgaccatagccataagaatatcttcaacttgctgctcattatctaacaaacataattttctttatttcatattgattgtaataagtaatatccccctggaagtttactattcaacacatatatgttaacctccttaattccttaaacaaacttcatgaggttctattattatcatccccttctttcaaaggaagaaacttgccacagagaagtcaggtgatatgactggtgtcacacagctagtcagtggaagasaggaataagtaatctagatatctgcctactacactgtaggtttgcttcaaagttactgaagycatgttatttccatgatgtgattagagtctgggacttgtcttgtttgggarwtwctsmmaggtggttttcttataaaatgcatctcaaatctgctctacaccttttactcatctacctccatttagaagatctgatatggaaagagacaaagatggagacctcaattattttttcttttctgttaaaaatattatagtacaactgaaacttatcacatgccaatggggaatagataactaaaagtttaaaattagatcaatggataggtaaatgaataatcnttcttttgcttgtgagaggggaaggaaaagcggttaaggtggtataaaggaggctcctctgtacacttgcaaaatgatcaaattatatacccttgtatttataattttaagtgacaaattcattacttctggttacaacagtgaaatttaaaaaaaaatagtttttctttcttagcttgcaatgctataaatctttttctttttataagaattcttacatttcagctttttgttcattttaatttataattctcagtgcaagaaattcttaataaaggtttgagctagctagatggaattattgagacaaagtctaaatcacccgtggacttatttgacctttagccatcatttcttattccacattataaaacaatgttacctgtagatttctttttactttttcagtccttggaaaagaaatggtgattaaatatcattatatcattttatgttcaggcatttaaaaagctttatttgtcatctatattgtcctaatagttttcagtctggctttacgtaacttttacggaaatttctaacatgtacaaatgccatgttcctcctttctttcctacatggctgaattagaaaacaaattacttccattttaagtttggctaaattagaaaacaaattactaccattttaagtttggtggctaaataacgtgctaagggaacatcttaaaaagtgaattttgatcaaatatttcttaagcatatgtgatagactttgaaaccaaaaaaaaaaaaaaaaaaaaaaaaaaaaaaaaaaaaaaaaaa

SEQ ID NO: 129 - DNA, 600 bp, Homo sapiens
cggaatctattcgaatttgtgattttggctttgcaaaacagctgagagcggaaaatggtcttctcatgactccttgttacactgcaaattttgttgcaccagaggttttaaaaagacaaggctatgatgctgcttgtgatatatggagtcttggtgtcctactctatacaatgcttaccggttacactccatttgcaaatggtcctgatgatacaccagaggaaatattggcacgaataggtagcggaaaattctcactcagtggtggttactggaattctgtttcagacacagcaaaggacctggtgtcaaagatgcttcatgtagaccctcatcagagactgactgctgctcttgtgctcagacatccttggatcgtccactgggaccaactgccacaataccaactaaacagacaggatgcaccacatctagtaaagggtgccatggcagctacatattctgctttgaaccgtaatcagtcaccagttttggaaccagtaggccgctctactcttgctcagcggagaggtattaaaaaaatcacctcaacagccctgtgaagtgacctcagtgagatatttggatccatggtgtaaa

SEQ ID NO: 130 - DNA, 1400 bp, Homo sapiens
gcaggccttgcagggagaagcagtaagcagccatctccatcagccatttccatctggcactcagacgtgcacgtcttcgtgtgacaggcggcagcagtgcgaccgtgacctcccatctgctctgctgtccccacacctgcggtgcagccagcctgccacaaggcagctagagtccagctagacccacccctggcacggccgacctcttcctggcttcttctgggcctaatccccgtgcattctccaacgccagaagtgtaagaaagtgcaaggcaacaagtgagaagagcaaacccaaatcgtaccagggaagctagtctttccagggcacctgagtgagggcatgaccagccttgacgctgcctcgctaccatctgcccagggcctgctgaatgcttgagtccatggtgacagtggtgggaacagttacgaggcagttagattttggaagtcatgttggcccacttggctacagagcagtcttaggaacagcaccataaaaataaagacttattcctgacacacatgcatctagagtaaactggggcgtatctgacagcgttagtacagtgatggccaaatgcaaactgcattccagaaccagcgaagggtgacagactgggctgaggcagagctaggactaaccatctcgagtgatgccatctcggggccaacaaaagttttggacacggctggatcatctgaccaaactgctcaaatctttacacaattattgtcctggtattaaactttcacctgccacttccaacaaacaggagacagaataaggagatgaccaggaagatggctggattaagaattctagacttggccgggtgcggtggctcacacctgtaatcctagcatcttgggaggctgaggcaggaggatcgcttgagcccagagtttgagaccagcctaggcaacataaggagaccccatctctacaaaatatcaaaaaattacccaggtatggtggcacacacgtgtgattccagctactcgggaggctgagatgggaggatcacttgaacccaggaggttggggctacaatgagctatgatcgcaccacttcattccagcctggatgacagaagactcactccatagttcatggccccgtgatccagagtccctgctggcgccttcgagtggggcaggctgagaactcaagctgtaactaatgtctcctccgaagaaaactaaaccgagggctgagctgatgtgaagttttccgtggctgcattcatacaaatggtgaaaatgtagcatacctcccctcaaaagcctgaaagtaaagacatgcccccaatttaatgtgatgaattagagaaataggtttcagacacttcatggtttaaagtctcacaaaataaagctttcgaaggaaaaaaaaaaa

SEQ ID NO: 131 - DNA, 1400 bp, Homo sapiens
ttccaagagcaaggatgaaaaattgaagtcacagcccctcagcaccaagcagaaggtggccctatgcacccaggtagccctgggmatggagcacctgtccaacaaccgctttgtgcataaggacttggctgcgcgtaactgcctggtcagtgcccagagacaagtgaaggtgtctgccctgggcctcagcaaggatgtgtayaacagtgagtactaccacttccgccaggcctgggtgscgctgcgctggatgtcccccgaggccatcctggagggtgacttctctaccaagtctgatgtctgggcctycggtgtgctgatgtgggaagtgtttacacatggagagatgccccatggtgggcaggcagatgatgaagtactggcagatttgcaggctgggaaggctagacttcctcagcccgagggctgcccttccaaactctatcggctgatgcagcgctgctgggccctcagccccaaggaccggccctccttcagtgagattgccagcgccctgggagacagcaccgtggacagcaagccgtgaggagggagcccgctcaggatggcctgggcaggggaggacatctctagagggaagctcacagcatgatgggcaagatccctgtcctcctgggccctgaggcccctgccctagtgcaacaggcattgctgaggtctgagcagggcctggcctttcctcctcttcctcaccctcatcctttgggaggctgacttggacccaaactgggcgactagggctttgagctgggcagttttccctgccacctcttcctctatcagggacagtgtgggtgccacaggtaaccccaatttctggccttcaacttctccccttgaccgggtccaactctgccactcatctgccaactttgcctggggagggctaggcttgggatgagctgggtttgtggggagttccttaatattctcaagttctgggcacacagggttaatgagtctcttggcccactggtcccacttgggggtctagaccaggattatagaggacacagcaagtgagtcctccccactctgggcttgtgcacactgacccagacccacggtcttccccacccttctctcctttcctcatcctaagtgcctggcagatgaaggagttttcaggagcttttgacactatataaaccgccctttttgtatgcaccacgggcggcttttatatgtaattgcagcgtggggtgggtgggcatgggaggtaggggtgggccctggagatgaggagggtgggccatccttaccccacacttttattgttgtcgttttttgtktgtttgtgtttttttgtttttgtttttgtttttacactcgctgctctcaataaataagcctttttaaaaaaaaaaaaaaaaaaaaaa

SEQ ID NO: 132 - DNA, 600 bp, Homo sapiens
ccacaaaccaggctggaacccaagccccttcctccacagctgccttcagtgggtagaatgggsccagggcccagctttggccttagcttgacggcagggcccctgccaattgcasgagggtttggttcccactcagcttctgccggtcggcagcctgggccaggcccttttcctgcatgtgccacctccagtgggaaacaaaactaaagagaccactctgtgccaagtcgactatgccttagacacatcctcctaccgtccccaaatscccctgggcaggaggcagtggagaaccaagccccatggcctcagaatttccccccagttccccaagtgtctctggggacctgaagccctggggcttacgttctctcttgcccagggtgggcctggtcctgagggcaggacagggggtttgsagatgtgggcctttgatagacccacttgggccttcatgccatggcctgtggatggagaatgtgcagttatttattatgcgtattcagtttgtaaacgtatcctctgtattcagtaaacaggctgcctctccagggagggctgccattcattccaacaaaaaaaaaaaaaaaaaaaaaaaaa

SEQ ID NO: 133 - DNA, 600 bp, Homo sapiens; identical to SEQ ID NO: 132

SEQ ID NO: 134 - DNA, 600 bp, Homo sapiens
gattttggcatgagcagggatatctacagcaccgactattaccgtgtrrgrgkcctttgtcmccawcgccytycsctgsatscmrmcygtagacaycctgkaccgtaagttcaccaccgagagcgacgtgtggagcttcggcgtggtgctctgggagatcttcacctacggcaagcagccctggtaccagctctccaacacggaggcaatcgactgcatcacgcagggacgtgagttggagcggccacgtgcctgcccaccagaggtctacgccatcatgcggggctgctggcagcgggagcccagcaacgccacagcatcaaggatgtgcacgcccggctgcaagccctggcctaggcacctcctgtctacctggatgtcctgggctagggggccggcccaggggctgggagtggttagccggaatactggggcctgccctcagcatcccccatagctcccagcagccccagggtgatctcgaagtatctaattcgccctcagcatgtgggaagggacaggtgggggctgggagtagaggatgttcctgcttctctaggcaaggtcccgtcgtagcaattatatttattatgggaattc

SEQ ID NO: 135 - DNA, 600 bp, Homo sapiens
ctggaagaagaggaggacttgaatgtscttacatttgaagatcttctttgctttgcatatcaagttgccaaaggaatggaatttctggaatttaagtcgtgtgttcacagagacctggccgccaggaacgtgcttgtcacccacgggaaagtggtgaagatatgtgactttggattggctcgagatatcatgagtgattccrrctatgttgtcaggggcaatscccgtctgcctgtaaaatggatggcccccgaaagcctgtttgaaggcatctacaccattaagagtgatgtctggtcatatggaatattactgtgggaaatcttctcacttggtgtgaatccttaccctggcattccggttgatgctaacttctacaaactgattcaaaatggatttaaaatggatcagccattttatgctacagaagaaatatacattataatgcaatcctgctgggcttttgactcaaggaaacggccatccttccctaatttgacttcgtttttaggatgtcagctggcagatgcagaagaagcgatgtatcagaatgtggatggccgtgtttcggaatgtcctcacacctaccaaaacaggcga

SEQ ID NO: 136 - DNA, 600 bp, Homo sapiens
  misc_feature (350)..(523): n is a, c, g, or t
  misc_feature (546)..(546): n is a, c, g, or t
cttgaccaatggctaagtgaagatgacaatcatgttgcagcaattcactgtaaagctggaaagggacgaactggtgtaatgatatgtgcatatttattacatcggggcaaatttttaaaggcacaagaggccctagatttctatggggaagtaaggaccagagacaaaaaggtaagttattttttgatgtttttcctttcctcttcctggatctgagaatttattggaaaacagattttgggtttctttttttcttcagttttattgaggtgtaattgcacaagtaaaaattatatataaatacaatgtataatatgatgtttggatgtatgtgtatatacattgtgaannnnnnnnnnnnnnnnnnnnnnnnnnnnnnnnnnnnnnnnnnnnnnnnnnnnnnnnnnnnnnnnnnnnnnnnnnnnnnnnnnnnnnnnnnnnnnnnnnnnnnnnnnnnnnnnnnnnnnnnnnnnnnnnnnnnnnnnnnnnnnnnnnnnnnnnnnnnnnnnnnnnnnnnnnnnnntcctccctccccaccctcagtcnctggaaaacaggttttaaagatagttgctaatccttatttcttctaaattttta

SEQ ID NO: 137 - DNA, 600 bp, Homo sapiens; identical to SEQ ID NO: 136
  misc_feature (350)..(523): n is a, c, g, or t
  misc_feature (546)..(546): n is a, c, g, or t

SEQ ID NO: 138 - DNA, 600 bp, Homo sapiens
caagtactttattaattccaagggcataccccgctactgctctgtgactacccaggcagatgggagggttgtgcttgtggggggtcgctcacgtaggggtaaaaagcggggtcccccaggcagcaaagactgggggacagcactgaaagggtgtgatgactacttgtttatagagttcttgaaaaggtgtcttcactgggacccctctgcccgcttgaccccagctcaagcattaagacacccttggattagcaagtctgtccccagacctctcaccaccatagacaaggtgtcagggaaacgggtagttaatcctgcaagtgctttccagggattgggttctaagctgcctccagttgttggaatagccaataagcttaaagctaacttaatgtcagaaaccaatggtagtatacccctatgcagtgtattgccaaaactgattagctagtggacagagatatgcccagagatgcatatgtgtatatttttatgatcttacaaacctgcaaatggaaaaaatgcaagcccattggtggatgtttttgttagagtagactttttttaaacaagacaaaacatttttatatgattataaaa

SEQ ID NO: 139 - DNA, 600 bp, Homo sapiens; identical to SEQ ID NO: 138

SEQ ID NO: 140 - DNA, 1400 bp, Homo sapiens
tcaacaatcatgtgaagacttgtcgagaagagcagaagaatctacacttctttgcaccagagtatggagaagtcactaatgtgacaacagcagtggacatctactcctttggcatgtgtgcactggrgatggcagtgctggagattcagggcaatggagagtcctcatatgtgccacaggaagccatcagcagtgccatccagcttctagaagacccattacagagggagttcattcaaaagtgcctgcagtctgagcctgctcgcagaccaacagccagagaacttctgttccacccagcattgtttgaagtgccctcgctcaaactccttgcggcccactgcattgtgggacaccaacacatgatcccagagaacgctctagaggagatcaccaaaaacatggatactagtgccgtactggctgaaatccctgcaggaccaggaagagaaccagttcagactttgtactctcagtcaccagctctggaattagataaattccttgaagatgtcaggaatgggatctatcctctgacagcctttgggctgcctcggccccagcagccacagcaggaggaggtgacatcacctgtcgtgcccccctctgtcaagactccgacacctgaaccagctgaggtggagactcgcaaggtggtgctgatgcagtgcaacattgagtcggtggaggagggagtcaaacaccacctgacacttctgctgaagttggaggacaaactgarccggcacctgagctgtgacctgatgccaaatgagaatatccccgagttggcggctgagctggtgcagctgggcttcattagtgaggctgaccagagccggttgacttctctgctagaagagaccttgaacaagttcaattttgccaggaacagtaccctcaactcagccgctgtcaccgtctcctcttagagctcactcgggccaggccctgatctgcgctgtggctgtccctggacgtgctgcagccctcctgtcccttccccccagtcagtattaccctgtgaagccccttccctcctttattattcaggagggctgggggggctccctggttctgagcatcatcctttcccctcccctctcttcctcccctctgcactttgtttacttgttttgcacagacgtgggcctgggccttctcagcagccgccttctagttgggggctagtcgctgatctgccggctcccgcccagcctgtgtggaaaggaggcccacgggcactaggggagccgaattctacaatcccgctggggcggccggggcgggagagaaaggtggtgctgcagtggtggccctggggggccattcgattcgcctcagttgctgctgtaataaaagtctactttttgctaaaaaaaaaaaaaaaaaaaaaaaaa

SEQ ID NO: 141 - DNA, 1400 bp, Homo sapiens; identical to SEQ ID NO: 140

SEQ ID NO: 142 - DNA, 1400 bp, Homo sapiens
gcctacctgcccaacttctacccggtgcagatcccaatgcagatggccccgcagcaggtgcctcctcagatggtccccaagcccagctcacaccacagtggcagtggctccaccagcacaggctacgtcaccacggccccctccaacacatccatggcagacagggcagccctgctctcagagggcgctgatgacacacagaacgccccagaagatggggcccagagcaccgtgcaggaagcagaggaggaggaggaaggctctgtcccagagactgagctgctgggggactgtgacactctgcaggtggacgaggcccaagtccagctggaagcttgagtggcaccagggcccggggttcggggatagaagccccgccgagaccccacagggacctcagtcacctttgagaagacaccatactcagcaatcacaagagcccgccggccagtgggcttgtttgcagactgggtgaggtggagccctgctcctctctgtcctctgacacagagagctgccctgcctaggagcacccaagccaggcagggggtctggcagcacggcgtcctggggagcaggacacatggtcatccccagggctgtatacattgattctggtggtagactggtagtgagcagcaaatgcctttcaagaaaataggtggcagcttcactccatgtcatatatggagtgaatatttcaaaacgttgggaataagggcctgcaaaaggcagcgaggaggcacctcgggtcttgaggttcctgacaaccgatctggtctgttggtttgaggatgaaggggctccatttctgctgcctccctgctgagaatattctccctttagcagccaaagattcgctggaacggaggctgccctctgctgcctgttggggtcggaagacaaggggcttctgaaatgggagttcctgagatacaacaaaatgtgtgccttcaaagaaactgacagctttgtatttggtgaaatggttttaattatactccatgtgtattttgcccactttttttgggaattcaagggaaagtgtttcttgggtttggaatgttcagaggaagcagtattgtacagaacacggtattgttatttttgttaagaatcatgtacagagcttaaatgtaatttatatgtttttaatatgccattttcattgaagtattttggtcttaagatgactttagtaatttaactgtttatgttacccacgttgggatccagttggtcttggtttgcttctctctgtaccacgtgcacatgaggtccattcattttacagcccctgttacacacagacccacaggcagccgtctgtgcccgcacacattgttggtcctatttgtaaatcccacacccggtgtatccaataaagtgaaaccaacccc

SEQ ID NO: 143 - DNA, 600 bp, Homo sapiens
ctataagaactgcaagacggactttgaggtcctcaccaaagtcctacaggaagagcccccactcctgcctggtcacatgggcttctcaggggacttccagtcatttgtcaaagactgccttactaaagatcacaggaagagaccaaagtataataagctacttgaacacagcttcatcaagcactatgagatactcgaggtggatgtcgcgtcctggtttaaggatgtcatggcgaagaccgagtccccaaggactagtggagtcctgagtcagcaccatctgcccttcttcaggtagcctcatggcagcggccagccccgcaggggccccgggccacggccaccgaccccccccccaacctggccaacccagctgcccatcaggggacctgggacctggacgactgccaaggactgaggacagaaagtagggggttcccatccagctctgactccctgcctaccagctgtggacaaaagggcatgctggttcctaatccctcccactctggggtcagccagcagtgtgagccccatcccaccccgacagacactgtgaacggaagacagcarrmmaaaaaaaaaaaaaaaaaaaaaaaa

SEQ ID NO: 144 - DNA, 600 bp, Homo sapiens; identical to SEQ ID NO: 143

SEQ ID NO: 145 - DNA, 600 bp, Homo sapiens
cgatttccctatgattcatggggaactccatttcagcagctcaaacaggtggtagaggagccatcgccacaactcccagcagacaagttctctgcagagtttgttgactttacctcacagtgcttaaagamraatwccawagwwykkyctwywtacyywkmgctaatgcaacatccatttttcaccctacatgaatccaaaggaacagatgtggcatcttttgtaaaactgattcttggagactaaaaagcagtggacttaatcggttgaccctactgtggattggtgggtttcggggtgaagcaagttcactacagcatcaatagaaagtcatctttgagataatttaaccctgcctctcagagggttttctctcccaattttctttttactccccctcttaagggggccttggaatctatagtatagaatgaactgtctagatggatgaattatgataaaggcttaggacttcaaaaggtgattaaatatttaatgatgtgtcatatgagtcctcaaaaaaaaaaaaaaaaaaaaaaaaaaaaaaaaaaaaaaaaaaaaaaaaaaaaaaaaaaaaaaaaaaaaaaaaaaaaaaaaaaa

SEQ ID NO: 146 - DNA, 600 bp, Homo sapiens; identical to SEQ ID NO: 145

SEQ ID NO: 147 - DNA, 285 bp, Homo sapiens
aattgctgggctcgaagcacaggagagaccagtccttccttgtctccactgggctgtktagtgcttctttcccaaggacktccatcccttccccaggctttatggttccagtkcttctaccattctggaagctccctagaatctcctggaatgcttaatggacctttccagcaccgaaattcaagaattatgactcatcggtcagcagaaaagaccctgctgggatctttgagcttgtggaggtggtcggcaatggaacctacggacaggtgtacaagggtaggg

SEQ ID NO: 148 - DNA, 285 bp, Homo sapiens; identical to SEQ ID NO: 147

SEQ ID NO: 149 - DNA, 1400 bp, Homo sapiens
agggaccaaactgtatatgagcccagagcagattcatggaaacagctattctcataaagtggacatcttttctttaggcctgattctatttgaattgctgtatccattcagcactcagatggagagagtcaggaccttaactgatgtaagaaatctcaaatttccaccattatttactcagaaatatccttgtgagtacgtgatggttcaagacatgctctctccatcccccatggaacgacctgaagctataaacatcattgaaaatgctgtatttgaggacttggactttccaggaaaaacagtgctcagacagaggtctcgctccttgagttcatcgggaacaaaacattcaagacagtccaacaactcccatagccctttgccaagcaattagccttaagttgtgctagcaaccctaataggtgatgcagataatagcctacttcttagaatatgcctgtccaaaattgcagacttgaaaagtttgttcttcgctcaatttttttgtggactactttttttatatcaaatttaagctggatttgggggcataacctaatttgagccaactcctgagttttgctatacttaaggaaagggctatctttgttctttgttagtctcttgaaactggctgctggccaagctttatagccctcaccatttgcctaaggaggtagcagcaatccctaatatatatatatagtgagaactaaaatggatatatttttataatgcagaagaaggaaagtccccctgtgtggtaactgtattgttctagaaatatgctttctagagatatgatgattttgaaactgatttctagaaaaagctgactccatttttgtccctggcgggtaaattaggaatctgcactattttggaggacaagtagcacaaactgtataacggtttatgtccgtagttttatagtcctatttgtagcattcaatagctttattccttagatggttctagggtgggtttacagctttttgtacttttacctccaataaagggaaaatgaagctttttatgtaaattggttgaaaggtctagttttgggaggaaaaaagccgtagtaagaaatggatcatatatattacaactaacttcttcaactatggactttttaagcctaatgaaatcttaagtgtcttatatgtaatcctgtaggttggtacttcccccaaactgattataggtaacagtttaatcatctcacttgctaacatgtttttatttttcactgtaaatatgtttatgttttatttataaaaattctgaaatcaatccatktgggttggtggtgtacagaacacacttaagtgtgttaacttgtgacttctttcaagtctaaatgatttaataaaactttttttaaattaaaaaaaaaa

SEQ ID NO: 150 - DNA, 1400 bp, Homo sapiens
gaagtggagccacatgttcctcctgatcgaggaccaaggtgcccagggctatgagctgttcttcaagacaagagaattgaagaagaagtggatggagcagtttgagatggccatctccaacatctatccggagaatgccaccgccaacgggcatgacttccagatgttctcctttgaggagaccacatcctgcaaggcctgtcagatgctgcttagaggtaccttctatcagggctaccgctgccatcggtgccgggcatctgcacacaaggagtgtctggggagggtccctccatgtggccgacatgggcaagatttcccaggaactatgaagaaggwmaractwcatcscrkggctcaggacwaaaagaggaatsagctgggtctgcccaagatggaggtgtttcaggaatactacgggcttcctccaccccctggagccattggaccctttctacggctcaaccctggagacattgtggagctcacgaaggctgaggctgaacagaactggtgggagggcagaaatacatctactaatgaaattggctggtttccttgtaacagggtgaagccctatgtccatggccsksswcmggacctgtctgttcmtytcwggtacgcaggccccatggagcgggcaggggcagagagcatcctggccaaccgctcggacgggactttcttggtgcggcagagggtgaaggatgcagcagaatttgccatcagcattaaatataacgtcgaggtcaagcacacggttaaaatcatgacagcagaaggactgtaccggatcacagagaaaaaggctttccgggggcttacggagctggtggagttttaccagcagaactctctaaaggattgcttcaagtctctggacaccaccttgcagttccccttcaaggagcctgaaaagagaaccatcagcaggccagcagtgggaagcacaaagtattttggcacagccaaagcccgctatgacttctgcgcccgwgaccgwtcagagctgtcgctcaaggagggtgacatcatcaagatccttaacaagaagggacagcaaggctggtggcgaggggagatctatggccgggttggctggttccctgccaactacgtggaggaagattattctgaatactgctgagccctggtgccttggcagagagacgagaaactccaggctctgagcccggcgtggssaggcagcggaccaggggctgtgacagctccggcgggtggagactttgggatggactggaggagsscagcgtccagctggcggtgctcccgggatgtgccctgacatggttaatttataacaccccgattttcctcttgggtcccctcaagcagacgggggctcaagggggttacatttaataaaaggatgaagatgg

SEQ ID NO: 151 - DNA, 600 bp, Homo sapiens
ttgtgtgaaggctagcctaacagaacaggaggtatcaaactagctgctatgtgcaaacagcgtccattttttcatattagaggtggaacctcaagaatgactttattcttgtatctcatctcaaaatattaataatttttttcccaaaagatggtatataccaagttaaagacagggtattataaatttagagtgattggtggtatattacggaaatacggaacctttagggatagttccgtgtaagggctttgatgccagcatccttggatcagtactgaactcagttccatccgtaaaatatgtaaaggtaagtggcagctgctctatttaatgaaagcagttttaccggattttgttagactaaaatttgattgtgatacattgaacaaaatggaactcatttttttttaaggagtaaagattttywattmtgwgaywrtgkrtmtgwstgttgaaactgtaaagcttttatgactctaatattaatctcttaaatgaaattaaaaggcaaaagaacatgattgagcttaaatgatcatttcttcctgcagtgattcttggattgttttctcatgtatttgaaaaaaaaaaaaaaaa

SEQ ID NO: 152 - DNA, 600 bp, Homo sapiens
ccaatatatatcattactgagtatatgcaaaagggcagtttgctggatttcctgaaaagtgaagaaggtagcgaccaacctctgattcaactcattgacttctctgcccagattgcagaaggaatgtggtttattgagcaaaggaattatattcaccgtgatctgagggcagcaaactgcctggtatcagaaactttgttgtgcaaaatagcagactttgggctggcccgagtgatagaggacagcgagtatactgccagggaaggtaccaaatttcccatcaagtggacatccctggaggctgccaattatggctcttttactatcaagtcagatgtatggtcatttggtgtattgctaactgaaataataacatatgggaggactccatatccaggtatgtccaactcggaggtaattacagcccttgagcgtggttatcgcatgccgtgtcccagcacttgtccaaaagagctctacagcatcatgctccagtgttggcagcaggaccctgagcaacggccaacgtttgaatatttacagagcatcctagaggacttctttactgccactgaaacacagtaccaggcacaaccttaa

SEQ ID NO: 153 - DNA, 600 bp, Homo sapiens
gacccaagagctttagcaccttaagctcagtatggcgggaagggctggaaacagtatgcaagactgccatgggtcctgcctaccctcagatgtgtcctaacactgcagacagcactgaagtcaagagggactggggcacaggaggtcctcaagggtatgaatagtgttacttcattcagagtgttactttgtttctctcccaatgtttggagaccaccagcctgtctctgggctgcaagcctgaggtaaagcccagcatcccccagccaacagaaggtagaggtttgggctaccccactatagcttccaggtattcggtgtcagtcctgtcttaccaaagatgaatgaagcaaatgttacactgccttattctgggaaggaggagctactcggataagcagggcctgagagatggagctgcctccagaaactggggagacccagtcttgtcaatgcaattgtctctgttttacaagttggagtcactcttatgctgttcccagttttaaaactggagactttgccctctgagctctggagacccatgtgggcttaggcttggactggatggaagagctgatggcctctgcccctggcctg

SEQ ID NO: 154 - DNA, 600 bp, Homo sapiens
gaaacccttgttcttaggatcacagaatactaaagcacctcaaaaaaacaggtatcatgtgaaacagtggttgccaaaagtggagcgaggatgatttcactaggcatttggcaattcttagagacatttccggttgtcacaattrgagggatactagtarcatgaattgggtagaggccagggatgttgctaaatagattataatacacaaggaaagcagcctcaaagaattacccctcccaaaatgtcagaagtgctgaggctgagaaaccctgatgtaaagatcagtcccagttataaactgaaaacagctatttacaaagcagtaaatgcaagaaagaaaaggaagtcgcaaagagaaagtgatgtaatgcaaattgaggattttacaagatcagatactgctgctttaagtcaagggtgaataatctcaacaaacagcaaatagcaatcactttaccagctgcatattgcacccacataggtaactcttcattttaggaacaaactgaatttgaacactgagccttttgaactcagccatctctatatattctttccttaaaattcatgattttgggcaaaaaaaaaaaaaaaaaa

SEQ ID NO: 155 - DNA, 600 bp, Homo sapiens; identical to SEQ ID NO: 154

SEQ ID NO: 156 - DNA, 600 bp, Homo sapiens
aatgcaggttctagggcttctcccagccttcagaagccaactaactctgcagatggggctaggactgtgggcttttagcagcccacaggtgatcctaacatatcaggccatggactcaggacctgcccggtgatgctgttgatttctcaaaggtcttccaaaactcaacagagccagaagtagccgcccgctcagcggctcaggtgccagctctgttctgattcaccaggggtccgtcagtagtcattgccacccgcggggcacctccctggccacacgcctgttcccagcaagtgctgaaactcactagaccgtctgcctgtttcgaaatggggaaagccgtgcgtgcgcgttatttatttaagtgcgcctgtgtgcgcgggtgtgggagcacactttgcaaagccacagcgtttctggttttgggtgtacagtcttgtgtgcctggcgagaagaatattttctatttttttaagtcatttcatgtttctgtctggggaaggcaagttagttaagtatcactgatgtgggttgagaccagcactctgtgaaaccttgaaatgagaagtaaaggcagatgaaaagaaaaaaaaaaaaaaa

SEQ ID NO: 157 - DNA, 600 bp, Homo sapiens
catctccgactatccctggccccctgcccaccccatcccggaagcaggagatcattaagaccacggagcagctcatcgaggccgtcaacaacggtgactttgaggcctacgcgaaaatctgtgacccagggctgacctcgtttgagcctgaagcactgggcaacctggttgaagggatggacttccacagattctacttcgagaacctgctggccaagaacagcaagccaatccacacgaccatcctgaacccacacgtgcacgtcattggagaggatgccgcctgcatcgcttacatccggctcacgcagtacattgacgggcagggccggccccgcaccagccagtctgaggagacccgcgtgtggcaccgccgcgacggcaagtggcagaatgtgcacttccactgctcgggcgcgcctgtggccccgctgcagtgaagagctgcgccctggtttcgccggacagagttggtgtttggagcccgactgccctcgggcacacggcctgcctgtcgcatgtttgtgtctgcctcgttccctcccctggtgcctgtgtctgcagaaaaacaagaccagatgtgatttgttaaaaaaaaaa

SEQ ID NO: 158 - DNA, 1400 bp, Homo sapiens
ccctcgaatcacttttcccggcctgcatgaactggtccgccattacaccaatgcttcagatgggctgtgcacacggttgagccgcccctgccagacccagaagccccagaagccgtggtgggaggacgagtgggaggttcccagggagacgctgaagctggtggagcggctgggggctgsacagttcggggaggtgtggatggggtactacaacgggcacacgaaggtggcggtgaagagcctgaagcagggcagcatgtccccggacgccttcctggccgaggccaacctcatgaagcagctgcaacaccagcggctggttcggctctacgctgtggtcacccaggagcccatctacatcatcactgaatacatggagaatgggagtctagtggattttctcaagaccccttcaggcatcaagttgaccatcaacaaactcctggacatggcagcccaaattgcagaaggcatggcattcattgaagagcggaattatattcatcgtgaccttcgggctgccaacattctggtgtctgacaccctgagctgcaagattgcagactttggcctagcacgcctcattgaggacaacgagtacacagccagggagggggccaagtttcccattaagtggacagcgccagaagccattaactacgggacattcaccatcaagtcagatgtgtggtcttttgggatcctgctgacggaaattgtcacccacggccgcatcccttacccagggatgaccaacccggaggtgattcagaacctggagcgaggctaccgcatggtgcgccctgacaactgtccagaggagctgtaccaactcatgaggctgtgctggaaggagcgcccagaggaccggcccacctttgactacctgcgcagtgtgctggaggacttcttcacggccacagagggccagtaccagcctcagccttgagaggaggccttgagaggccctggggttctccccctttctctccagcctgacttggggagatggagttcttgtgccatagtcacatggcctatgcacatatggactctgcacatgaatcccacccacatgtgacacatatgcaccttgtgtctgtacacgtgtcctgtagttgcgtggactctgcacatgtcttgtrcatgtgtagcctgtgcatgtatgtcttggacactgtacaaggtacccctttctggctctcccatttcctgagaccaccagagagaggggagaagcctgggattgacagaagcttctgcccacctacttttctttcctcagatcatccagaagttcctsaagggccaggactttatctaatacctctgtgtgctcctccttggtgcctggcctggcacacatcaggagttcaataaatgtctgttgatgactgccg

SEQ ID NO: 159 - DNA, 1400 bp, Homo sapiens; identical to SEQ ID NO: 158

SEQ ID NO: 160 - DNA, 1400 bp, Homo sapiens
tgggcccagccagtcccttggacagcaccttctaccgctcactgctggaggacgatgacatgggggacctggtggatgctgaggagtatctggtaccccagcagggcttcttctgtccagaccctgccccgggcgctgggggcatggtccaccacaggcaccgcagctcatctaccaggagtggcggtggggacctgacactagggctggagccctctgaagaggaggcccccaggtctccactggcaccctccgaaggggctggctccgatgtatttgatggtgacctgggaatgggggcagccaaggggctgcaaagcctccccacacatgaccccagccctctacagcggtacagtgaggaccccacagtacccctgccctctgagactgatggctacgttgcccccctgacctgcagcccccagcctgaatatgtgaaccagccagatgttcggccccagcccccttcgccccgagagggccctctgcctgctgcccgacctgctggtgccactctggaaaggsccaagactctctccccagggaagaatggggtcgtcaaagacgtttttgcctttgggggtgccgtggagaaccccgagtacttgacaccccagggaggagctgcccctcagccccaccctcctcctgccttcagcccagccttcgacaacctctattactgggaccaggacccaccagagcggggggctccacccagcaccttcaaagggacacctacggcagagaacccagagtacctgggtctggacgtgccagtgtgaaccagaaggccaagtccgcagaagccctgatgtgtcctcagggagcagggaaggcctgacttctgctggcatcaagaggtgggagggccctccgaccacttccaggggaacctgccatgccaggaacctgtcctaaggaaccttccttcctgcttgagttcccagatggctggaaggggtccagcctcgttggaagaggaacagcactggggagtctttgtggattctgaggccctgcccaatgagactctagggtccagtggatgccacagcccagcttggccctttccttccagatcctgggtactgaaagccttagggaagctggcctgagaggggaagcggccctaagggagtgtctaagaacaaaagcgacccattcagagactgtccctgaaacctagtactgccccccatgaggaaggaacagcaatggtgtcagtatccaggctttgtacagagtgcttttctgtttagtttttactttttttgttttgtttttttaaagaygaaataaagacccaggggagaatgggtgttgtatggggaggcaagtgtggggggtccttctccacacccactttgtccatttgcaaatatattttggaaaac

SEQ ID NO: 161 - DNA, 600 bp, Homo sapiens
tcaaaaagtttctgaaacggaatcccagccagcggattgggggtggcccaggggatgctgctgatgtgcagagacatccctttttccggcacatgaattgggacgaccttctggcctggcgtgtggacccccctttcaggccctgtctgcagtcagaggaggacgtgagccagtttgatacccgcttcacacggcagacgccggtggacagtcctgatgacacagccctcagcgagagtgccaaccaggccttcctgggcttcacatacgtggcgccgtctgtcctggacagcatcaaggagggcttctccttccagcccaagctgcgctcacccaggcgcctcaacagtagcccccgggtccccgtcagccccctcaagttctccccttttgaggggtttcggcccagccccagcctgccggagcccacggagctacctctacctccactcctgccaccgccgccgccctcgaccaccgcccctctccccatccgtcccccctcagggaccaagaagtccaagaggggccgtgggcgtccagggcgtaggaagccgggtgggggtgagggtagcccttgagccctgtccctgcggctgt

SEQ ID NO: 162 - DNA, 600 bp, Homo sapiens
tccagagatgtctacagcacggattattacaggctctttaatccatctggaaatgatttttgtatatggtgtgaggtgggaggacacaccatgctccccattcgctggatgcctcctgaaagcatcatgtaccggaagttcactacagagagtgatgtatggagcttcggggtgatcctctgggagatcttcacctatggaaagcagccatggttccaactctcaaacacggaggtcattgagtgcattacccaaggtcgtgttttggagcggccccgagtctgccccaaagaggtgtacgatgtcatgctggggtgctggcagagggaaccacagcagcggttgaacatcaaggagatctacaaaatcctccatgctttggggaaggccaccccaatctacctggacattcttggctagtggtggctggtggtcatgaattcatactctgttgcctcctctctccctgcctcacatctcccttccacctcacaactccttccatccttgactgaagcgaacatcttcatataaactcaagtgcctgctacacatacaacactgaaaaaaggaaaaaaaaagaaaaaaaaaaaaaaccgc

SEQ ID NO: 163 - DNA, 600 bp, Homo sapiens; identical to SEQ ID NO: 162

SEQ ID NO: 164 - DNA, 455 bp, Homo sapiens
atcatttttaaaaactaacattttgaacgttgagacattctggctttttcttttaatgaatactttttagtttgtattggactttatttcctttattcaaatcatttttaaaaactwacattttgaacaaacaytcttaactcctaattgttcttwgacacgtagtaattctgtgacatactttttttttcttatagcaatacactgtaatatcagaaatggttggcctgagcaacctagtaagacytcgtctctactaataattaaaaaactagctggcatggtagcacacacctgtagtcccagatacttgggaggccaaggcaggaggattgcttgagacctagcaatcagtcagggctgcagtgagccatgatggcaccactgcactctagcctgggcaagagaacaagatcctgtctcaaaaaacarrraaaaaaaaaaarrrcggccgc

SEQ ID NO: 165 - DNA, 455 bp, Homo sapiens; identical to SEQ ID NO: 164

SEQ ID NO: 166 - DNA, 600 bp, Homo sapiens
  misc_feature (588)..(588): n is a, c, g, or t
  misc_feature (595)..(598): n is a, c, g, or t
tcagctccattactcaactccarktgacmtttggagtataggcaccatatttgytgaactagcaactaagaaaccacttttccatggggattcagaaattgatcaactcttcaggattttcagagctttgggcactcccaataatgaagtgtggccagaagtggaatctttacaggactataagaatacatttcccaaatggaaaccaggaagcctagcatcccatgtcaaaaacttggatgaaaatggcttggatttgctctcgaaaatgttaatctatgatccagccaaacgaatttctggcaaaatggcactgaatcatccatattttaatgatttggacaatcagattaagaagatgtagctttctgacaaaaagtttccatatgttatgtcaacagatagttgtgtttttattgttaactcttgtctatttttgtcttatatatatttctttgttatcaaacttcagctgtacctgcccgggcggccgctcgaaagggcgaattctgcagatatccatcacactggcggccgctcgagcatgcatctagagggcccttacawwcgccctatagtgagtcgtanccttcannnncg

SEQ ID NO: 167 - DNA, 600 bp, Homo sapiens; identical to SEQ ID NO: 166
  misc_feature (588)..(588): n is a, c, g, or t
  misc_feature (595)..(598): n is a, c, g, or t

SEQ ID NO: 168 - DNA, 1400 bp, Homo sapiens
gaattatcctgccaacgtgaaaacctcatgttcaaagaacacttccctttagccgatgtaactgctggttttgtttttcatatgtgtttttcttacactcatttgaatgctttcaagcatttgtaaacttaaaaaawgwawaaagggcaaaaagtctgaacccttgttttctgaaatctaatcagttatgtatggtttctgaagggtaattttattttggaataggtaaaggaaacctgttttgtwtgtttttcctgagggctagatgcattttttttctcacactcttaatgacttttaacatttatactgagcatccatagatatattcctagaagtatgagaagaattattcttattgaccattaatgtcatgttcattttaatgtaatataattgagatgaaatgttctctggttggaacagatactctcttttttttcttgcaatctttaagaatacatagatctaaaattcattagcttgacccctcaaagtaacttttaagtaaagattaaagcttttcttctcagtgaatatatctgctagaaggaaatagctgggaagaatttaatgatcagggaaattcattatttctatatgtggaaactttttgcttcgaatattgtatctttttaaatctaaatgttcatatttttcctgaagaaaccactgtgtaaaaatcaaattttaattttgaatggaataatttcaaagaactatgaagatgatttgaagctctaatttatatagtcacctataaaatgttctttatatgtgttcataagtaaattttatattgattaagttaaacttttgaattgatttgaggagcagtaaaatgaaagctatatctattctaaaccytatttagacattggkaccagttacccaggtgaaaatakggagtaactttgttttgtatggtaaggtttaggaatggtggatgaagggtatctctatataaataaagtgctcaacaatgtgcaatgattgtaaatttagtaagatattacagccatttcatgaatgctttaccattcaacatagtatctattacaaaacacctttcttgtatccatatacttcaggtgttgctgttaacatttactatgatatttattttaaccaaaatgttactcacattaaatgtttattctttaaaatgaatgtattatgtttttaacccacaaatgcatacttaccctgtgcctcatatttcaatagtactgtaatatggacatcttttgtgaaatacttttattttgttatgctttaaatatacatacaaaaagatttctgttattagctttgaaaattgtataatatcctaatataaacaaaaatataaaaataaaaatgaatacagtaaaawrwmaaaaaaaaaaaaaaaaaaaagg

SEQ ID NO: 169 - DNA, 600 bp, Homo sapiens
gaccaacacctcagaccttctgaagcagcccattgctggcccgccatgttgtaattttgctcatttttattaaacttctggtttacctgatgcttggcttcttttagggctacccccatctcatttcctttagcccgtgtgcctgtaactctgagggggggcacccagtggggtgctgagtgggcagaatctcagaaggtcctcctgaaccgtccgcgcaggcctgcagtgggcctgcctcctccttgcttccctaacaggaaggtgtccagttcaagagaacccacccagagactgggagtggtggctcacgcctataatccctgcgctttggcagtccgaggcaggggaattgcttgaactcaggagttggagaccagcctgggcaacatggcaaaacgcagtctgtacaaaaaatacaaaaaattagccaggtgtaggggtaggcacctggcatcccagctactccaggggctgaggtgacagcattgcttaagcccagaaggtcgaggctgcagtgagctgagatcacgccactgcactccagtctgggtgacagagagagaccatatccaaaaaaaaaaaaaaaagggcggccgc

SEQ ID NO: 170 - DNA, 600 bp, Homo sapiens
tgatcagaaagttttcactaccaattttggaaagagaggaattttttacttctttaataaccagcatgtggaatgtaatgaaatctgccatcgtctttctttgactagaccttcaatggagaaaccatgcacatagaatacggcacagtctggtcctttggggcttgggcagggccgtgacacaggttctggccaatgatttgcaagaggaattgatcagtatcactttaagycctgcatttaattggcagcacaagatcctgcagagcctctttccctctgccacagttatcaagaatgggtcaggagaccgctgcttctgggcataagtcctgcaaggaaagcaacatggaaaacagccccaactcacccatgagggatgaaaagcactsttgagaaaggcatgtgttgtttaagccattgagattttagagctttttgtcactatctgtcaagactgatactactggggcttttcctattgatttgggagttctttacatattaaaaaaatgtgagcctttgtgatacgaattcaatttgttttcctgtcttttgacatttgactttgcataaaagtttatctgtgcataattttaa

SEQ ID NO: 171 - DNA, 778 bp, Homo sapiens
cctctaatgtaaagcaccatgactctagtgctcttggtgtatattcttacatacctttagtggaaaatccttatttttcatcatggcctccaagtggtaccagttctaagatgtctcttgatttacctgagaagcaagatggaactgtttttccttcttctctgttgccaacatcctctacatccctcttctcttattacaattcacatrrttctttatcactgaattctccaaccaatatttcctcactattgaaccaggagtcagctgtactagcaactgctccaaggatagatgatgaaatcccccctccacttcctgtayggacacctgaatcatttattgtggttgaggaagctggagaattctcaccaaatgttcccaaatccttatcctcagctgtgaaggtaaaaattggaacatcactggaatggggtggaacatctgaaccaaagaaatttgatgactctgtgatacttagaccaagcaagagtgtaaaactccgaagtcctaaatcaggtaaaaatttctcttggctttagatgacatttagccctaagattggaagaatggttcgttaagtttagagtaattcacttcaggaagttacttggttcccataatagcttccagtattcattgatttatttctggctttcccagactagaaattttgtaaagagtcatrggkgaagmyagggctaaccagaaaataaaataaaaataatgggataaaaaatcggaactactgttttccccctagtcggagcacatccgg

SEQ ID NO: 172 - DNA, 778 bp, Homo sapiens; identical to SEQ ID NO: 171

SEQ ID NO: 173 - DNA, 600 bp, Homo sapiens
ctgaaccccgcgctgggcttccagcattgtcctgggagtctggatttcagccgctgccctcagcatcccctatttgattttcagagagacacatcatgaccgtaaaggaaaggtgacttgccaaaataactatgctgtgtctactaactgggaaagcaaggagatgcaagcatcaaggcagtggattcatgtggcctgtttcatcagccgcttcttgctgggctttcttctgcctttcttcatcatcatcttttgttatgaaagagtagccagcaaggtgaaagagaggagcctgtttaaatccagcaagcccttcaaagttatgatgactgccattatctctttctttgtgtgttggatgccctaccatatacaccagggcttacttctcactacgaaccagtcactacttttagagttgactttgatacttacagtgctaaccacttctttcaatactatcttttctcccacactctacttatttgttggggagaatttcaaaaaggtcttcaagaagtccattcttgctctgtttgagtcaacatttagtgaagattcttctgtagaaaggacacaaacctaaactcagaagcctaa

SEQ ID NO: 174 - DNA, 600 bp, Homo sapiens; identical to SEQ ID NO: 173

SEQ ID NO: 175 - DNA, 600 bp, Homo sapiens
aacttggttgtggaagacagaatcatctccttcacaggatgcatcatgcaattcttctttgcctgtatatttgtggtgacagaaacattcatgctggcagcgatggcttatgacagatttgtggcagtgtgtaaccctctgctttacacagttgcaaygtcccagaggctttgctccttgttagtggctgcatcatactcttggagtttagtttgttccttaacatacacatactttctgttgactttatctttttgtaggactaacttcattaataactttgtctgtgagcacgctgccattgttgctgtgtcctgctctgacccctacatgagccagaaggtcattttagtttctgcaacattcaatgaaataagcagcctggtratcattctcacttcctatgctttcatttttatcactgtcatgaagatgccttccactggggggcgcaagaaagcgttctccacgtgtgcctcccacctgaccgccattaccattttccatgggactatcctttttctctactgtgttcctaactccaaaagttcatggctcatggtcaaggtggcctctgtcttttacacagtggtcattccc

SEQ ID NO: 176 - DNA, 600 bp, Homo sapiens; identical to SEQ ID NO: 175

SEQ ID NO: 177 - DNA, 600 bp, Homo sapiens
tggtgggcatttccagcctgactttgatcatcaggagcctgtactgcctgaaggactgttcacccatccggatctaccacattgtccgctttgtggccatcggcttcctcgtttggggcctgcccttagttgtccttgtgtacctgccaggaaaagaataccggacctttgcctttgaccttctgttgctgctgtccatggtagtcagtatggctcaaccagccatctacttcttggctggctacctttgaaggaagaggcatagggagtccttaaagttgttctcccaagagctttgttggatgagatggaaggtggaggaaacaaggggtttctggcaagggaacagcaggttaccaggactgagctcctcccactccaggaagctgttccccaggactgaccatgatgccctgtattggtccattctcacactgctataaagaaatatctgagactgggtaatttataaagaaaagaggattaattggctgacagtttgacaggctgtacaggaagcatggctggggaggcctcaggaaacttacaatcatggcagaaggtgaaggggaagcaggtacgtcttcacatggcaggaac

SEQ ID NO: 178 - DNA, 600 bp, Homo sapiens
ggtatggtgtacctggcctcccagcactttgtgcaccgagacctggccaccaggaactgcctggttggagcgaatctgctagtgaagattggggacttcggcatgtccagagatgtctacagcacggattattacagggtgggaggacacaccatgctccccattcgctggatgcctcctgaaagcatcatgtaccggaagttcactacagagagtgatgtatggagcttcggggtgatcctctgggagatcttcacctatggaaagcagccatggttccaactctcaaacacggaggtcattgagtgcattacccaaggtcgtgttttggagcggccccgagtctgccccaaagaggtgtacgatgtcatgctggggtgctggcagagggaaccacagcagcggttgaacatcaaggagatctacaaaatcctccatgctttggggaaggccaccccaatctacctggacattcttggctagtggtggctggtggtcatgaattcatactctgttgcctcctctctccctgcctcacatctcccttccacctcacaactccttccagccttgactgaagcgaacatcttcatataaact

SEQ ID NO: 179 - DNA, 1400 bp, Homo sapiens
actctgaaaatacattatgttttttttctttaaacaaaacacacaacatgtaagcatgtaagagtaaagaattgtatgatatgttccttttttcagttcaccaagttggaagccttttgcagctctgtggcttggaatttcatttgagcaatttctataggatatgtatttattattgattgttatttaawwwwwttccamttttacctgtattaccaaactgggttctccaataatgtccaaattgtaatgttgccttgcttcaagataaagtgtatttgggaataatattataaacccttmcaaattttatgcatgtatctactgcatccttcaactctcactagaaaatcttttgaaaccaaatggattaatttatggctatttataatttgctttgacatctcactgttggaaattttttaaagatgagatttgcctttataatgtaaattgtgatttttgttttacatgtgggtttctatagttttaattttttcagcttttaagatacgagttttgtgtaatttggtatttttaatcatttatgttattttaaaagctcagaatatcacattgaaattactataaatacatttaaaattatctattttagatctaaggaaatactacagagatattttcatgggttcagtaacttttcattttataacattgggcacggtacagagtgattgtcacataaggtacttgaagatttattagtttaattctatttttacagtaaccttgaattcttctgagttttgcatgtattaaattcaattaatgctgaacatgaagagtaaagtatttatctgaaagaagtttctgggttaggagaagtaatgaatgtatccatttgtacatggtttacatgttgtggatgctttgtaaacatttycctgtatgtttaaattgtgtttcagcaggatgtarttgcccttgtgtrkagttaaaatgagtcatcatctggtcctttgtgaaatggaattcatggtattttctgtaacgttttcctgaagctgtttctggagagccacacatttaaatacagacagctttcctgatcatttgatttattgtgcacctgatttttggtctaaaaggaattattgccacaatatattttatttattctttagattttagccttgtaagttaaagtgctttacatgatgatgtgaaaagctgtttgtccctttactgggtttggggggttgttaaaagatagggaatgaagaatgcaaaatggtttatcgttcaaactgtccactctgatccaaccctgtactgatagtacttcccagtatgatattgtgatgtttcatacaatgcagtgaacataaccaacttgttacctaaataaagaattgataaaaaaaaaaaaaaaaaaaaaa

SEQ ID NO: 180 - DNA, 1400 bp, Homo sapiens
gctggtttctgaggctgagatggagaagcaaaaagtggcacgctacttccccaccgagaggggccagcccatggtgcacggtgccctgagcctggcattgagcagcgtccgcagcaccgaaacccatgtggagcgcgtgctgagcctgcagttccgagaccagagcctcaagcgctctcttgtgcacctgcacttccccacttggcctgagttaggcctgcccgacagccccagcaacytkctgcgcttcatccaggaggtgcacgcacattacctgcatcagcggccgctgcacacgcccatcattgtgcactgcagctctggtgtgggccgcacgggagcctttgcactgctctatgcagctgtgcaggaggtggaggctgggaacggaatccctgagctgcctcagctggtgcggcgcatgcggcagcagagaaagcacatgctgcaggagaagctgcacctcaggttctgctatgaggcagtggtgagacacgtggagcaggtcctgcagcgccatggtgtgcctcctccatgcaaacccttggccagtgcaagcatcagccagaagrtgassamsgttcckyrgragctscyrggasmksswcmkcsktgggrmtsystctcctcactcactctgtcttctcagaaccaccttcctcaggactcccaggacctggtcctcggtggggatgtgcccatcagctccatccaggccaccattgccaagctcagcattcggcctcctggggggttggagtccccggttgccagcttgccaggccctgcagagcccccaggcctcccgccagccagcctcccagagtctaccccaatcccatcttcctccccaccccccctttcctccccactacctgaggctccccagcctaaggaggagccgccagtgcctgaagcccccagctcggggcccccctcctcctccctggaattgctggcctccttgaccccagaggccttctccctggacagctccctgcggggcaaacagcggatgagcaagcataactttctgcaggcccataacgggcaagggctgcgggccacccggccctctgacgaccccctcagccttctggatccactctggacactcaacaagacctgaacaggttttgcctacctggtccttacactacatcatcatcatctcatgcccacctgcccacacccagcagagcttctcagtgggcacagtctcttactcccatttctgctgcctttggccctgcctggcccagcctgcacccctgtggggtggaaatgtactgcaggctctgggtcaggttctgctcctttatgggacccgacatttttcagctctttgctattgaaataataaaccaccctgttctgtgaaaaaaaaaaaaaaaaaaaaa

SEQ ID NO: 181 - DNA, 1400 bp, Homo sapiens
  misc_feature (857)..(857): n is a, c, g, or t
cttatcaaataagggaagtaatcagcccatctgttttgttaactattcagcacttcagaagatggactctttggacgccatggaaggtgatgttgagcttgaatgggaagaaaccactatgtaaatattcagaccaaaggatacaattggaagagatttttaaatcccaggggccaaagttaccccctcattcttccgaattgaaatgtgcaaccttaaagaaatatctatgcttctctcactgtgcctttccaaacggattgaacattttaagactagttcttgaaaatagctaatacagaataattatttgttttgtacagaataaatattatgcattttaaatgcttaagaaaagacatcccatatgtttttgaagtcctccatattttggaataagccaaatagaaaattattattatattagcattaatgtttcaatgtgaattttccctatgtattggatttaattttgaggacaaaagttgtaaatgttgattcagtagtgttgttttggcttacagggtattgatgtttcttgtggataatttccaggactgtcataatgatctgtacttccatgtacacccctgtgttttgaatcctctgttttatgagtgctgagatatcatctcatgatcccgaacagctgaacagtaaccccctgacactgcagggattacttggcctttatacaacacacagtagctcttcagggacacttagggctatttaatttcgattgtgtcttcagtttgagaaccttaaaagaaaattaaaagtgcaattgcacacatgaaattacagagtaccattctagcaaacctacatttgtaaactttaaaacacaagttttnccccctgtattgtatattcaaatatatagtaaatgtatcagagtatttgcccattagatatgatcaacctaatattaacaattctgaagagtttcttcagcaaaaatgtatcaagagtaataaaaacactgtgcgtgtttcaagcttgtaaaccaatgatctgctgctgtggtgccaacagagacttccaaatggattatgttaaatggccgtcatttcatttcccaaggttgattttgagcagtatacttggtggaactgaaaacaaagaaattaaccatctatagcaaattcaaggtttctttatagaaaatctttcagcctccatcttattaaatagtgacaatgtggtaagttttgaattatatgaactcattttgtcatagatttcaattaagagtaataaatagtattaattatgctcttctatgataagaagtatatcttatgcttatttccgctggaacatatatatatatgaaatgctatggccaataaaattgaattttaatgaaaaaaaaaaaaaaaaaaaaaaaaaaaaaa

SEQ ID NO: 182 - DNA, 487 bp, Homo sapiens
tgttgccatatgtcaccctctccactacactgtcatcatgagggaagagctctgtgtcttcttagtggctgtawctyggattctgtcttgtgccagctccctctctcacacccttctcctgacccggctgtctttctgtgctgcgaacaccrtcccccatgtcttctgtgaccttgctgccctgctcaagctgtcctgctcagatatcttcctcaatgagctggtcatgttcacagtaggggtggtggtcattaccctgccattcatgtgtatcctggtatcatatggctacattggggccaccatcctgagggtcccttcaaccaaagggatccacaaagcattgtccacatgtggctcccatctctctgtggtgtctctctattatgggtcaatatttggccagtaccttttcccgactgtaagcagttctattgacaaggatgtcattgtggctctcatgtacacggtggwcacacccatgttg

SEQ ID NO: 183 - DNA, 600 bp, Homo sapiens
ttcctaacctttgtaaaaaagcaaagattcttcaaaatgacattgaaataaaaagtaagccatacgtattttcttagaagtatagatgtatgtgcgtgtatacacacacacacacacacacagagataaacacaatattccttatttcaaattagtatgattcctatttaaagtgatttatatttgagtaaaaagttcaattcttttttgctttttaaaaaatctgatgcttcataattttcattatattattccacatatttttccttgaagttcttagcataatgtatccattacttagtatatatctaggcaacaacacttagaagtttatcagtgtttaaactaaaaaaataaagattcctgtgtactggttyamawwwrwrwrarwrrmawamwmaagtctgctgtgcctgtcgtcgtgactgtcagtattctcgctattttatagtcgtgccatgttgttactcacagcgctctgacatactttcatgtggtaggttctttctcaggaactcagtttaactattatttattgatatatcattacctttgaaaagcttctactggcacaatttattattaaaattttgaatccag

SEQ ID NO: 184 - DNA, 600 bp, Homo sapiens
gcccaggccccagaccctgaggaaatccaattcctttttcccctctgagacaaggaaggacaaggttcaaggctgtcatcactcgagcagaaaagatgagatcaccaaagagactacagagaaaacaaaagatagccccacgaagcatgttcagcattcaggtgatcagcaggactgtctccagcacggagctgacactgttcagctgcctcaactggtagacgctcccaagaagtcagaggcagctgtcggggcggaggtgtccatgacctccccaggacagagcaaaaacttctccctcaagaacacaaacgttttaccccctattgtatgacctttgctgaggstatgtcctgctcctttccaccagtgatttgtattaagacagcacttatattgtacaatacttcagactgttttttttaaatacataaaactttatgttaaaaaamwmwawwaamawggccaattggcatgactcctcttatgagggatgggggaggatgtccttgcacttaaactcattccatatgcatctgtgtgtgtagagggggcgggtagttttgaactctcagtgttacagcatcattaatggaactc

SEQ ID NO: 185 - DNA, 600 bp, Homo sapiens; identical to SEQ ID NO: 184

SEQ ID NO: 186 - DNA, 1400 bp, Homo sapiens
ccatgagcagaaagtgtcagtcattgtcatgctggtttctgaggctgagatggagaagcaaaaagtggcacgctacttccccaccgagaggggccagcccatggtgcacggtgccctgagcctggcattgagcagcgtccgcagcaccgaaacccatgtggagcgcgtgctgagcctgcagttccgagaccagagcctcaagcgctctcttgtgcacctgcacttccccacttggcctgagttaggcctgcccgacagccccagcaacytkctgcgcttmayccaggaggtgcacgcamattacctgcatcagcggccsctgcamacgcccatcattgtgcactgcagctctggtgtgggccgcacgggagcctttgcactgctctatgcagctgtgcaggaggtggaggctgggaacggaatccctgagctgcctcagctggtgcggcgcatgcggcagcagagaaagcacatgctgcaggagaagctgcacctcaggttctgctatgaggcagtggtgagacacgtggagcaggtcctgcagcgccatggtgtgcctcctccatgcaaacccttggccagtgcaagcatcagccagaagaaccaccttcctcaggactcccaggacctggtcctcggtggggatgtgcccatcagctccatccaggccaccattgccaagctcagcattcggcctcctggggggttggagtccccggttgccagcttgccaggccctgcagagcccccaggcctcccgccagccagcctcccagagtctaccccaatcccatcttcctcccmrmcccccctttcctccccactacctgaggctccccagcctaaggaggagccgccagtgcctgaagcccccagctcggggcccccctcctcctccctggaattgctggcctccttgaccccagaggccttctccctggacagctccctgcggggcaaacagcggatgagcaagcataactttctgcaggcccataacgggcaagggctgcgggccacccggccctctgacgaccccctcagccttctggatccactctggacactcaacaagacctgaacaggttttgcctacctggtccttacactacatcatcatcatctcatgcccacctgcccacacccagcagagcttctcagtgggcacagtctcttactcccatttctgctgcctttggccctgcctggcccagcctgcacccctgtggggtggaaatgtactgcaggctctgggtcaggttctgctcctttatgggacccgacatttttcagctctttgctattgaaataataaaccaccctgttctgtgrmmmrwaaaaaaaaaaraaaaaaaaaaaaaaaaaaaaaaaaaaaaaaaaaaaaaaaaaaaaaaaaaaaa

SEQ ID NO: 187 - DNA, 600 bp, Homo sapiens
gagagayacttcactgctccaaggcttttgagacacaagggaatctcaacaaccagggatcaggagggtccaaagccgacattcccagtcctgtgagctcaggtgacctcctccgcagaagagagatgctgctctggccctgggagctgaattccaagcccagggtttggctccttaaacccgaggaccgccacctcttcccagtgcttgcgaccagcctcattctatttaactttgctctcagatgcctcagatgctataggtcagtgaaagggcaagtagtaagctgcctgcctcccttccctcagacctctccctcataattccagagaagggcatttctgtctttttaagcacagactaaggctggaacagtccatccttatccctcttctggcttgggccctgacacctaagtctttcccacggtttatgtgtgtgcctcattcctttcccaccaagaatccatcttagcgcctcctgccagctgccctggtgctttctccaagggccatcagtgtcttgcctagcttgagggcttaagtccttatgctgtgttagtttcgttgtcagaacaaattaaaattttcagagacgctg

SEQ ID NO: 188 - DNA, 600 bp, Homo sapiens; identical to SEQ ID NO: 187

SEQ ID NO: 189 - DNA, 600 bp, Homo sapiens
atggcatatgaccgctatgtggccatctgcagtcccttgcactacccagtcatcatgaaccaaaggacacgggccaaactggctgctgcttcctggttcccaggctttcctgtagctactgtgcagaccacatggctcttcagttttccattctgtggcaccaacaaggtgaaccacttcttctgtgacagcccgcctgtgctgaagctggtctgtgcagacacagcactgtttgagatctacgccatcgtcggaaccattctggtggtcatgatcccctgcttgctgatcttgtgttcctatactcgcattgctgctgctatcctcaagatcccatcagctaaagggaagcataaagccttctctacgtgctcctcacacctccttgttgtctctcttttctatatatcwtywagcctcacstacttcyggcctaaatcaaataattcwcctgagrgcaagaagytgytatcattrtcstacactgttrtgactcccatgytgaaccccwttatctacwgcytgrgaaatagcgaggtgaagaatgccctcagcaggaccttccacaaggtcctagccctcagaaactgtatcccatag

SEQ ID NO: 190 - DNA, 600 bp, Homo sapiens; identical to SEQ ID NO: 189

SEQ ID NO: 191 - DNA, 600 bp, Homo sapiens
ttggccccctcctccatcttcagagctagcaggttcagtctgtgtcacgaaccatttctctggttccctgcagacaggaaaggttgtccctaaggactcatgagattaggttgggcccagccagataatacatgataatctccctcctcaaggtttttaatattaaacacatctgcaggacacattttgccatgtaaactaacattcactggttccagggattaaggaatgaacctcttttgttggggaagggtggcattctgctgaccacagcactccaaccaaaagccaaaaaccaaagcaagacttactaacgcatatcaaataaattaaaggtacaaaatcgtgaatctcagttatcttaaatattccaatactatttacaaaattattcaaattctcacgccttccaactcaaaattagcaatctaaagtaatttccatatcctagatggaaaccctcatgctaaactgtctgattatgcatggttctaaatggtttcagtggcaaatacataacattgtactactgattaaactgaacttaaaagcaaaaaaaaaaaaaaaaaaaaaaaaaaaaaaaaaaaaaaaaaaaaaaaa

SEQ ID NO: 192 - DNA, 101 bp, Homo sapiens
caaggatgctgtgtagataagtaagaagtagtgtttccatgctctgtgtaygtgccggacgagtgggaggtgtctcgagagaagatcaccctccttcgaga

SEQ ID NO: 193 - DNA, 1400 bp, Homo sapiens
aagtattcaaaaaactccaggctggcagcattgcaatagtgaggcagactttcaataaggagatcaaaaccatgaagaaattcgaatctcccaacatcctgcgtatatttgggatttgcattgatgaaacagtgactccgcctcaattctccattgtcatggagtactgtgaactcgggaccctgagggagctgttggatagggaaaaagacctcacacttggcaagcgcatggtcctagtcctgggggcagcccgaggcctataccggctacaccattcagaagcacctgaactccacggaaaaatcagaagctcaaacttcctggtaactcaaggctaccaagtgaagcttgcaggatttgagttgaggaaaacacagacttccatgagtttgggaactacgagagaaaagmcagacagagtcaaatctayarcatrtststsryckcaskaacygramgatrtakkytrksrmkatgatgtaaagtctgaaatatacagctttggaatcgtcctctgggaaatcgccactggagatatcccgtttcaaggctgtaattctgagaagatccgcaagctggtggctgtgaagcggcagcaggagccactgggtgaagactgcccttcagagctgcgggagatcattgatgagtgccgggcccatgatccctctgtgcggccctctgtggatgaaatcttaaagaaactctccaccttttctaagtagtgtatcaaaatctaaaccaaggagtctctggacaagaagctgggagaggcacraactggacatctctctctctcatatccttcggcattgggttatctatgggwgcaaggagtgggcacgcttctctgttacaaatagaaaacgattccagtcatacaggacacatcccactccaaatgatatttccaaaaacatacctctgacagtaactttgatagatggtttgkcaaatgtatctttctgggtatccacacctcttggcmatgaaatttgcagctcctcccttccataaatgaagtctctttccccaccatttgaatctgggctggcactgygacttgattygatcaatagaatgtggaagaagtgactgtwtgccakttccmagcctaggtttcaagaggccttataaatgyctgttggaaccttacccmgccmtgrmcatgttgastgascatgctggaraatgasmgaccacatgaagcagaaacatgctttcctagctgaagtcatactagcccaaccaacatggcagctaacacatgaatgaggccaatcaagaccagaagaaccactcaagcagatcccagcccaaattgcccattcacacaatcaggagctaaataaattactgttgtcttwwcacttaaaaaaaaaaaaaaaaaactcgag

SEQ ID NO: 194 - DNA, 600 bp, Homo sapiens
  misc_feature (462)..(463): n is a, c, g, or t
  misc_feature (488)..(488): n is a, c, g, or t
gaggccctccaggcccagtcctgcctgcagggagarcccccagccttagggttgggccctgaggcttgaagcttgaaggcytgctgcctggaggaaggatgtccctgcactgatacagaagctgktyytkrcmmwkcytsccstgtcwtacakttktcyctctatccggaytmgatgttgctatatgaacacatcgggactgtgtctgcaggaaggagctccccattcgaggccttcacagtgtcacccacattcacctctttccacttaaacgtgtcccatgaatcttgtcataacagttttgtgttccttaactattttgtctgccatgtcatttatgatgtatataacctctttaatgcctgaaatcataagaataatcatcaaaggcaagagggttgtatattttcccgttggagacacatctggaatttgctgcaataaaataataataagaaagcnnaaaaaaaaaaaaaaaaaaaarmagnakkcaaaaakcgaggkagawatragcacaccgcttgtcttgggctggacatataattgctggctggtgggttgcaagaaatttctcttcaagcatcatcacccacttttgct

SEQ ID NO: 195 - DNA, 600 bp, Homo sapiens; identical to SEQ ID NO: 194
  misc_feature (462)..(463): n is a, c, g, or t
  misc_feature (488)..(488): n is a, c, g, or t

SEQ ID NO: 196 - DNA, 600 bp, Homo sapiens
  misc_feature (588)..(588): n is a, c, g, or t
  misc_feature (597)..(597): n is a, c, g, or t
ccaagaacgttcccaggcagaactccgctcccctgctccaaactgctctcctagggaatggggaaaggccccctggggcgaaggaagcgccccccttgacactctcgctggtgaagccaagcgggaggggagctgcgccctccctgacctcccaggctgcggctcaggtggccaaccaggccctgatccggggtgactggaaccggggcggtggggtgagggtggccagcgtacaacaggkccctccccggcttcctccggaggcccggcccggccggaggatgttcagcacctctgccttgcagggtgcccaggggggtgccagggctttgcttggaggctactcccaagcctacgggactgtctgcactcggcactgggccacctgccctgctggaggggcaccatgtgtgagccgccgtactccttacactgccctctgttctgcccagcccttcccagcccttcagctctgaccccttaccttcctgttgctgccgtgaagtcaggacttgccgtctctcggggaccaataagcctgcccgccaatactctcataaagcatgtgccaaaaaaaaaaaggggccnttaaaaccntta

SEQ ID NO: 197 - DNA, 600 bp, Homo sapiens
gttagaccagaaaacccagaggctactatcccgagaaatctccagcatggaaaagctgcaccatcccaacatcatccgcctttacgaagtggtggagaccctatccaagctgcacttggtgatggagtatgcagggggtggggagctcttcggaaaaattagyactgaggggaagctctctgaaccagaaagcaagctcatcttctcccagattgtgtctgccgtgaagcacatgcatgaaaaccaaattattcatagagatctgaaagcagaaaatgtattctataccagtaatacttgtgtgaaggtgggcgattttggattcagcacagtaagcaaaaaaggtgaaatgctgaacactttctgtgggtctcctccctacgctgcgcctgaactcttccgggacgagcaytacatcggcatttacgtggatatctgggccttgggggtgcttttgtacttcatggtgactggcaccatgccatttcgggcagaaaccgtggccaaactaaaaaagagcatcctcgagggcacatacagtgtaccgccgcacgtgtcagagccctgccaccgactcatccgaggagtcttcagcagatc

SEQ ID NO: 198 - DNA, 600 bp, Homo sapiens
aagaaaccagagcaacgcttargaagcagrgaaaagtctgatgatcccaggaaacatcatttctttaaaacgatcaactttcctcgcctggaagctggcctaattgaacccccatttgtgccagacccttcagtggtttatgccaaagacatcgctgaaattgatgatttctctgaggttcggggggtggaatttgatgacaaagataagcagttcttcaaaaactttgcgacaggtgctgttcctatagcatggcaggaagaaattatagaaacgggactgtttgaggaactgaatgaccccaacagacctacgggttgtgaggagggtaattcatccaagtctggcgtgtgtttgttattgtaaattgctctctttaccagacaggcagcaggagtctcggctgacataatcctcgaatgttccacacgtggaaatctgtggaatgagggctaatcagttaggagggacatcacaaccacaaaacaattcaaaagacaggcaagctcactactagaacacattttattttctttttctttcttcataaagatgagtaaagtctcagttttcactgagggcagggaaaaggaacactca

SEQ ID NO: 199 - DNA, 600 bp, Homo sapiens; identical to SEQ ID NO: 198

SEQ ID NO: 200 - DNA, 1400 bp, Homo sapiens
gacttcatccwysgtrcscycracasgmcyggkscsaakkycckggtssacyswsksgtssgcgtgagccgctctgccacgctggtcctggcctacctcatgctgcaccagcggctgtccctgcgccaggcggtgatcaccgtgaggcagcaccgatgggtcttccccaaccgaggcttcckgsamswsytctgcagsckkgwssassaaytkcggsgtgccrrccwkwkcwkaggrgmyrsagctggtccttactccctgccatggggctctgccactttgccaccctggcactgatcctgctggtgctgctggaggctctggcccaggcggacacacagaagatggtggaagcccagcgtggggtcggccctagagcctgctactccatctggctcctcctggcgcctacaccccctctcagccactgtcttcagtctccacagaaacagcatcaagtgtgcggagacaggcggstgwmmgccrgcagcacgwmctgcccstcasmsamkyscmcakccyggcsccagrymmtsccmcaggatggactcactgcagaagcaggacctccggaggcccaagatccatggggcagtccaggcatctccctaccagccgcccacattggcttcgctgcagcgcttgctgtgggtccgtcaggctgccacactgaaccatatcgatgaggtctggcccagcctcttcctgggagatgcgtacgcagcccgggacaagagcaagctgatccagctgggaatcacccacgttgtgaatgccgctgcaggcaagttccaggtggacacaggtgccaaattctaccgtggaatgtccctggagtactatggcatygaggcggaygacaaccccttcttcgacctcagtgtctactttctgcctgttgctcgatacatccgagctgccctcagtgttccccaaggccgcgtgctggtacactgtgccatgggggtaagccgctctgccacacttgtcctggccttcctcatgatctrtgagaacatgacgctggtagaggccatccagacggtgcaggcccaccgcaatatctgccctaactcaggcttcctccggcagctccaggttctggacaaccgactggggcgggasacggggcggttctgatctggcaggcagccaggatccctgacccttggcccaaccccaccagcctggccctgggaacagcaggctctgctgtttctagtgaccctsagatgtaaacagcaagtgggggctgaggcagaggcagggatagctgggtggtgacctcttagcgggtggatttccctgacccaattcagagattctttatgcaaaagtgagttcagtccatctctataataaaatattcatcgtcataaaaaaaaaaaaaaaaaggcgcc

SEQ ID NO: 201 - DNA, 600 bp, Homo sapiens
ctcaaactcctggcctcaagcaatcctcacgcctcagcctcccaaagtgttgatgagccactgtaccccgataccactgtataaaaaatttaaaaaaaattgtgagtgctattgtacatggcaaagtttcaaagagctcttggccatccctcaccaaactttggcaaaagatggtgttagtccccttctccagggcacatgagaaaaacaggcctaacatcaggtctcagcggttcctctcacaggccttggcttggaaggctggagcttcggaccaaggcccagccctgtcacctcctcttcatgtgatgtggacccctgggagcatcagtgtcctcatctgtccaatgacagcccttttctcacagagttattgtgaagattcaacaatttcttggcatagtgcctggcacatggtgtgtgcttagcgcaaatggcagctctcatcatgaatgatagactctttcaccctgctggtcccaggtcggcacacacatcctcataatggcatttctcctttctgtgcacagcactttattgttacaaagtactcttccaaaaagttaccctgtgtgtaaaaaaaaaaaaaaaaaaaaaaaa

SEQ ID NO: 202 - DNA, 1400 bp, Homo sapiens
agaagccacactccattgtggaccccctggtgcgcattgagatccatggggtgcccgcagactgtgcccggcaggagactgactacgtgctcaacaatggcttcaacccccgctgggggcagaccctgcagttccagctgcgggctccggagctggcactggtccggtttgtggtggaagattatgacgccacctcccccaatgactttgtgggccagtttacactgcctcttagcagcctaaagcaagggtaccgccacatacacctgctttccaaggacggggcctcactgtcaccagccacgctcttcatccaaatccgcatccagcgctcctgagggcccacctcactcgccttggggttctgcgagtgccagtycmmmwyccctgcagagccctctcytcytctggagtcaggtggtgggagtaccagccccccagcccacccacttggcccactcagcccattcaccaggcgctggtctcacctgggtgctgagggctgcctgggcccctcctgaagaacagaaaggtgttcatgtgacttcagtgagctccaaccctggggccctgagatggccccagctcctcttgtcctcagcccacccctcattgtgacttatgaggagcaagcctgttgctgccaggagacttggggagcaggacacttgtgggccctcagttcccctctgtcctcccgtgggccatcccagcctccttcccccagaggagcgcagtcactccacttggccccgaccccgagcttagcccctaagccctcctttaccccaggccttcctggactcctccctccagctccggaacctgagctccccttcccttctcaaagcaagaagggagcgctgaggcatgaagccctggggaaactggcagtaggttttggtttttattttttgagacagggtctcgctccrtcgcccaggctggagtgcaatgttgcaatcatggctcactgcagctttgaactcccaggctcaagcgatcctcccatctcrgcctcctgagtagctgggactacaggcacaggccaccaaacctggctaatgtttaaattttatgtagagatggcggggggggcgggggtctccctatgttgcccaggctggtctcgagctcctgacctcaagtgatcctcctgccccagcattccaaagtgctgggattacaggtgtgagccactgcctggcctggccgtaggtttgtaactgtttcatagaagagccctggagaagacagtagaatgagcctatctagtttaaaaaataaagaagcacgttgatttcaccaaaaaaaaaaaaaaarggcggccgcaaamaaaaaaaaaaaaaaaaarggggccssywrrctagtctagagaaaaaacctcccacacaaccccg

SEQ ID NO: 203 - DNA, 600 bp, Homo sapiens
ccatctgagggagaggaacgtggaacaggagcaggctctgatgctgagaggcttgcctccgggggctggaagcctgggtggccggggcccctgaagaaggctcccctctgtatcccccaggtctcctcaacactgggctgatcctgaatggcacaggccaaggggaggccagcctcgcctttctacccaggccccctgccctgcccacctcaggcccccaccctccrctcctccccacggtactgtgaacgtcgtgtgactcagtgcagagacagataatatatttaattcatgtacaaaaaaaaaaaaaarrrrrrmmmttttaaaagaacccttggggggcccaaatttaacccgggctggcaaggtaaaatttttttccttatggggggccgaataaaaaccaacttgggaattttgggaaagaaccttttttttgggggggggacaaattggcccaacctccctccaaaaattaaaggctttagggaaaaaaaaaatttttaaggggaaaagggggaaaaacaacctccatatcctggcggttgaaaagttttctttccggggtttattttaaaaaaattttttccccggggcctg

SEQ ID NO: 204 - DNA, 600 bp, Homo sapiens; identical to SEQ ID NO: 203

SEQ ID NO: 205 - DNA, 1400 bp, Homo sapiens
ctgctgcagactgagccatgtgatggtacgtaatgagttcccctgagggaatgaaacacccccctcaccccttcaaagtcacccctttggaattcaacacagacacacatatcccttcaaaaacttttatttgtatcaacagttcctagctcttgacttagcttagagcttttaaaagagcagacaccttatatatttgagattgaaaaagtttctgctattaatcagaaataatcatttctattttctggcttaccccttggaataagccaaaaataaaaccaaagttacatttcctgacagatggctaagaaaacaatagaaggaacatcctgaattctagagttgactcttgctggtgaagtacaccttcaggcttaggtccattctcctaagtaaagcctgaaggaaaactcttaacacctaattctttgtgggaaaaatgatcaactaggccatttcacaggctwtagaacmaaagtacmattgggcatctttccytatgtcckgggatcaggggwgcttacatttaacattgatcaggtaaagaggagaggctgtgcctaaggtctgagaaaaggcttgctctaagcaagctgtggtgaggcacaggatgactagggaatggcagagaacaggctggcctactgtcagttcaagcaaccagctgagcagcagcagtctaaaaagccccaaacagaacacctccatggattcagggaagggctgaggcactgcctttctagtatgtgccaaaaaaaacataactctgaattggggcccaggggactttgagtttgtatggggagggaaaaggagtgagcagttctcctcccctccccacagccttaggccaacacaaactgcaaattggtaagcagcaccttaatacctcttgtgacagttacggctgaagtggcagggtcaagcttgtaggtgttggcatccccctttttatatcggtcccggaagacatagatgctcccgttacagctggcaatcttccagagggatggggcagagctccaggcctcaggaaggcaaagccgggtgaagctgtctagcaagggattgtagcacaccagggagtccccttcagccacgatgaacaccagatctttatgcacagctgcgtgcatgcggcctgcaaagggcagcacatagggcttcacatggcatttgtctgtctctgtgtcaaagcactggatgagtcgggaaggtttggtaaagaagtccagatcattctcctccccccctagtaagtagatgatcccgttgaggttggcaccagcagcccctgacacagccacctctagctgagttgtctctgtccacacattatcacctacgcgataataaatgactgcgttggagagggtaaaaaaaaaaaaaaaaaaaaa

SEQ ID NO: 206 - DNA, 1400 bp, Homo sapiens; identical to SEQ ID NO: 205

SEQ ID NO: 207 - DNA, 600 bp, Homo sapiens
tgaagacctaaactttcctaaatgttcatatgggtagcagattttgtggtgattagaaacatcaggtccttaaatacgatgaacatgggatacaaaggaattctttataagggcaagtatcctaagttagcacatttacttttctctcccctccgcccccaaaagaaaaatccttacaaataaactgcaggtaggcttctaagcctagtcctgcagtatgctgctaacatcttgatgccaatcttcacagcattctttgattgtcatcttattgctgatacattcatacatatatttagtgcttgacactgtagaattttgttacagaagatggttactagattttaagggagctgagggaataattgatgagccttgaattaaccatgcatttaattagattttttgttgttgttgttgttgttttgagatgatgtcttgctctgttgcccaggctggagtgcagtggctcaatctcggctcactgcaacctctgcctcgcaggtttgagcgattctcctgtctcagcctccccagtagctgggtttacaggcgcttgccaccacacctggctagatgttttatattaaagccagagaa

SEQ ID NO: 208 - DNA, 600 bp, Homo sapiens
  misc_feature (566)..(566): n is a, c, g, or t
  misc_feature (569)..(569): n is a, c, g, or t
  misc_feature (571)..(571): n is a, c, g, or t
  misc_feature (578)..(579): n is a, c, g, or t
ggacacatttcacacctcaggctcgtggtggtgcaggggacaagaggctgtgggtgcaggggacacctgtggagggcatttcccgtgggcccccgagacccgcctagatggaggaagcgctgctgggcgccctcttaccgctcacggggagctggggccatggatgggacaggagtctttgtccctgctcagcccggaggctgtgcacggccctcgtcacaaggtgacccttgcagcrcaggccgcgggtgccccaggctcggctcagttcttggaggtcaagggcatgggttggggtagtgggtggggaggtgaatgttttctagagattcaaactgctccagcaatttctgtatagttttcacctctgagaattacaatgtgagaaccgctmaaaaaaaaaaaaaarrrrrrrmmmwwwwaaaaraamaaawwwwwamwmmmrrrrrwwrrmaarrwatttttttttttttggggccccaaaattaaattccgggggcggttttttaaaaaggggggagtggaaaaaccctggggttacccaattttatttgttttggagaaanatntntttactnntttttatttaatatgtttttt

SEQ ID NO: 209 - DNA, 1400 bp, Homo sapiens
ggcggggaccggcaaggcgggaccatttcccggcataggctccggtgcccctgcccggctcccgccgggaagttctaggccgccgcacagaaagccctgccctccacgccgggtctctggagcgccctgggttgcccggccggtccctgccgctgacttgttgacactgcgagcactcagtccctcccgcgcgcctcctccccgcccgccccgccgctcctcctccctgtaacatgccatagtgcgcctgcgaccacacggccggggcgctagcgttcgccttcagccaccatggggaatgggatgaacaagatcctgcccggcctgtacatckkcwwcttsamagatgccagagacgcggaacaattgagcaagaacaaggtgacacatattctgtctgtccaygatagtgccaggcctatgttggagggagttaaatacctgtgcatcccagcagcggattcaccatctcaaaacctgacaagacatttcaaagaaagtattaaattcattcacgagtgccggctccgcggtgagagctgccttgtacactgcctggccggggtctccaggagcgtgacactggtgatcgcatacatcatgaccgtcactgactttggctgggaggatgccctgcacaccgtgcgtgctgggagatcctgtgccaaccccaacgtgggcttccagagacagctccaggagtttgagaagcatgaggtccatcagtatcggcagtggctgaaggaagaatatggagagagccctttgcaggatgcagaagaagccaaaaacattctggccgctccrggaattctgaagttctgggcctttctcagaagactgtaatgtacctgaagtttctgaaatattgcaaacccrcagagtttaggctggtgctgccaaaaagaaaagcaacatagagtttaagtatccagtagtgatttgtaaacttgtttttcatttgaagctgaatatatacgtagtcatgtttatgttgagaactaaggatattctttagcaagagaaaatattttccccttatccccactgctgtggaggtttctgtacctcgcttggatgcctgtaaggatcccgggagccttgccgcactgccttgtgggtggcttggcgctcgtgattgcttcctgtgaacgcctcccaaggacgagcccagtgtagttgtgtggcgtgaactctgcccgtgtgttctcaaattccccagcttgggaaatagcccttggtgtgggttttatctctggtttgtgttctccgtggtggaattgaccgaaagctctatgttttcgttaataaagggcaacttagccaarwwwaaaaaaaaaaaaaaaaaaaaaaaaaaaaaaaaaaaaaaaaaaaaaaaaaaaaaaaaaaaaaaaaaaaaa

SEQ ID NO: 210 - DNA, 1400 bp, Homo sapiens
tggataggggaagagggatgatgggatggaatgggagggtgggatctagatgacctcttgaaattgtcccagttactgcttccttcataactgttcacaaaacgtttttcatatataccaccttgtttcccctgggaagtgaggggacgaagccttagagggtgacatagctagaaagtggagaagctcactgttcactgtgcaaagccccagtagtcggattccggggaaaagaacaagtatctagttttgatgacaatgttttcttgtaagaatcccaacactttagaatagaaaaggacctaagattctctggctcagccccagcctttctgaagaagggaaaactagggacccagatggtttaaggacaccccagagtccccagatgagctggcatttgagctggtctggagcagagtttctccctcaaagaacacagagaaatcagagagtggctgccatggtcagagggggatgtcaacaacagatcaagccgtcatcacaacaggtatttctgaagttcctgcagggactaggtcttgcatttttaagtccttttcaaaactgtgcagcttcctgaaccttatgctgtttgtcccatccactcttgaagctggggaaagacagctttctttgggaactctgtctttctcagttgacttcccaagtaagcagcaaacccctggatagccttgttatctactttaggtattaagaggctattgggttttactagattaaatcaataaaacatttcctatagagccatatcatacactgaagcaaattcagaaagaatgcaaaactgctatcttttgggggagtctggaagcctgttggttagtgtatttattttctttgtggggtcttctgtgagctacaggcacagtaagaataattcagagcggtactgggagttggttcaatttcatgtcatcacttttcaatgaagggagtgcatttcctgagtagtaaatgagtatattatttgtggcagcttttctgttaagggagctttccagacatctggttgcaaagacaaataggatatatatttgtacttcttctctgtggacatgtttttgtgacacacagttatctctaggagttgacgtctgtgggcactaagggactgaggttgggggagaaagctgaggaggctttggaagagaaggtgaggagcatttcaggatttgcagtccccctccacatgtatccacatctgagctggtggtgttccaataatgaggcatttggggcaaccaattttggaaggatagaatagctttatgtggagcaaacttgaggatcaattggagttgagtggtttaaaacttaaagatggcacaggaagctgtatcatttacaggtgaaaaaaataaatgggtctgacttca

SEQ ID NO: 211 - DNA, 600 bp, Homo sapiens
acacgtgtctgtgcaagggcagcctggacaacatgacctgcatcctggtctgcttccctggggcccctaggccttctgaggaggcgatcaggagggagctagcactggacgcagccctgggctgcagaatcgctgaactgtgtgcctctgctcagaagccccccagcctgaacacagttttcaggactctggcctcagaggacatcccagatttacctcctgggggagggctggactgcaaggccactgtcattgctgaagtttattctcagatctgccaggtctcagaagagtgcggagagaaggggcaggatggggctgggaagtccaaccccacgcatttgggctcagccttggacatggaggcctgacagctgttgtcctttggggatcctttgcttctctggggcctcaacagaactaaagaagaaaaccgaccctttccccaactacatgtaccagcggaaggaaggaaggccaatgtaggaacccaaaatgcttatttcttcttctcttacttccctctcacagaaaagtcttacgaatggggaaattccaccaacatccagaccaaaaagaaaaaagcccaaatcgaaaaaa

SEQ ID NO: 212 - DNA, 600 bp, Homo sapiens; identical to SEQ ID NO: 211

SEQ ID NO: 213 - DNA, 600 bp, Homo sapiens
ttgaggaagcagttaaattgtgcgctgtattttgcagattatggggattcaaattctagtaataggcttttttatttttatttttatacccttaaccagkttaatttttttttttcctcattgttggggatgatgagaagaaatgatttgggaaaattaagtaacaacgacctagaaaagtgagaacaatctcatttaccatcatgtatccagtagtggataattcattttgatggcttctatttttggccaaatgagaattaagccagtgcctgagactgtcagaagttgacctttgcactggcattaaagagtcatagaaaaagaatcatggatatttatgaattaaggtaagaggtgtggcttttttttttttcttttttccagccgttgaccaattatagttcggctcttgactgagaagttgtggtggaaacgtttgccatattttctttgcatttgaataattgtcttgtacttagaaaaaaggcgtctatgaatgaccagtgtttttcgtcgccaaatgttgctgacaaacttatcccaaaactttagtggcttaaaaaaacctgcccccaactgttagtcaattgagctggg

SEQ ID NO: 214 - DNA, 600 bp, Homo sapiens; identical to SEQ ID NO: 213

SEQ ID NO: 215 - DNA, 600 bp, Homo sapiens
atgcccatgaccaagccgctggtgggcaagctggcctgcatggagtacagcagcatggagtcagtcctcgggctgcccctcatggtcctggtggcctttgccattggcttctgtgggccagtggggatcatcctgtcctgctatatgaagatcacctggaagctgtgcagcacagctgggagaacccagtgaccagcgggaaaggacaccaccggcggggcagcccaggaggacccagtgaccaacaggaaaggacgccaccggcggggcagcccaggaggacccagtgaccagcgggaaaggacaccaccggcaggacagcccgagaggacccagtgaccagcgggaaaggacgccaccggcgggacagcccgggaggacccagtgaccagcaggaaaggacgccactggcgaggctgcctgcttacgctgctgatgctggtggccgtggtggtctgcttcagcccctaccacctcaacatcaagcagttcatggcgagagggatgctccacctgccatcctgtgccgagcggagggctttcttactgtcccttcaggccaccgtggccctcatgaacatgaactgtggcattacccca

SEQ ID NO: 216 - DNA, 600 bp, Homo sapiens
tgacagttgcrgttttcacccatggaaagcattagtctgacagtacaatgtttrgattctccttgatattaccaacacattttccctgttatctcacactgaatctttcctacagaacactttttctgcaattttctttgtaataaaaggagttcctgtacaaaaccctaaaacactctttatacttctttcctacctgatagcatcaaaaaggaagattccttattaatctctcagactatgttcccctgaaaatcatgttcccttctatgactggaggcattactgcagttagaagctcgattcttaataagtgagttctgctatctctacattccattgaattctcagatacagagcaaaataatgtccttagagacagactctctcttcataaaaacactctcacctattggttttataaaaagtcttcccctgtcatttgttcacagcatggtgatatgttggccttggtttctagtaaagacaactgtggccccttccccttgagaacttttaagtgcttatttagctcttcctggactaatggaccagtgaggagcccataaatgtgccccagttctattttggccattggaa

SEQ ID NO: 217 - DNA, 600 bp, Homo sapiens
gtcagcgacaactttcagcaggctgtctgctcaacagtgagatgcaaaggtatagmkrtgatagcactctkwgtcmrgcatattagaratagtgtagttwctmraamagascctragttagtgatgcccccagatgatgctgccttctcagtagaacttaaacataaaaagatccaactgttggataatattaaaatcaaggcttcccccaacgggctaggtttgtctgtccccaagacggcggttgttattggtggtgatgttcatcttgtgtttctgtgtgtctttctctccagaatgaaagaaatgtttttcagctttagggtcctgcttcatgacaaaaaggaatttctaggtcgtgctacaacttcccttgccaacagcattccttctgtgtctgctgagcaatgtcgtcttcatggcattgatggtccggctgcagtcatgaagccagatgctcaagatttggaaaccaaagttcatgttctttcagtcagctcccctgttctgggagaaaatgctgaagagagtgttgatggggaaaacaccttggatactgcttccaagccagatcttcagaagattttccaaaaacaatag

SEQ ID NO: 218 - DNA, 600 bp, Homo sapiens
ggacactctgtctcctgatgaacgggttgacctcttccttctgcagcaagttcttgaaattcaatgaagatcggtgcttcagggtggacatggtccaggccgccctcatcatgggggtcttaaccccagtgatgactctgtccagcctgaccctctttgtctgggtgcggaggagctcccagcagtggcggcggcagcccacacggctgttcgtggtggtcctggcctctgtcctggtgttcctcatctgttccctgcctctgagcatctactggtttgtgctctactggttgagcctgccgcccgagatgcaggtcctgtgcttcagcttgtcacgcctctcctcgtccgtaagcagcagcgccaaccccgtcatctacttcctggtgggcagccggaggagccacaggctgcccaccaggtccctggggactgtgctccaacaggcgcttcgcgaggagcccgagctggaagstgkgkaaygssmacmrtsrrcmycamyswgmwskssscytgaggcccctgcgggctgccgcaggaaactggatcaagaacacatgttctaaacaatcaaaagtgattccagaaaggaattcctga

SEQ ID NO: 219 - DNA, 1400 bp, Homo sapiens
ctggcggccctagctcggcggggccggcggggccactgggcacccatacacgtcttcattggccacttgtgcctggccgacctggccgtggctctgttccaagtgctgccccagctggcctggaaggccaccgaccgcttccgtgggccagatgccctgtgtcgggccgtgaagtatctgcagatggtgggcatgtatgcctcctcctacatgatcctggccatgacgctggaccgccaccgtgccatctgccgtcccatgctggcgtaccgccatggaagtggggctcactggaaccggccggtgctagtggcttgggccttctcgctccttctcagcctgccccagctcttcatcttcgcccagcgcaacgtggaaggtggcagcggggtcactgactgctgggcctgctttgcggagccctggggccgtcgcacctatgtcacctggattgccctgatggtgttcgtggcacctaccctgggtatcgccgcctgccaggtgctcatcttccgggagattcatgccagtctggtgccagggccatcagagaggcctggggggcgccgcaggggacgccggacaggcagccccggtgagggagcccacgtgtcagcagctgtggccaagactgtgaggatgacgctagtgattgtggtcgtctatgtgctgtgctgggcacccttcttcctggtgcagctgtgggccgcgtgggacccggaggcacctctggaaggggcgccctttgtgctactcatgttgctggccagcctcaacagctgcaccaacccctggatctatgcatctttcagcagcagcgtgtcctcagagctgcgaagcttgctctgctgtgcccggggacgcaccccacccagcctgggtccccaagatgagtcctgcaccaccgccagctcctccctggccaaggacacttcatcgtgaggagctgttgggtgtcttgcctctagaggctttgagaagctcagctgccttcctggggctggtcctgggagccactgggagggggacccgtggagaattggccagagcctgtggccccgaggctgggacactgtgtggccctggacaagccacagcccctgcctgggtctccacatccccagctgtatgaggagagcttcaggccccaggactgtgggggcccctcaggtcagctcactgagctgggtgtaggaggggctgcagcagaggcctgaggagtggcaggaaagagggagcaggtgcccccaggtgagacagcggtcccaggggcctgaaaaggaaggaccaggctggggccaggggaccttcctgtctccgcctttctaatccctccctcctcattctctccctaataaaaattggagctcttttccacatggcaaggggtctccttggaa

SEQ ID NO: 220 - DNA, 600 bp, Homo sapiens
cattgcacagagctgccagccctccttctatgatggcaccrtcattgtcaagaagctgccatacctgccacggattctgggccgcaacatcggytcccaccrygtgagggtggagcacttcatgaaccacagcatcaccacactggccaaggacacgccrctggaggaggtggtcaaggttgtgacctccacagacgtgrccgagtatcccytggtggagagcacagagtcccagatcctggtrggcatmgtgcrragggcccagctggtgcaggccctsmaggctgagcctccttccwgggctccwggacaccagcagtgtctccaggacatcttggcyrsrggctgccccacrgaaccagtgaccctgamgctrtycycagagacywccytgcaysaggcacamaacctctttragctgttgaaccttcaktccctcttygtgacrtcgcggggcagagctgtgggctgcgtgtcctgggtggagatgaagaaagcaatttccaacctgacaaatccgccagcyccaaagtgagccggcccagcaagatgaaacagggcaccccagctgmcctggtactgaggyygggctgagaccct

SEQ ID NO: 221 - DNA, 600 bp, Homo sapiens
ttaccaccaagtcagatgtgtggtcctttggcgtsstcctctgggagctgatgacaagaggagccccaccttatcctgacgtaaacacctttgatataactgtttacttgttgcaagggagaagactcctacaacccgaatactgcccagaccccttatatgaagtaatgctaaaatgctggcaccctaaagccgaaatgcgcccatccttttctgaactggtgtcccggatatcagcgatcttctctactttcattggggagcactatgtccatgtgaacgctacttatgtgaacgtaaaatgtgtcgctccgtatccttctctgttgtcatcagaagataacgctgatgatgaggtggacacacgaccagcctccttctgggagacatcatagtgctagtactatgtcaaagcaacagtccacactttgtccaatggttttttcactgcctgacctttaaaaggccatcgatattctttgctccttgccataggacttgtattgttatttaaattactggattctaaggaatttcttatctgacagagcatcagaaccagaggcttggtcccacaggccagggaccaatgcgctgcag

SEQ ID NO: 222 - DNA, 600 bp, Homo sapiens
atatttattgtgttattactatgagtcaggctctgtttattgtttcaattctttacaccaaagtatgaactggagagggtacctcagttataaggagtctgagaatattggccctttctaacctatgtgcataattaaaaccagcttcatttgttgctccgagagtgtttctccaaggttttctatcttcaaaaccaactaagttatgaaagtagagagatctgccctgtgttatccagttatgagataaaaaatgaatataagagtgcttgtcattataaaagtttccttttttattctctcaagccaccagctgccagccaccassagccagctgccagcctagctttttttttttttttttttttttagcacttagtatttagcatttattaacaggtactctaagaatgatgaagcattgtttttaatcttaagactatgaaggtttttcttagttcttctgcttttgcaattgtgtttgtgaaatttgaatacttgcaggctttgtatgtgaataattctagcgggggacctgggagataattcctacggggaattcttaaaactgtgctcaactattaaaatgaatgagctttc

SEQ ID NO: 223 - DNA, 600 bp, Homo sapiens
cagtatgactcgcgtggccgctttggagagctgctgctgctgctgcccaccttgcagagcatcacctggcagatgatcgagcagatccagttcatcaagctcttcggcatggccaagattgacaacctgttgcaggagatgctgctgggagggtcccccagcgatgcaccccatgcccaccaccccctgcaccctcacctgatgcaggaacatatgggaaccaacgtcatcgttgccaacacaatgcccactcacctcagcaacggacagatgtgtgagtggccccgacccaggggacaggcagccacccctgagaccccacagccctcaccgccaggtgsstcagggtctgagycctataagctcctgccgggagccgtcgccacaatcgtcaagcccctctctgccatcccccagccgaccatcaccaagcaggaagttatctagcaagccgctggggcttgggggctccactggctccccccagtccccctaagagagcacctggtgataccgtggtcacggcaaaggaagacgtgatgccaggaccagtcccagagcaggaatgggaaggatgaagggcccgagaacatggcctaa

SEQ ID NO: 224 - DNA, 600 bp, Homo sapiens; identical to SEQ ID NO: 223

SEQ ID NO: 225 - DNA, 600 bp, Homo sapiens
ccaagctggccatcgtgggcattgccttctcctggatctggkctgctgtgtggacagccccgcccatctttggttggagcaggtactggccccacggcctgaagacttcatgcggcccagacgtgttcagcggcagctcgtaccccggggtgcagtcttacatgattgtcctcatggtcacctgctgcatcaycccactcagctatcatcrtgctctgctacctccaagtgtggctggccatccgagcggtggcaaagcagcagaaagagtctgaatccacccagaaggcagagaaggaagtgacgcgcatggtggtggtgatgrtcytkgcrtwctgcktctgctggggaccmtacrccttcttcgcatgctttgctgctgccaaccctggytacsccttccaccctttgatggctgccctgccggcctwctttgccaaaagtgccactatctacaaccccgttatctatgtctttatgaaccggcagtttcgaaactgcatcttgcagcttttcgggaagaaggttgacgatggctctgaactctccagcgcctccaaaacggaggtctcatctgtgtcctcggtatcgcctgcatga

SEQ ID NO: 226 - DNA, 600 bp, Homo sapiens; identical to SEQ ID NO: 225

SEQ ID NO: 227 - DNA, 600 bp, Homo sapiens
tcaacagctgcctcaaccccatcatctacccatgctccagcaaggagttcaagcgcgctttcgtgcgcatcctcgggtgccagtgccgcggccgcggccgccgccgacgccgccgccgccgtcgcctgggcggctgcgcctacacctaccggccgtggacgcgcggcggctcgctggagcgctcgcagtcgcgcaaggactcgctggacgacagcggcagctgcctgagcggcagccagcggaccctgccctcggcctcgccgagcccgggctacctgggccgcggcgcgccaccgccagtcgagctgtgcgccttccccgagtggaaggcgcccggcgccctcctgagcctgcccgcgcctgagccccccggccgccgcggccgccacgactcgggcccgctcttcaccttcaagctcctgaccgagcccgagagccccgggaccgacggcggcgccagcaacggaggctgcgaggccgcggccgacgtggccaacgggcagccgggcttcaaaagcaacatgcccctggcgcccgggcagttttagggcccccgtgcgcagctttctttccctggggaggaaaacatcgtggggggga

SEQ ID NO: 228 - DNA, 600 bp, Homo sapiens
tgtaccacagcccgggtgagaagtaaaagctttttgsaggtctgctgctgtgtagggccctcaacccccagccttgacaagaaccatcaagttccaaccattaaggtccacaccatctccctcagtgagaacggsgargargtytargamwksaaagatgcagaggaaaggggaataatcttaggtacccaccccacttccttctcggaaggccagctcttcttggaggacaagacaggaccaatcaaagaggggacctgctgggaatggggtgggtggtagacccaactcatcaggcagcgggtagggcacagggaagagggagggtgtctcacaaccaaccagttcagaatgatacggaacagcatttccctgcagctaatgctttcttggtcactctgtgcccacttcaacgaaaaccaccatgggaaacagaatttcatgcacaatccaaaagactataaatataggattatgatttcatcatgaatattttgagcacacactctaagtttggagctatttcttgatggaagtgaggggattttattttcaggctcaacctactgacagccacatttgacatttatgccggaattc

SEQ ID NO: 229 - DNA, 600 bp, Homo sapiens; identical to SEQ ID NO: 228

SEQ ID NO: 230 - DNA, 1400 bp, Homo sapiens
cactcaaaggacccaggatgcaccccatgaggccaggccacccctggagcgtggccactccacagagatccctgtggggcggtcaggagcactggctgtggacgttcagatgcagagcataacccggaggggccctgatggggagccccagcctgggctggagagccagggtcgagcggcctccatgccccgccttgcggccgagactcagcccgtcacagatgccagccccatgaagcgctccatctccacgctggcccagcggccccgtgggactcatctttgcagcaccaccccggaccgcccaccccctagccaggcgtcgtcgcaccaccaccaccaccgctgccaccgccgcagggacaggaagcagaggtccctggagaaggggcccagcctgtctgccgatatggatggcgcaccaagcagtgctgtggggccggggctgcccccgggagaggggcctacaggctgccggcgggaacgagagcgccggcaggagcggggccggtcccaggagcggaggcagccctcatcctcctcctcggagaagcagcgcttctactcctgcgaccgctttgggggccgtgagcccccgaagcccaagccctccctcagcagccacccaacgtcgccaacagctggccaggagccgggaccccacccacagggcagtggttccgtgaatgggagccccttgctgtcaacatctggtgctagcacccccggccgcggtgggcggaggcagctcccccagacgcccctgactccccgccccagcatcacctacaagacggccaactcctcacccatccacttcgccggggctcagaccagcctccctgccttctccccaggccggctcagccgtgggctttccgaacacaacgccctgctgcagagagaccccctcagccagcccctggcccctggctctcgaattggctctgacccttacctggggcagcgtctggacagtgaggcctctgtccacgccctgcctgaggacackctcactttcgaggaggctgtggccaccaactcgggccgctcctccaggacttcctacgtgtcctccctgacctcccagtctcaccctctccgccgcgtgcccaacggttaccactgcaccctgggactcagctcgggtggccgagcacggcacagctaccaccaccctgaccaagaccactggtgctagctgcaccgtgaccgctcagacgcctgcatgcagcagrcgtgtgttccagtggatgagttttatcatccacacggggcagycggccctcgggggaggccttgcccaccttggtgaggctcctgtggcccctccctccccctcctcccctcttttactctagacgacgaataaagccctgttgcttgagtgtacgtaccgc

SEQ ID NO: 231 - DNA, 1400 bp, Homo sapiens; identical to SEQ ID NO: 230

SEQ ID NO: 232 - DNA, 600 bp, Homo sapiens
aatctttcatggagaaaagcttatgaacaccaacttaatattcataatggttgagagcaaagggacatgtccatgtgacacacgactgctcatacaagcggagcagacttctgacggtccaaatccttgtgacatggttaagcaacctagataccgaaaagggcctgatgtctgctttgataacaatgtcttggaggattatactgactgtggtggtgtttctggattaaatccctccctgtggtatatcattggaatccagtttctactactttggctggtatctggcagcacacaccggctgttatgaccttctaaaaaccaaatctgcatagttaaactccagaccctgccaaaacatgagccctgccctcaattacagtaacgtagggtcagctataaaatcagacaaacattagctgggcctgttccatggcataacactaaggcgcagactcctaaggcacccactggctgcatgtcagggtgtcagatccttaaacgtgtgtgaatgctgcatcatctatgtgtaacatcaaagcaaaatcctatacgtgtcctctattggaaaatttgggcgtttgttgttgcattgttggt

SEQ ID NO: 233 - DNA, 600 bp, Homo sapiens
ttcactaggactacagctgagggagtagctcgtgtccgcaaatccaagggcaaatttgcctttctcctggagtccactatgaatgawwacattgagcagcgaaagccatgtgacacgatgaaagtgggaggaaatctggattccaaaggctatggagtagcaacgcccaagggttcctcattaagaactcctgtaaaccttgccgttttgaaactcagtgaggcaggcgtcttagacaagctgaaaaacaaatggtggtacgataaaggtgaatgtggacccaargactctggaagcaaggacaagacgagtgccttgagcctgagcaatgtagcaggcgtcttctacattctggttggcggcttgggcttggcaatgctggtggctttgatagagttctgttacaagtccagggcagaagcgaagagaatgaagctgaccttttctgaagccataagaaacaaagccagattatccatcactgggagtgtgggagagaatggccgcgtcttgacgcctgactgcccaaaggctgtacacactggaactgcaatcagacaaagttcaggattggctgtcattgcatcggacctaccataa

SEQ ID NO: 234 - DNA, 600 bp, Homo sapiens
catgcttttcatgtactamcagatttacaaggcygccaggaaragygckgccwaacacargttwcctggcttccctcgagtggagccagacagcagtmrtcrccctgaatggcayagtgaagytccagaaggaggtggaagagtgtgcaaacctttcgagactcctcaagcatgaaaggaaaaaayatctccatctttaagcgrraacagaaagcagcsacyaccytggggatcatcgtckgggcctyyaccrtgtgctggcygccmtttttcctcctctcgacagccagacccttctrtctrtggcactkcctgcagctgcatcccactgtgggtggagaggayatttcyrtggctrggctatgcaaactctctcattaacccttttatwtatgccttcttcaacygggacctgaggaccacctatygcagcckgctccagtgccagtaccrgaatatcaaccrgamrctctcagctgcaggcatgcatgaagccctgaagcttgctgagaggccagagagacctgagtttgtsctacaaaaykctgactactgtagaaaaaaargtcatgattcatgattgaaagcagaacaatggag

SEQ ID NO: 235 - DNA, 1400 bp, Homo sapiens
catttagtgaaatcctcattcctctacaatcagtcatgatacctacacttccatcaattctgggtacccatgctaaccatgctagccatgaaccatttcctggacattgggcctatattgcagggtttgatgatatggtggaaattcttgcttctcttcagaaaccaaagaagatttctttaaaaggctcagatggaaagttctacatcatgatgtgtaagccaaaagatgacctgagaaaggattgtagactaatggawttsaawtccytkakywmtwagtkcttwwkrmargatscakmgwytcgwakwmgagmacktcakattcgaacatatgcagttattccactaaatgatgaatgtgggattattgaatgggtgaacaacactgctggtttgagacctattctgrccaaactatwtwaagaaaagggagtgtwtwtgacaggaaaagaacttcgccrgtgtatgcywccaaagkcagcarctttatctgraaaactcaaagtattccgagaatttctyctgcccaggcatcctcctatttttcatgagtggtttctgagaacattccctgatcctacatcatggtacagtagtagatcagcttactgccgttccactgcagtaatgtcaatggttggttatattctggggcttggagaccgtcatggtgaaaatattctctttgattctttgactggtgaatgcgtacatgtagatttcaattgtcttttcaataagggagaaacctttgaagttccagaaattgtgccatttcgcctgactcataatatggktaatggaatgggtcctatgggaacagagggtctttttcgaaragcatgtgaarktacaatgaggctgatgcstgatcagcgagagcctttaatgagtgtcttaaagacttttctacatgawccycttgkggaatggrgtaaaccagtgaaagggcattccaaagcgccmctgaatgaaactggaraarttgtcaatgaaaaggccaaracccwtgttcttgacattgagcagcgactacaaggtgtaatcaagactcgaaatagagtgacaggactgccgttatctattgaaggacatgtgcattaccttatacargaagctactgatgaaaacttactatgccagatgtatcttggttggactccatatatgtgaaatgaaattatgtaaaagaatatgttaataatctaaaagtaawrmawwwrrwawraawmtgtggttgtatctgttcaattctaaagtacaacataaatttacgttctcagcaactgttatttctctctgatcattaattatatgtaaaataatatacattcastyrtkmmgaaataaactgctttcttaataaaaaaaaaaaaaaaaaaaaaaaaaaaaaaaaaa

SEQ ID NO: 236 - DNA, 1225 bp, Homo sapiens
gcggctctctgatccagcccgggagaggaccgagctggaggagctgggtgtggggtgcgttgggctggtggggaggcctagtttgggtgcaagtaggtctgattgagcttgtgttgtgctgaagggacagccctgggtctaggggagagagtccctgagtgtgagacccgccttccccggtcccagcccctcccagttcccccagggacggccacttcctggtccccgacgcaaccatggctgaagaacaaccgcaggtcgaattgttcgtgaaggctggcagtgatggggccaagattgggaactgcccattctcccagagactgttcatggtrctgtggctcaagggagtcaccttcaatgtyaccaycrttgacaccaaraggcrgaccragayagtgcaraagctgtgcccaggrgggcagctcccattcctgctgtatggcaykgaagwrcacamrgacaccaacaagattgaggaatttctggaggcagtgctgtgccctcccaggtaccccaagctggcagctctgaaccctgartccaacacagctgrgcwggacatatttgccaaattttctgcytacatcaagaattcaaacccagyastcaatgacaatctggagaagggactcctgaaagccctgaaggttttagacaatyacttrayatccysccwcycagaagaagtggatgaaaccagtgctgaagatgaaggyrtctctcagaggaagtttytggatggcaaygagctcaccctggctgactgcaacctgttgcyaamgytmcacatagtacaggtggtgtgtaagaagtaccggggattcaccatcccygaggccttccrgggmgtgcakcrgtacttgagcaatgcctaygcycrggaagaatyygcytccacctgtccagatgatgaggagatcragctcrcctatgagcaagkrkcmaaggccctcmaataagcccctcytgggactccytcarccccctccattttctccacaaaggccctggtggtttccacattgctacccaawggacacactccaraatggccagtgggcagggaatcctggagcacttgtyccgggatggtgtggtggaagaggggatragggaaagaaatrgggrgcctggrtsagatttttaytgtggggtgggrtgrgtaggacaacatatttcagtartaaaatacagaataaaawtcaagtgtttttaaaaaaaa

SEQ ID NO: 237 - DNA, 1225 bp, Homo sapiens; identical to SEQ ID NO: 236

SEQ ID NO: 238 - DNA, 600 bp, Homo sapiens
agcgagggcggcccctctgttctggtggccccagctgtgactgagggcctggtcaccacaattagagcttgatgcctcccggctttgcagggagaccaggcttcccaaaccaagtgccttgagctgcctgctctgcagcccacagaggacagtgctgaccccaggaagtgggagaagtggcccctcgtgacctacagggaactgggaagatgctggccccaaaagccttacggtcatgatgtctgcaaaggagggcctcagagacagcgcgagtagcacccccagccatctactggataaacttgcttcagactttttaaattcctgcttaatgtcagtctacaggcctttcaggaagggagaggagggaatcgtacattttgcttgcgtgctgggacagctaggctgagatgcaccaagtacagccttcactggagaccggaattgagaggtgggggatgctgaggagggggaggacggagttcagagggtgtcgtcctgcagtatgagatttctcattgatcacagatgtgcccagagtagcccaggtcactgttaactagtgtttctgcagaggcagcaggagccagcccggaattc

SEQ ID NO: 239 - DNA, 600 bp, Homo sapiens
cttctgcctataccctggggtaagtggagttgggaaatacaagaagagaaagaccagtggggatttgtaagacttagatgagatagcgcataataaggggaagactttaaagtataaagtaaaatgtttgctgtaggttttttatagctattaaaaaaaatcagattatggaagttttcttctatttttagtttgctaagagttttctgtttctttttcttacatcatgagtggactttgcattttatcaaatgcattttctacatgtattaagatggtcatattattcttcttcttttatgtaaatcattataaataatgttcattaagttctgaatgttaaactactcttgaattcctggaataaaccacacttagtcctgatgtactttaaatatttatatctcacaggagttggttagaatttctgtgtttatgtttatatactgttatttcactttttctactatccttgctaagttttcatagaaaataaggaacaaagagaaacttgtaatggtctctgaaaaggaattgagaagtaattcctctgattctgttttctggtgttatatctttattaaatattcagaaaaattc

SEQ ID NO: 240 - DNA, 600 bp, Homo sapiens; identical to SEQ ID NO: 239

SEQ ID NO: 241 - DNA, 1400 bp, Homo sapiens
tcggctggagtcgggctttacggcgccggatggctctggacgtgaagtctcgggcaaagcgtkrwsagaagctggactkccttggggmkkkacagtttgccacsgtttacaaggccagagataagaataccaaccaaattgtcrccattaagaaaatcaaacttggacatagatcagaagctaaaratggtataaayagaacmgccttaagagagatamaattattacargagctaagtcatccaaatataattggtctccttgatgcwwwwgsayrkarrwmtwatawwakycwwgwckwtgdtwkwatggaaactgatctagaggttataataaaggataatagtcttgtgctgacaccrtcacacatcaaagcctrcatgttgatgactcttcaaggattagaatatttacatcaacattggatcctacatagggatctgaaaccaarcaacttgttgctagatgaaaatggagttctaaaactggcagattttggcctggccaaatcwtttgggagccccartagagcttatacayatcaggttgyaaccaggtggtatcrggccccygagttactatttggagctaggatgtatggtgtaggtgtggacatgtgggctgttggctgtatattagcagagttacttctaagggttccttttttgycaggagattcagascttgatcagctaacaagaatatttgaaactttgggcacaccaactgaggaacagtggccggacatgtgtagtcttccagattatgtgacatttaagagtttccctggaatmccwtkgcatcacatcttcagtgcagcaggagacgacttactagatctcatacaaggcttattcttatttaatccatgtgytcgaattacggccacacaggcactgaaaatgaagtatttcagtaatssgccagggccaacacctggatgtcagctgccaagaccmaactgtccagtggaaaccttaaaggagcaatcaaatccmkstttggcrayaaaaaggaaaagaacasaggccttrgaacaaggaggattgcccaagaaactaattttttaaagagaacactggacaacattttactactgagggaaatagccaaaaaggcaaataatggaaaaatagtaaacattaagtaaatgctgtagaagtgagtttgtaaatattctacacatgtaaaatatgtaaaactatgggttatttttattaaatgtattttaaaataaaaatttaattctggtttttctgattagagtscmaaagtgagaaaagttcaatactcttgaaatgtagaattgaaaatgcattagggaaaacttaataaaaattattaccagttatttggaarawmwrammmatatagtatcacaaatctgtagtagcatgggt

SEQ ID NO: 242 - DNA, 1400 bp, Homo sapiens; identical to SEQ ID NO: 241

SEQ ID NO: 243 - DNA, 600 bp, Homo sapiens
tgatgtctgaatctgaatggaggaatcttggcgttcagcagagtcagggatgggtccattatatgatccatgaaccagaacctcacatcttgctgttccggcgcccactacccaagaaaccaaagaaatgaagctggcaagctacttttcagcctcaagctttacacagctgtccttacttcctaacatctttctgataacattattatgttgccttcttgtttctcactttgatatttaaaagatgttcaatacactgtttgaatgtgctggtaactgctttgcttcttgagtagagccaccwccaccatagcccagccagatgagtgctctgtggacccacagcctaagctgagtgtgaccccagaagccacgatgtgctctgtatccaraacacacttggcagatggaggaagcatctgagtttgagaccatggctgttacagggatcatgtaaactysctgtttttgtttttttctgccgggtgttgtatgtgtggtgacttgcggatttatgtttcagtgtactggaaactttccattttattcaagaaatctgttcatgttaaaagccttgattaaagaggaagtttttataat

SEQ ID NO: 244 - DNA, 600 bp, Homo sapiens; identical to SEQ ID NO: 243

SEQ ID NO: 245 - DNA, 600 bp, Homo sapiens
ttgagggcttgttggccactgccagcagctgtttctggaaatggctgtaggtggtgttgagaaagaatgagcattgagacacggtgctcgcttctcctccaggtatttgagttgttttggtgcctgcctctgccatgcccagagaatcagggcaggcttgccaccggggaacccagccctggggtatgagctgccaagtctattttaaagacgctcaagaatcctctggggttcatctagggacacgttaggaatgtccagactgtgggtgtaggttacctgccacttccaggacgcagagggccaagagagacattgcctccacctctcctgaatacttatctgtgaccacacgctgtctcttgagatttggatacactctctagctttaggggaccatgaagagactctcttaggaaaccaatagtccccatcagcaccatggaggcaggctccccctgcctttgaaattcccccacttgggagctgatatacttcactcacttttctttattgctgtgatagtctgtgtgcacaatgggcaattctgacttctcccatctagtggaaatgagcgaaatcatggttgtagtgatcttg

SEQ ID NO: 246 - DNA, 1400 bp, Homo sapiens
acttcagaaaaagcctacagcttgggagacttgcccatgaaacttcaacgaataagttcagttccgggcaactcagaagaaaaactggtatctaaaaccaccaagatgttatctgatcccatgagccagtctgtggctgatttgccaccaaagcttcaaaagatggctggaggagcagctaggatggaagggaaccttccagccaaattaagaaaaatgaactctgatcgcttcacataacaaagcactcccttaggcattatttaatgtttgatttagtaatagtccaatatttggcgatgaggtaattctccctaaggaatctgaaagtatattttcctcccagttctacaagcatatttcgagaacccttcctttcccaagtattgcgaatgtgcagaaagcaacagttacggagggaggacatcataaggaagttattaacgggcatgtattatcacatcaagcatgcaataatgtgcaaattttgcatttagttttatggcatgatttatatatggcatatttatattgtatattctggaaaaaaaaatatatatatatatttaaaggggagatactctccctgacatttctaacatatgtattaagccaaacatgagtgaatagctttcagggcgataaaactaaatatatgtctgtgtgtgtgtgtgtatgtatacacacatatacatatatatatacacatacatacacatacatacatacatacatatatatctgataaaattgtgatgttttgttcaaagttgtagttcttgtgcatgtttactttattagagtaggaaggctactggcattaattattaataccaaatattttagccttaaatttttgtcattttaaaatctgatttaatgttttctgctgtttaaggtcttgggaggctttcaattgtattttatatgagagaatcacacaagtttgtgctatctatggccctgcaaaaatataaccattacatgtttaaattgtaaattttagagcataccagtactcagtatagcattgaacatttcttatgatttttaaaagttgctagtactggggagaaataattgttgattaatttgagaattattcctttcctagactaattaaaatctggaaatctgttttgtatatgatctaatacaaagatgagctctgaacaaacactgaatcatgttaatagacagtagccaagttatattgaatatatcagaatctgtgtgaagttacacaattaattgtccctgtttcaaactgagtaaattggaaacattttctttctttttctggaaattttgtccattttaaaaaccaatcattttaagaagacatgacaatgcaatgaaacagatgataaatatttatgcttaaaataaaaaaaaaaaaa

SEQ ID NO: 247 - DNA, 1400 bp, Homo sapiens; identical to SEQ ID NO: 246

SEQ ID NO: 248 - DNA, 600 bp, Homo sapiens
gaaagaagatgccaggaaggacttaaagtttgtcagtgacgttgagaaggaaatggaaaccctcgtggaggccgtgaataagggaaagaatagtaagaaaagccacagcttccctcccatgaacagagaccaccgccggatcatccatgacttggcccaagtttatggcctggagagcgtgagctatgacagtgaaccgaagcgcaatgtggtggtcactgccatcagggggaagtccgtttgtcctcctaccacgctgacaggtgtgcttgaaagggaaatgcaggcacggcctccaccaccgattcctcatcacagacatcagtcagacaagaatcctgggagcagtaatttacagaaaataaccaaggagccaataattgactattttgacgtccaggactaagaagatcatgatgcacttagataaaagaatgattaggtatagtggagacttatttgccagcagataaatcatgcccgttcccctctgcctggcagaatcacagtctcacatactgtcttgtactgacacatccaaagcatgagtgtgtcagaaatcccttgtctattcctgtctgtataaagtgtttcakkatg

SEQ ID NO: 249 - DNA, 600 bp, Homo sapiens; identical to SEQ ID NO: 248

SEQ ID NO: 250 - DNA, 1400 bp, Homo sapiens
cttcaatgtacttgactacagggccacattcttggccttatctgactatatccagtttaaacctagaagtgtctctcatctagcacacatccaaagtacagaaagtaaatagtagctgataagaaagttagtcacatggctgtggaggtttgaaagagattgcaatcatacatatttgtatcagctgatccagcacgtgatatagacctcgacaggtggtgttcaattcatttgacattcatgcagtcattcatcaactcattctattcataatgacagtgtacagaggcctcaaactgggttacaaatgtgaggtcacagtctactcggggaagtacataaatttacattaaacataaatggacctaactcatcaattaaaaagtaatgttcaacatactgattaaaaaataaaatatagatagatgtatttaaagagacacgatgaaagcacaggaatatataaagcttgaaattaaaaagagaaacagacatatttggaaaatactaaatattttaagtgaaatattgctgcaatgacatcaggtaaaagatatttcaaaacgggtgaaaggagtgatgtcaacaagatggtggaatcgacagttgtatctctcatccaccaacatacagactaatttatcaaccatccacagatgaaaatacctttgtgagagctccagaatccaagtgaaagtttatagcaccctggtagtacacagaagtagaaaaaacaccatattgaacattgtagaaaaaactctgtcacattacctgaatcacccctcacccaagccagcacagagtagcacaaagagagatcccctcatctcatgagttcttccataagtaaaaaagaaaataaaacatatgtacaacttcccctgactttcaggatgctaaccaagaggaccacttctgtcatgcctcaccaagaatactgaggcaattcacatggccagacccctctgagtagctaagaacaagaaaaaaaaaaaaataagaaaatggttgggagctcttaatagtcagtatgtgtattttaacaactggggccttgcaccctacagtgggcctgtgcatggtgcccagaagctggcccatccacccacatccccaagcactaggcctgcctgcccatagaccctgccaactggccagcccagaatatctggctaagctgactggtgaaaaacagttcctatcaaattggactttccctatcaaaaccagcctgtaaagactaaaagagatgactgcttcttcaaatgtgcaaacacaaatgtgaagctacaggaaacacaaggaatcaaggaaacttagcaaagccaaaggaacaaaataaagcttcagaaaccatcaaagaaatggagaaatatgaactgcctgacaaagaattc

SEQ ID NO: 251 - DNA, 600 bp, Homo sapiens
aactggcgcgcacggggggagttctgggcattaagatcggctgggtgtgcgacttggacaaggcctgggaccagtgcatccccaaatactccttcacccggctcgacagcgtttctgagaaaagcagcgtgtccccaggctacaacttcaggtttgccaagtactacaaaatggaaaatggcagtgagtaccgcaccctcctgaaggcttttggcatccgcttcgacgtgctggtatacgggaatgctggcaagttcaacatcatccccaccatcatcagctctgtggcggcctttacttctgtgggagtgggaactgttctctgtgacatcatcctgctcaacttcctcaagggggccgaccagtacaaagccaagaagtttgaggaggtgaatgagactacgctgaaaatcgcggctttgaccaacccagtgtaccccagcgaccagaccacagcggagaagcagtccaccgattcgggggccttctccataggccactagggcctctttccagggccccacactcacaaaggctccaggcctccccacagaggaccctgcctgagcaagggggcatgggaaatcgaattcctgctgt

SEQ ID NO: 252 - DNA, 1400 bp, Homo sapiens
ccttgttgggctgcaktcttgctttcagacagaaagcagattgttctttgttatagagtatgtaaaysgwssrgamytmmygkktcrtayscagcgmcaaagaaaacttcctgaagaacatgccagattttactctgcagaaatcagtctagcattmaattatcttcatgagmgagggataatttatagagatttgaaactggacaatgtattactggactctgaaggccacattaaactcactgactacggcatgtgtaaggaaggattacggccaggagatacaaccagcactttctgtggtactcctaattacattgctcctgaaattttaagaggagragattatggtttcagtgttgactggtgggctcttggagtgctmatgtttgagaygatggcaggaaggwctccatttgataytgttgggagctccgataaccctgaccagaacacagaggattmtctcttccaagttattktggaaaaacaaattcrcataccacgttctctgtctgkaaaagctgcaagtgttctgaagagttttcttaayaaggaccctaagraacgaytgggttgtcatcctcaaacaggatttgctgatattcagggacacccgttcttccraaatgttgattgggatatgatggagcaaaaacaggtggtayctccctttaaaccaartatttctggggaatttggtttggacaactttgattctcagtttactaatgaacctgtcyrgctcactccagatgwcgatgacattgtgagraagattgatcagtctgaatttgaaggttttgagtatatcaatcctcttttgatgtctgcagaagaatgtgtctgatcctcatttttcaaccatgtattctactcatgttgccatttaatgcatggataaacttgctgcmagcctggatacaattaaccattttatatttgccacctacaaaaaaacacccartatcttctctygtagactayatgaatcaattattacatctkwyyyrswatgaaaaawaaattaatactactagcttccagacaatcatgtcaaaatttagttgaactggtttttcagtttttaaaaggcctacagatgagtaatgaagttaycttttttgtttaaaaaaaaaamarasactgcattaaaaaagtatctgttgcattaaggcacatagtgggattacatcataaacctcccataatttttgtcattctgtgttaaatcatttcagggtttaattttgaaataaaagattaatataaaatgcaacaactttttatattacctattagttttggagttctttatgtttaaaaattcaggtgtaaattttattgccttggataaataaattattgatcctttttaaggcagcagttattaaattggt

SEQ ID NO: 253 - DNA, 1400 bp, Homo sapiens; identical to SEQ ID NO: 252

SEQ ID NO: 254 - DNA, 1400 bp, Homo sapiens
cagagtcatcgggcgcgggasstacgccaaggttctcctggtgcggttgaagaagaatgaccaaatttacgccatgaaagtggtgaagaaagagctggtgcatgatgacgaggatattgactgggtacagacagagaagcacgtgtttgagcaggcatccagcaaccccttcctggtcggattacactcctgcttccagacgacaagtcggttgttcctggtcattgagtacgtcaacggcggggacctgatgttccacatgcagaggcagaggaagctccctgaggagcacgccaggttctacgcggccgagatctgcatcgccctcaacttcctgcacgagagggggatcatctacagggacctgaagctggacaacgtcctcctggatgcggacggrcacatcaagctcacagactacggcatgtgcaaggaaggcctgggccctggtgacacaacgagcactttctgcggaaccccgaattacatcgcccccgaaatcctgcggggagaggagtacgggttcagcgtggactggtgggcgctgggagtcctcatgtttgagatgatggccgggcgctccccgttcgacatcatcaccgacaacccggacatgaacacagaggactaccttttccaagtgatcctggagaagcccatccggatcccccggttcctgtccgtcaaagcctcccatgttttaaaaggatttttaaataaggaccccaaagagaggctcggctgccggccacagactggattttctgacatcaagtcccacgcgttcttccgcagcatagactgggacttgctggagaagaagcaggcgctccctccattccagccacagatcacagacgactacggtctggacaactttgacacacagttcaccagcgagcccgtgcagctgaccccagacgatgaggatgccataaagaggatcgaccagtcagagttcgaaggctttgagtatatcaacccattattgctgtccaccgaggagtcggtgtgaggccgcgtgcgtctctgtcgtggacacgcgtgattgaccctttaactgtatccttaaccaccgcatatgcatgccaggctgggcacggctccgagggcggccagggacagacgcttgcgccgagaccgcagagggaagcgtcagcgggcgctgctgggagcagaacagtccctcacacctggcccggcaggcagcttcgtgctggaggaacttgctgctgtgcctgcgtcgcggcggatccgcggggaccctgccgagggggctgtcatgcggtttccaaggtgcacattttccacggaaacagaactcgatgcactgacctgctccgccaggaaagtgagcgtgtagcgtcctgaggaataaaatgttccgatgaaaaaaaaaa

SEQ ID NO: 255 - DNA, 600 bp, Homo sapiens
tggtccagacactggaacagtatgagttctgctacraggtggtgcaggagtatattgatgcattctcagattatgccaacttcaagtaagcggcaacaagggtccgtggaccaggaggattgcctttaatattttgtaatattctgttttgttaatataccccaaattgtgtatatatcttataactgttttagaaattggtacataggcttctattacctattaggtggaaattttatatgtaaatgtgttagcactgatagtcctttttccaatgttttattggggaattaaatagtgtgatgtttggattgatatcgtgaaatcctcagccgagaaattgggctggattgygctttggttaatacatctttccctaaagaagataaacacaaaatccattccaggtagctcggcaccaactaagaaaaaaagcacaaagttctcagagctctcgaggaaagtggttgtccccgtaccaccatgcactgtaaatatccctcccctctctccctggtcccctcccccatccccaccactgatatcatggggagtaataggaccagagcggtatctctggcaccacactagcccgaattc

SEQ ID NO: 256 - DNA, 600 bp, Homo sapiens; identical to SEQ ID NO: 255

SEQ ID NO: 257 - DNA, 1400 bp, Homo sapiens
ctgcgtctcttgctgggaagtggagcctttggagaagtgtatgaaggaacagcagtggacatcttaggagttggaagtggagaaatcaaagtagcagtgaagactttgargaagggttccacagaccaggagaagattgaattcctgaaggaggcacatctgatgagcaaatttaatcatcccaasattctgaagcagcttggagtttgtctgctgaatgaaccccaatacattatcctggaactgatggagggaggagaccttcttacttatttgcgtaaagcccggatsgcaacgttttatggtcctttactcaccttggttgascttgtagacctgtgtgtagatatttcaaaaggctgtgtctacttggaacggatgcatttcattcacagggatctggcagctmgaaattgccttgtttccgtgaaagactataccagtccacggatagtgaagattggagactttggactcgccagagacatctataaaaatgattactatagaaagagaggggaaggcctgctcccagttcggtggatggctccagaaagtttgatggatggaatcttcactactcaatctgatgtatggtcttttggaattctgatttgggagattttaactcttggtcatcagccttatccagctcattccaaccttgatgtgttaaactatgtgcaaacaggagggagactggagccaccaagaaattgtcctgatgatctgtggaatttaatgacccagtgctgggctcaagaacccgaccaaagacctacttttcatagaattcagraccaacttcagttattcagaaattttttcttaaatagcatttatmagtscagagatgaagcaaacaacagtggagtcataaatgaaagctttgaaggtgaagatggcgatgtgatttgtttgaattcagatgacattatgccagttgytttaatggaaacgaagaaccgagaagggttaaactatatggtacttgctacagaatgtggccaaggtgaagaaaagtctgagggtcctctaggctcccaggaatctgaatcttgtggtctgaggaaagaagagaaggaaccacatgcagacaaagatttctgccaagaaaaacaagtggcttactgcccttctggcaagcctgaaggcctgaactatgcctgtctcactcacagtggatatggagatgggtctgattaatagcgttgtttgggaaatagagagttgagataaacactctcattcagtagttactgaaagaaaactctgctagaatgataaatgtcatggtggtctataactccaaataaacaatgcaacgttcctgatttctaatcttggttctgagagccatttggtttcagttgtagcaatccccataccagctgcctgcc

SEQ ID NO: 258 - DNA, 600 bp, Homo sapiens
attcactgtataaacttttttttatgaaaaaaatggcatcaaccaccatggatttttacaagatccatttgcctttctgggagcagaaacagccattgcggccccaggaggggaactgagtcacgctggggctctctgagactctttagagcagctttgggatcccaccctggggacccccaygattggccacctgtagccatctgcacacacctccgagacagtccagtgtcacctctctcagagcatctggctgtttagcagaactcattctatccccaatcagctccttttccgttctgttctgctgggagttctagaaccacttcctgctacaggaggggtctcatgtcctgctggcttccagcttcaggcaccagcatccaccttggctctgccagtggatcccctrcggtcaggctgggcagccccagagagaggatgtggaaagcactttttggctgacttcatctggggttggcaacaggacagagttcacaggaggccagtgggcgggccatgagggacagggtcttttttcatttcttcctcagctggttactcagggttcatctgtccatggcctttctaatggaattc

SEQ ID NO: 259 - DNA, 600 bp, Homo sapiens
tcactactctgggaaatggtttgtcttcaagatgcaatacttttcttagwwaaggaaaaacagcataaaaagatacctggtctgccttgtacaagaaaaccgaatattagaggaagaaaatttaaagaaaagctagagaaaaaaaaaattttttaaaaaatacttattagaagcaaactgcccttgcatggaaaactgtttatttttttcagtgaaaaaggaattctgctttcgtgtttttgggaaagcaggaactgagttcattacatctttaatttggcagaaattagcctttctgtgaaccagatgtggtttggggcagatctgtagtaaacaatggtgattttatttatttttactctctggaaaaggagataatacaattccagaaagtgaactcatatttctaaggtaagatcccttttatgcacctagaatatgctatgcacagagcgggtgcttgagttgttgtcgttttttgtttgttttttaaatgtaaactggtaaattttgtgcttatcttcaaggctggcttaagtataaaattgttttttaaacacttgaaaaattaaaggatttgttttatattaaaaaaaaaaa

SEQ ID NO: 260 - DNA, 600 bp, Homo sapiens; identical to SEQ ID NO: 259

SEQ ID NO: 261 - DNA, 1400 bp, Homo sapiens
ttctaccagaggcagcaccggctgcccgagccctcctgcccacagctggccacactcaccagccagtgtctgacctatgagccaacccagaggccatcattccgcaccatcctgcgtgacctcacccgsstgcagccccacaatcttgctgacgtcttgactgtgaaccsggactcaccggccgtcggacctackrytttccacaagcgctatttgaaaaagatccgagatctgggcgagggtcacttcggcaaggtcagcttgtactgctacgatccgaccaacgacggcactggcgagatggtggcggtgaaagccctcaaggcagactgcggcccccagcaccgctcgggctggaagcaggagattgacattctgcgcacgctctaccacgagcacatcatcaagtacaagggctgctgcgaggaccaaggcgagaagtcgctgcagctggtcatggagtacgtgcccctgggcagcctccgagactacctgccccggcacagcatcgggctggcccagctgctgctcttcgcccagcagatctgcgagggcatggcctatctgcacgcgcassactacatccaccgagacctagccgcgcgcaacgtgctgctggacaacgacaggctggtcaagatcggggactttggcctagccaaggccgtgcccgaaggccacgagtactaccgcgtgcgcgaggatggggacagccccgtgttctggtatgccccagagtgcctgaaggagtataagttctactatgcgtcagatgtctggtccttcggggtgaccctgtatgagctgctgacgcactgtgactccagccagagcccccccacgaaattccttgagctcataggcattgctcagggtcagatgacagttctgagactcactgagttgctggaacgaggggagaggctgccacggcccgacaaatgtccctgtgaggtctatcatctcatgaagaactgctgggagacagaggcgtcctttcgcccaaccttcgagaacctcatacccattctgaagacagtccatgagaagtaccaaggccaggccccttcagtgttcagcgtgtgctgaggcacaatggcagccctgcctgggaggactggaccaggcagtggctgcagagggagcctcctgctccctgctccaggatgaaaccaagagggggatgtcagcctcacccacaccgtgtgccttactcctgtctagagaccccacctctgtgaacttatttttctttcttggccgtgagcctaaccatgatcttgagggacccaacatttgtaggggcactaatccagcccttaaatcccccagcttccaaacttgaggcccaccatctccaccatctggtaataaactcatgttttctctgmwrrraaaaa

SEQ ID NO: 262 - DNA, 600 bp, Homo sapiens
cyytctmtgatgataacacttggagctattacatagtttatccagtaaaatattgatattaatattggaatattattctaaattatttcctcaccatccttttgttgaaatggcatcgtacataatttttcaatatgtagtggagatgaagcatagctgagtagttgaactagggaagagggtcttggtgacctggctaagacctcctgtttgtcttcccaaggtgatcttggaaaaatgtagtttaagaacaactgttttaaatggtcttcatgccccacattcttaaattatcacaggattttgttatgttactcagaattttgctttgattgtagaatcatttttgtttaattaaaaaaatttttaaattttttgtttatttttattttctatttcgcacagggtctcactctgttgcccaggctggagtgcagtggcacaatcgtggctcactgtaacctcaaccttctggactcaagggattctcctgcctcagcctcccaagtagctagactacaggcatgcaccactacgcccagctaattttaagatttttttgtagagatgaggtctccctaagtttctcaggctggtctt

SEQ ID NO: 263 - DNA, 600 bp, Homo sapiens; identical to SEQ ID NO: 262

SEQ ID NO: 264 - DNA, 942 bp, Homo sapiens
atggaggggaaaaatctgaccagcatctcagaatgtttcctcctggggttctctgagcagctggaggagcagaagcccctctttgggtccttcctgttcatgtacttggtcacggtggcaggcaacctcctcatcattctagtcatcattactgacactcaactccatacccccatgtacttctttctagccaacctctcccttgcagatgcctgctttgtgtccaccacagtccctaagatgctggcaaacatacagatccagagtcaggccatctcctactcagggtgtctactacagttgtattttttcatgttatttgtgatgctggaggcattcctcttggcggtcatggcctatgactgctacgtggccatatgccacccacttcattacattctgatcatgagccctgggctcygcatcttcctcgtgtctgcatcctggatcatgaatgccctccactcccttctacacacacttctgatgaacagcctgtccttctgcgcaaaccatgagatcccacacttcytctgtgacatcaatcccctcctgrgtctgtcctgcacagaccccttcaccaatgagctggtgatcttcatcactgggggtctcacaggactcatttgtgtgctttgcctgattatctcttacacgaacgttttctcgaccatcctgaagatcccatcagctcaggggaagcggaaagccttttccacctgcagctctcatctctccgtggtctctctcttctttgggacttcyttttgtgttgatttcagttctccctcaacccactcggcccagaaggacacagttgcatcagtgatgtacacagtggtaactccaatgttgaatccctttatctacagtttgaggaaccaagaaataaagtcttccctgagaaagttaatctgggttcggaaaattcattccccttag

SEQ ID NO: 265 - DNA, 1400 bp, Homo sapiens
atccaccctttaaaagcattgatgaattaattagaactttagacaacaaagaaaaattgaaaaagaattctcagtaaaagcgaattcgatgttcaaaacaaactacaaagagacaagacttctctgtttactttctaagaactaatataattgctaccttaaaaaggaaaaaatgaacagcacatgtattgaagaacagcatgacctggatcactatttgtttcccattgtttacatctttgtgattatagtcagcattccagccaatattggatctctgtgtgtgtctttyctgcaascmaagaaggaaagtgaactaggaatttacctcttcagtttgtcactatcagatttactctatgcattaactctccctttatggattgattatacttggaataaagacaactggactttctctyctgccttgtgcaaaggragtgcttttctcatgtacatgaakttttacagcagcacagcattcctcacctgcattgccgttgatcggtatttggctgttgtctaccctttgaagttttttttcmtaaggacaagaagawttgcactcatggtcagcctgtccatctggatattggaaaccatcttcaatgctgtcatgttgtgggaagatgaaacagttgttgaatattgcgatgccgaaaagtctaattttactttatgctatgacaaataccctttagagaaatggcaaatcaacctcaacttgttcaggacgtgtacaggctatgcaatacctttggtcaccatcctgatctgyaaccggaaagtctaccaagctgtgcggcacaataaagccacggaaaacaaggaaaagaagagaatcataaaactacttgtcagcatcacagttacttttgtcttatgctttactccctttcatgtgatgttgctgattcgctgcattttagagcatgctgtgaacttcgaagaccacagcaattctgggaagcgaacttacacaatgtatagaatcacggttgcattaacaagtttaaattgtgttgctgatccaattctgtactgttttgtwaccgaaacaggaagatatgatatgtggaatatattaaaattctgcactgggaggtgtaatacatcacaaagacaaagaaaacgcatactttctgtgtctacaaaagatactatggaattagaggtccttgagtagaaccaaggatgttttgaagggaagggaagtttaagttatgcattattatatcatcaagattacattttgaaaaggaaatctagcatgtgaggggactaagtgttctcagagtgatgttttaatccagtccaataaaaatatcttaaaactgcattgtacagctccctccctgcgttttattaaatgatgtatattaaacaaagatcaatatttt

SEQ ID NO: 266 - DNA, 1350 bp, Homo sapiens
gctgcagccctcagaagtaagcaaggtttcctgccgggagaaaaggatttgaagcattccagccaaaatgacggacagaagccccttcgaaaccgacatgctcaccctgacccgctacgttatggaaaaggggcgtcaggccaaagggactggggagctcacccagctgctgaactcaatgctgacggccatcaaagccatctcctcggctgtgcgcaaggccggtctggcccacctgtatggaatcgcaggaagcgttaacgtgacgggagatgaggtgaagaaactggatgtgctatccaattccctggtgatcaacatgstccaatcctcctatagtacctgcgtcctggtctcagaagagaataaggacgccatcatcaccgccaaggagaagcgggggaaatacgtggtctgctttgacccactggatggatcttccaatattgactgcctggcctccatcggaaccatctttgccatctatagaaagacctcagaggatgagccttctgaaaaggatgccctgcagtgtggccgcaatattgtggccgcaggttatgcgctgtacggtagtgcaaccctggtggctctctccacagggcaaggcgtggacctcttcatgcttgacccggctcttggtgaatttgtcctggtggaaaaagatgtcaagattaagaagaaaggaaagatttacagcctgaatgagggctatgccaagtattttgatgcggccaccactgaatatgtgcagaaaaagaaattccctgaggtgagtgaagaaagccaggatggcagtgctccctatggggccaggtatgtgggctccatggtggctgacgtgcaccgcaccctggtctatggaggaatcttcctgtacccagccaaccagaagagccctaagggcaagctccggctcctgtatgaatgcaatcccgtggcctacatcattgagcaggcaggaggcttggcgaccacggggacccagcctgtactggacgtgaagcccgaggcaattcaccagcgagtccccctcattctggggtcaccagaggatgtgcaggaatatctcacctgtgtgcagaaaaatcaggcaggcagctagcgagtttgaccccacatgccctcttctgtttgttttgcaccttgtctaaggaccctaaatgaacgataaacagagatggtagctatgagtatgcaaaaggtaaatccacttaatcacatacagaagagcaacaacaaactgcttacgacaggtttggaagccacaggcgattctatggtcaatgtgaaggactagaaataaaaacccacatgtggaaaaaaaaaaaaaaaaaaaaaaaaaaaaaa

SEQ ID NO: 267 - DNA, 1400 bp, Homo sapiens
acccgcaagcatgcccaccactgccacaaacgccgcaccaggtcttgtagcagcgcctcctcgagaagccaacagagcagtaagcgcacaggccggagtgtggaagatgacaaggagggtcacctggtgtgccggatcggcgattggctccaagagcgatatgagattgtggggaacctgggtgaaggcacctttggcaaggtggtggagtgcttggaccatgccagagggaagtctcaggttgccctgaagatcatccgcaacgtgggcaagtaccgggaggctgcccggctagaaatcaacgtgctcaaaaaaatcaaggagaaggacaaagaaaacaagttcctgtgtgtcttgatgtctgactggttcaacttccacggtcacatgtgcatcgcctttgagctcctgggcaagaacacctttgagttcctgaaggagaataacttccagccttaccccctaccacatgtccggcacatggcctaccagctctgccacgcccttagatttctgcatgagaatcagctgacccatacagacttgaaacctgagaacatcctgtttgtgaattctgagtttgaaaccctctacaatgagcacaagagctgtgaggagaagtcagtgaagaacaccagcatccgagtggctgactttggcagtgccacatttgaccatgagcaccacaccaccattgtggccacccgtcactatcgcccgcctgaggtgatccttgagctgggctgggcacagccykgtgacgtctggagcattggctgcattctctttgagtactaccggggcttcacactcttccagacccacgaaaaccgagagcacctggtgatgatggagaagatcctagggcccatcccatcacacatgatccaccgtaccaggaagcagaaatatttctacaaagggggcctagtttgggatgagaacagctctkacggccggtatgtgaaggagaactgcaaacctytgaagagttacatgytccaagactycctggagmacgtgcagctgtttgacctgatgaggaggatgttagaatttgaccctgcccagcgcatcacactggccgaggccctgctgcaccccttctttgctggcctgacccctgaggagcggtccttccacaccagccgcaacccaagcagatgacaggcacaggccaccgcatgaggagatggagggcgggactgggccgcccagccccttgactccagcctcgaccgccagccccaggccagagccacccaatgaacagtgcaatgtgaaggaaggcaggagcctgcaggggagcagacttggtgcccagctgccagaaagcacagatttgacccaagctatttatatgttataaagttataataaagtgtttcttactgtttgta

SEQ ID NO: 268 - DNA, 1400 bp, Homo sapiens; identical to SEQ ID NO: 267

SEQ ID NO: 269 - DNA, 1400 bp, Homo sapiens
catgtattcagcatccttacttcgtctgagccagcctgctgcaggtggggtacttacctgtgaggcagagttgggcgttgaggcttgcagactcacagacactgacgctgccattgcagaagatccaccagatgctattgctgggctccaagcagaatggatgcagatgagttcacttgggactgttgatgctccaaacttcattgttgggaacccatgggatgataagctgattttcaaacttttatctgggctttctaaaccagtgagttcctatccaaatacttttgaatggcaatgtaaacttccagccatcaagcccaagactgaatttcaattgggttctaagctggtctatgtccatcaccttcttggagaaggagcctttgcccaggtgtacgaagctacccagggagatctgaatgatgctaaaaataaacagaaatttgttttaaaggtccaaaagcctgccaacccctgggaattctacattgggacccagttgatggaaagactaaagccatctatgcagcacatgtttatgaagttctattctgcccacttattccagaatggcagtgtattagtaggagagctctacagctatggaacattattaaatgccattaacctctataaaaatacccctgaaaaagtgatgcctcaaggtcttgtcatctcttttgctatgagaatgctttacatgattgagcaagtgcatgactgtgaaatcattcatggagacattaaaccagacaatttcatacttggaaacggatttttggaacaggatgatgaagatgatttatctgctggcttggcactgattgacctgggtcagagtatagatatgaaactttttccaaaaggaactatattcacagcaaagtgtgaaacatctggttttcagtgtgttgagatgctcagcaacaaaccatggaactaccagatcgattactttggggttgctgcaacagtatattgcatgctctttggcacttacatgaaagtgaaaaatgaaggaggagagtgtaagcctgaaggtctttttagaaggcttcctcatttggatatgtggaatgaattttttcatgttatgttgaatattccagattgtcatcatcttccatctttggatttgttaaggcaaaagctgaagaaagtatttcaacaacactatactaacaagattagggccctacgtaataggctaattgtactgctcttagaatgtaagcgttcacgaaaataaaatttggatatagacagtccttaaaaatcamamwrwaaatatgaatctgctcactttaaacctgtttttttttcatttattgtttatgtaaatgtttgtyaaaaataaatcccatggaatatttccatgtaaaaaaaaaaaaaaaaaa

SEQ ID NO: 270 - DNA, 1400 bp, Homo sapiens
cagttccctgggcgggaagatccccatccgctggactgccccagaggccatagcctatcggaagttcacttctgctagtgatgtctggagctacggaattgtcatgtgggaggtcatgagctatggagagcgaccctactgggacatgagcaaccaggatgtcatcaatgccgtggagcaggattaccggctgccaccacccatggactgtcccacagcactgcaccagctcatgctggactgctgggtgcgggaccggaacctcaggcccaaattctcccagattgtcaataccctggacaagctcatccgcaatgctgccagcctcaaggtcattgccagcgctcagtctggcatgtcacagcccctcctggaccgcacggtcccagattacacaaccttcacgacagttggtgattggctggatgccatcaagatggggcggtacaaggagagcttcgtcagtgcggggtttgcatcttttgacctggtggcccagatgacggcagaagacctgctccgtattggggtcaccctggccggccaccagaagaagatcctgagcagtatccaggacatgcggctgcagatgaaccagacgctgcctgtgcaggtctgacaccggctcccacggggaccctgaggaccgtgcagggatgccaagcagccggctggactttcggactcttggacttktggatgcctggccttaggctgtgkcccagaagctggaagtttgggaaaggcccaagctgggacttctccaggcctgtgttccctccccaggaagtgcgccccaaacctcttcatattgaagatggattaggagagggggtgatgacccctccccaagcccctcagggcccagaccttcctgctctccagcaggggatccccacaacctcacacttgtctgttcttcagtgctggaggtcctggcagggtcaggctggggtaagccggggttccacagggcccagccctggcaggggtctggccccccaggtaggcggagagcagtccctccctcaggaactggaggaggggactccaggaatggggaaatgtgacaccaccatcctgaagccagcttgcacctccagtttgcacagggatttgtcctgggggctgagggccctgtccccacccccgcccttggtgctgtcataaaagggcaggcaggggcaggctgaggagttgcccgttgccccccagagactgactctcagagccagagatgggatgtgtgagtgtgtgtgtgtgtgtgtgcgcgcgcgcgcgcgtgtgtgtgtgcacgcactggcctgcacagagagcatgggtgagcgtgtaaaagcttggccctgtgccctacagtggggacagctgggccgacagcagaataaaggcaataagatgaa

SEQ ID NO: 271 - DNA, 600 bp, Homo sapiens
rtgtcagaagctggraacgtgtgtccrggctctgggcacagtgctgccccttgcaagccatarcgtgcccccaagagtgtagggggccttgcsgaagccayagggggctgcasgggatgygtgggaggcagaarcctatctcagggagggaaggggrtgsaggccasagtctcccagtgggtgatgcttttgctgctgcttaatcctaccccctcttcaragcagagtgggacttggagagcaaaggcccatgcycccttygctcctcctctcatcatttgcaytgggcattagtgyccssccttgaagcaataactccaagcagrctccagcccctggacccctggggtggccagggcttccccatcagctcccamcsagcctcctcagggggtaggagagcactgcctctatgccctgcagagcaataacactatatttatttttgggtttggccagggaggcgcagggacatggggcaagccagggcccagagcccttggctgtacagagactctattttaatgtatatttgctgcaaagagaaaccgcttttggttttaaacctttaatgagaaaaaaatatataataccgagctc

SEQ ID NO: 272 - DNA, 1400 bp, Homo sapiens
caggcgctgcggcttgatgagacccaggaggcagagttccaggcccttcggcagcagcttcaacaggagctggagctgctcaacgcttaccagagcaagatcaagatccgcacagagagccagcacgagagggagctgcgggagctggagcagagggtcgcgctgcggcgggcactgctggagcagcgggtggaagaggagctgctggccctgcagacaggacgctccgagcgaatccgcagtctgcttgagcggcaggcccgtgagatcgaggccttcgatgcggaaagcatgaggctgggcttctccagcatggctctggggggcatcccggctgaagctgctgcccagggctatcctgctccaccccctgccccagcctggccctcccgtcccgttccccgttctggggcacactggagccatggccctcctccaccaggcatgccccctccagcctggcgtcagccgtctctgctggctcccccaggccccccaaactggctggggccccccacacaaagtgggacaccccgtggcggagccctgctgctgctaagaaacagcccccagcccctgcggcgggcagcctcggggggcagtggcagtgagaatgtgggcccccctgctgccgcggtgcccgggcccctgagccgcagcaccagtgtcgcttcccacatcctcaatggttcttcccacttctattcctgaggtgcagcggggaggagcagatgagctgggcagggcaggggtgggtggagcctgaccctggagggcactgagctggaggcccctgcaagggtaggggacaagatgtaggctccagctcccctcagacctcctcatctcatgagcttcttggggctggccagtggcccagggccagcttggcgatagatgcctcaaggctgcctgggagccccgcctccctaccatggtgccaggggtctccctccgccacctaggaaaggagggagatgtgcgtgtcaaatattcatctagtcccctgggggaggggaagggtgggtctagacatactatattcagagaactatactaccctcacagtgaggccctcagacctgccacagggcagagcaggtctggggcctgaggcagggagaatgagaggccaccttactggcaggaaggatcaggatggggtcttggggtcaggatgcctgggtctcttcccgtaactgtctgacgtcctgtgccgtcttgtcctttatcttttttttttttttttaattgggatcagggctggggcggggaaacaagggaaggaccttggaaggggctgctcccaggcctggggggcagtcgtgggagcccctctcagctgtggggctggcacagagccccaggcaagcttttaataaactgttggttattctaac

SEQ ID NO: 273 - DNA, 600 bp, Homo sapiens
cggtcctgtttccgctgcccttatctcaaagtccgtggctgtttccccttcactgactcagctagacccgtaagcccacccttcccacagggaacaggctgctcccacctgggtcccgctgtggccacggtgggcagcccaaaagatcaggggtggaggggcttccaggctgtactcctgccccgtgggccccgttctagaggtgcccttggcaggaccgtgcaggcagctcccctctgtggggcagtatctggtcctgtgccccagctgccaaaggagagtgggggccatgccccgcagtcagtgttggggggctcctrcctacagggagagggatggtggggaaggggtggagctgggggcagggcagcacagggaatatttttgtaactaactaactgctgtggttggagcgaatggaagttgggtgattttaagttattgttgccaaagagatgtaaagtttattgttgcttcgcagggggatttgttttgtgttttgtttgaggcttagaacgctggtgcaatgttttcttgttccttgttttttaagagaaatgaagctaagamaaaagaaaaaaaaaaaaaaaaaaactcgag

SEQ ID NO: 274 - DNA, 600 bp, Homo sapiens; identical to SEQ ID NO: 273

SEQ ID NO: 275 - DNA, 600 bp, Homo sapiens
gaggtggtcacactgtggtaccgcccaccggatgtcctctttggggccaagctgtactccacgtccatcgacatgtggtcagccggctgcatctttgcagagctggccaatgctgggcggcctctttttcccggcaatgatgtcgatgaccagttgaagaggatcttccgactgctggggacgcccaccgaggagcagtggccctctatgaccaagctgccagactataagccctatccgatgtacccggccacaacatccctggtgaacgtcgtgcccaaactcaatgccacagggagggatctgctgcagaaccttctgaagtgtaaccctgtccagcgtatctcagcagaagaggccctgcagcacccctacttctccgacttctgtccgccctaggccccgggacccccggcctccaggctgggcctggcctatttaagcccctcttgagaggggtgagacagtgggggtgcctggtgcgctgtgctcagcagtgctgggccagccggggtggggtgcctgagcccgaatttctcactccctttgtggactttatttaatttcataaattggctcctttcccacaaaaaaaaaaag

SEQ ID NO: 276 - DNA, 1400 bp, Homo sapiens
gccatggcggccgaggcgacagctgtggccggaagcggggctgttggcggctgcctggccaaagacggcttgcagcagtctaagtgcccggacactaccccaaaacggcggcgcgcctcgtcgctgtcgcgtgacgccgagcgccgagcctaccaatggtgccgggagtacttgggcggggcctggcgccgagtgcagcccgaggagctgagggtttaccccgtgagcggaggcctcagcaacctgctcttccgctgctcgctcccggaccacctgcccagcgttggcgaggagccccgggaggtgcttctgcggctgtacggagccatcttgcagggcgtggactccctggtgctagaaagcgtgatgttcgccatacttgcggagcggtcgctggggccccagctgtacggagtcttcccagagggccggctggaacagtacatcccaagtcggccattgaaaactcaagagcttcgagagccagtgttgtcagcagccattgccacgaagatggcgcaatttcatggcatggagatgcctttcaccaaggagccccactggctgtttgggaccatggagcggtacctaaaacagatccaggacctgcccccaactggcctccctgagatgaacctgctggagatgtacagcctgaaggatgagatgggcaacctcaggaagttactagagtctaccccatcgccagtcgtcttctgccacaatgacatccaggaagggaacatcttgctgctctcagagccagaaaatgctgacagcctcatgctggtggacttcgagtacagcagttataactataggggctttgacattgggaaccatttttgtgagtgggtttatgattatactcacgaggaatggcctttctacaaagcaaggcccacagactaccccactcaagaacagcagttgcattttattcgtcattacctggcagaggcaaagaaaggtgagaccctctcccaagaggagcagagaaaactggaagaagatttgctggtagaagtcagtcggtatgctctggcatcccatttcttctggggtctgtggtccatcctccaggcatccatgtccaccatagaatttggttacttggactatgcccagtctcggttccagttctacttccagcagaaggggcagctgaccagtgtccactcctcatcctgactccaccctcccactccttggatttctcctggagcctccagggcaggaccttggagggaggaacaacgagcagaaggccctggcgactgggctgagcccccaagtgaaactgaggttcaggagaccggcctgttcctgagtttgagtaggtccccatggctggcaggccagagccccgtgctgtgtatgtaacacaataaacaagctkc

SEQ ID NO: 277 - DNA, 600 bp, Homo sapiens
agcgtggtctacgtcatagaattctcaggggacatctcccacagccagggcaccaatgggacctgctacctggagttcyggaaggaccagctagccatcctcctgcccgtgcggctggagatggctgtggtcctctttgtggtcccgctgatcatcaccagctactgctacagccgcctggtgtggatcctcggcagagggggcagccaccgccggcagaggagggtggcggggctgktggcggccacgctgctcaacttccttgtctgctttgggccctacaacgtgtcccatgtcgtgggctatatctgcggtgaaagcccggyrtggaggatctacgtgacgcttctcagcaccctgaactcctgtgtcgacccctttgtctactacttctcctcctccgggttccaagccgactttcatgagctgctgaggaggttgtgtgggctctggggccagtggcagcaggagagcagcatggagctgaaggagcagaagggaggggaggagcagagagcggaccgaccagctgaaagaaagaccagtgaacactcacagggctgtggaactggtggccaggtggcctgtgctgaaarctag

SEQ ID NO: 278 - DNA, 600 bp, Homo sapiens
caatggctaaacagtatcaagtactgcagaatttatcactgaaatggataagaggaaatagtttagtcacaggtttttacagtccagcaagggccaaagaggtatagtatacaagttaatagtatttgtgttgagcaacatggggctagtgggatcacagaaatctggaaaaaaaaaaaaaaaggctttggcttatcaagcctagtgtaaatttctgcatctcacacgactttagtttggccaggtatttatctgccaaaacaaggacaaatcttgttgtattaacagcagggtcacttctcattttctttgctgacttacctttttactgaccgttgtgaatttctgtctcaaaatgtataatatagaaatgcaagaaaaaaacaaatgtacagattgtaaagttttttgatacctaatgtaagttttctttgtgtaatatttatatgataaaagacattaggatccctacaaaaaaaaaaaaaaaaaaaaaaaaaaaaaaaaaaaaaaaaaaaaaaaaaaaaaaaaaaaaaaaaaaaaaaaaaagggatcgacaattacgactccccgggggggcccggtccaattcccccaaaaggg

SEQ ID NO: 279 - DNA, 600 bp, Homo sapiens
ctgcctcagcctccsgagtagctgggactgcaggcacsgccaccacgcctggctaattttttgtatkwtkagtagagaaggtgtttcaccgtgttrgccaggatggtcttgatctcctgacatcgtgatctgtmtgcctcggactcccaaagtgctgggatkacagstgtgagccaccgcacytggcytaaaccagatttctttagggcacaattttttctggaatctcactcttgtttttcacagtaattttaaaaacgtttctactccaattaagaatatatatgatgttattatatatgcttatgaaacagatttatgagaaaagttttttttaaataaattatttaatcctarmwmwwwrwwawwmammagctttttaaaaaagtgtttgaaaattatacattctcgactttggggattagtttattcttgtggcatcattataaggcttaattgtggaaagctaagtacttgcttctattccttccaatgagagattataacataaactattaaaattattctgctaatatacctagatttttatttttaggtctctgtccattgcttttaattaaaattatctgttttcaaatc

SEQ ID NO: 280 - DNA, 600 bp, Homo sapiens; identical to SEQ ID NO: 279

SEQ ID NO: 281 - DNA, 1400 bp, Homo sapiens
  misc_feature (1399)..(1399): n is a, c, g, or t
ttcgtgggcacccccttctggatggcacctgaggtcatcaagcagtcggcctacgacttcaaggctgacatctggtccctgggsatcacagccatcgagctsgccaagggggagcctccaaactctgacctccaccccatgcgcgtcctgttcctgattcccaagaacagcccacccacactggagggccagcacagcaagcccttcaaggagttcgtggaggcctgcctcaacaaagacccccgattccggcccacggccaaggagctcctgaagcacaagttcatcacacgctacaccaagaagacctccttcctcacggagctcatcgaccgctataagcgctggaagtcagaggggcmtggcgaggagtccagctctgaggactctgacattgatggcgaggcggaggacggggagcagggccccatctggacgttcccccctaccatccggccgagtccacacagcaagcttcacaaggggacggccctgcacagttcacagaagcctgcggassccgtcaagaggcagccgaggtcccagtgcctgtccacgctggtccggcccgtyttcggagagctcaaagagaagcacaagcagagcggcgggagcgtgggtgcgctggaggagctggagaacgccttcagcctggccgaggagtcctgccccggcatctcagacaagctgatggtgcacctggtggagcgagtgcagaggttttcacacaacagaaaccacctgacatccacccgctgaagcgcactgctgttcagataggggacggaaggtcgtttgtttttgttctgagctccataagaactgtgctgacttggaaggtgccctgtgctatgtcgtgcctgcagggacacgtcggatcccgtgggcctcacatgccaggtcaccaggtcaccgtctccttccacccctgcagtgtgctgttgtgcacgtcaggacgctgttctctatgccactgcctcctccctctcctggcccagcagtattgctcacgggggctccagccgccggcgtggccctcatgagctacgcctgggtcttctgcagactcatgcagccctatggccgctcagaccaaggcgcagagcaactatcagggcatgctctgcctcctcctcccattgaggtggggagaggcaacagggcagcccccagaggagtgtcctggccgctgtctcccgggcccatgatggccatagatttgccttgtggtgttssatcaggtactgtgtctgctcataagtacttgtgtcatccagaatgttttgttttttaagaaaattgaattacttgtttcctgaaawawwmwgaggttaatatgttagttttcatagaacattgagaggcccctgccactttcaataaagacctgacttggagnc

SEQ ID NO: 282 - DNA, 1400 bp, Homo sapiens
tcaccagcactgctcacttaggactttctggatccagacccaggcagcgcacactggactcttgaggaagaaggagactctaattttggattccttggtggaggaaaataaaacactctggtcttgccgccaacgatgcaagtgtgactgctggcgtcttcatgagctccagaggtcacagcacgctaccaaggactctcatggcccctcggatgatttccgagggagacataggaggcattgctcaaatcacctcctctctattcctgggcagaggcagtgtggcctccaatcggcacctcctccaggctcgtggcatcacctgcattgttaatgctaccattgagatccctaatttcaactggccccaatttgagtatgttaaagtgcctctggctgacatgccgcatgcccccattggactgtactttgacaccgtggctgacaagatccacagtgtgagcaggaagcacggggccaccttggtgcactgtgctgcaggggtgagccgctcagccacgctgtgtatcgcgtacctgatgaaattccacaacgtgtgcctgctggaggcrtacaactgggtgaaagcccggcgacctgtcatcaggcccaacgtaggcttctggaggcaactgatagactacgagcgccagctctttgggaagtcgacagttaaaatggtacagacaccttatggcatagttcccgacgtctatgagaaggagtcccgacacctgatgccttactgggggatttagtgccactgaagcctgcgtcagcagcccgagcggggccggcatctgctccccgccgtctgctccctctccactctcttctcaaatggctgacttctggttctccctcaagtgttttttacactgggtgttcaaatttattttaagagatagggagggaggggacataaagggaatgcatacattgctagtcacatttttaaaattaacattttggaatagtgtttatggaaatctttagcttttaatcatttttaccaatttgaacagtttaataaactggttctgctctcttctgaatctcatgcctttggcaccttggtaggtgcaggaggagctcagtgcaaaaatcactttggggcctcattaaccctttagagacaagctttgccccaggctgcggaccagacagatgcttagggaaggttgataaccagcttcagtctctactggattagccctactctttcctttcccctccattatttagtgactctgtaagtaagttaaatacacccttattatttagctgttaagtaactataatgaaatctgctgcaaaatctctcttggaatccatgtgcccaggattatattagcattatttttaataaatctatatgcttaamawawwaaaaaaaaaaa

SEQ ID NO: 283 - DNA, 600 bp, Homo sapiens
yttctgycccsaycrgcagrtrgatgaytttkwhtgtgaggtcccakctctrattsgactctcctgtgragayacctcctacaatgaratccagdtggctgtkkccagtgtcwtcwtcktggytgtgcctctcagcctcatccttgyctmttayggagccaytrccyrggcagtgctraggaytaactcygcmamagsryrgagraargcytttgggacctgctcctcccatctcactgtggtcaccctcttctacagctsagtcattgctgtctacctccagcccaaaaatccstatgcccaagrgaggggcaagttctttggtctcttctatgcagtgggcactccttcacttaaccctctcrtatacaccctgaggaacaaggagrtaamsmgrgcaytcaggagrttrctrgggaaggaaatgrgrctcasrsaaagctgagggagagctgcttaatgtgctttaaaagagaggagattctatgtgcttttatcagaaagtttgagttccctgcccctctgccttcttcacacccattacattgtgggaatggatgaaagccacatgtctgtgtgtgtgcatgtatgtgtgcaaga

SEQ ID NO: 284 - DNA, 600 bp, Homo sapiens; identical to SEQ ID NO: 283

SEQ ID NO: 285 - DNA, 600 bp, Homo sapiens
taaaagtgatccatgttggacataattgagtttttaaatcagtttattgggttctagggctgtagaacacatagatactagatttttaatttgttcatggttattctacatttctagaaagttcttatcagcaagatggtcccataagsaaatttcttgtggtttgtmcagatttgttaaaatgtgaacgttttctaactgcctcgtagggtagaaaccaatatttttcaggatgctgtatttcactcctgtaaggactttttctttattgtcacattcataatgctgatacttacatgtaagttgttcatgttgcagaaaaaggttatacgtaccacggattctctttaatattgtacagttaaactgtatttctgatgttgcaagccattttgttttttcattgkacatagacacattgtctctttaaaatgctgctgaaattgtagagagtatagccaaaacagtaataaacaatgacagktaaaatgtaaagactatgaaaattacattggaagggagctttcaagatggtaggatattgactaactgagctccttcacttaaaaatcagctgrataaattccttaagtatacttc

SEQ ID NO: 286 - DNA, 600 bp, Homo sapiens; identical to SEQ ID NO: 285

SEQ ID NO: 287 - DNA, 600 bp, Homo sapiens
tcctgttctgataaagattgcctgtggtgaaaagggttctaacgagctcacactctctgtggtatgcatttttatgttagctgtcccactatgcttaattcttgcttcctatgctagtattggaagtgctgtatttaagatcaaatcttccaagggaaggaaaaaggcctttgggacatgctcctcccatcttattgtagttttcttattttatggcccagccatcagcatgtaccttcagcccccctcctccatctcaagggatcaacccaagttcatggccctcttctatggagtggtgactccctcactcaacccttttatctacaccctgcggaataagaatgtaaagggggcattacgcaacttggtgaggagcatttcagctttaagtgatagtgggtagacataaaatgaagttattgaacagttagagtaggttgctatggttttatctaacaaattattgtctcataatcaaatatcgctttacatgttcttgcaaaatatgttatgtctccagagctctttgtaaacatgttcagcaaggattatacttggcatagtggcacattatattatggaaatatattaaaatag

SEQ ID NO: 288 - DNA, 600 bp, Homo sapiens; identical to SEQ ID NO: 287

SEQ ID NO: 289 - DNA, 600 bp, Homo sapiens
gtgacatctgtattcaggttacccttctgtgctagaaaggtgccccacttcttctgtgacatccgccctgtgatgaagctctcctgcattgacaccactgtcaatgaaatcctgactttgattatcagtgtgctggtgcttgttgtacctatgggtctggttttcatttcttatgttctcattatctctacaatcctcaagattgcttcagttgagggccggaagaaggcttttgccacctgtgcatcccacctcactgtggtcattgtccactacagctgtgcctccattgcctacctcaagcccaagtcagagaacaccagagaacatgaccagctgatctcggtgacctacactgtcatcactcccctactgaaccctgtggtatacaccctgagaaataaagaggtcaaagatgctctgtgcagggctgttggtgggaagttttcctgaccatgtaggaagagttctcctgaggctgtcaacatccacactaggcaggaatatgaggtgtaaactcacaaacacttggctcctagagacctgccccttaaataagaggcaaaagaggaatagcagtttcatacaactgggagtctg

SEQ ID NO: 290 - DNA, 600 bp, Homo sapiens; identical to SEQ ID NO: 289

SEQ ID NO: 291 - DNA, 954 bp, Homo sapiens
atgggaacagataaccagacttgggtgagtgaatttattctcctcggcctgtccagtgactgggacactcgggtctccctgtttgtcctgttcttggtcatgtatgtggtgaccgtgctggggaactgtctcattgtccttctgatcagactggacagccgactccacactcccatgtatttctttctcaccaacctctcccttgtcgatgtctcctrtgccacaagtgtagtccctcagctgctggcacattttcttgcagaacataaagccaycccattccagagctgtgcagcccagttatttttctccctggccttgggtgggattgagtttgttctcctsgcggtgatgrcctatgaccgctatgtggctgtgtgtgatgccctscgatactcggccatcatgcatggagggctgtgygctaggttggccatcacatcctgggtcagtggcttcatcagctctcctgtgcagactgcyatcacctttcagctgcccatgtgcagaaacaagtttattgatcacatatcctgtgaactcctagctgtggtcaggctggcttgtgtggacacctcctccaatgaggtcaccatcatggtgtctagcrttgttcttctgatgacacccytctgcctggttcttttgtcctacatccagatcawctccaccatcctaaagatccagtccagagaaggaagaaagaaagctttccacacgtgtgcctctcacctcacagtggttgccctgtgctatggtgtggccattttcacttacatccagccccactccagtccctctgtccttcaggagaagttgttctctgtcttttatgccattttaacaccaatgctgaaccccatgatttacagcctaaggaataaagaggtgaagggggcctggcagaaactattatggaaattctctgggttaacatcaaagctggcaacttga

SEQ ID NO: 292 - DNA, 954 bp, Homo sapiens; identical to SEQ ID NO: 291

SEQ ID NO: 293 - DNA, 1400 bp, Homo sapiens
atagaaaccagtcttcaggatatcgacagcagattatctccaggtggatcactggcagacgcatgggcacatcaagaaggcactcatccgaaagacagaaatgtagaaaaactacaagtcctgttaaattgcatgacagagatttactatcagttcaaaaaagacaaagcagaacgtagattagcttataatgaagaacaaatccacaaatttgataagcaaaaactgtattaccatgccacaaaagctatgacgcactttacagatgaatgtgttaaaaagtatgaggcatttttgaataagtcagaagaatggataagaaagatgcttcatcttaggaaacagttattatcgctgactaatcagtgttttgatattgaagaagaagtatcaaaatatcaagaatatactaatgagttacaagaaactctgcctcagaaaatgtttacagcttccagtggaatcaaacataccatgaccccaatttatccaagttctaacacattagtagaaatgactcttggtatgaagaaattaaaggaagagatggaaggggtggttaaagaacttgctgaaaataaccacattttagaaaggtttggctctttaaccatggatggtggccttcgcaacgttgactgtctttagctttctaatagaagtttaagaaaagtttccgtttgcacaagaaaataacgcttgggcattaaatgaatgcctttatagatagtcacttgtttctacaatycagtatttgatgtggtcgtgtaaatatgtacaatattgtaaatacataaaaaatatacaaatttttggctgctgtgaaratgtaattttatcttttaacatttataattatatgaggaaatttgacctcagtgatcacgagaagaaagccatgaccgaccaatatgttgacatactgatcctctactctgagtggggctaaataagttattttctctgaccgcctactggaaatatttttaagtggaaccaaaataggcatccttacaaatcaggaagactgacttgacacgtttgtaaatggtagaacggtggctactgtgagtggggagcagaaccgcaccactgttatactgggataacaatttttttgagaaggataaagtggcattattttattttacaaggtgcccagatcccagttatccttgtatccatgtaatttcagatgaattattaagcaaacattttaaagtgaattcattattaaaaactattcatttttttcctttggccataaatgtgtaattgtcattaaaattctaaggtcatttcaactgttttaagctgtatatttctttaattctgcttactatttcatggaaaaaaataaatttctcaattttaaaaaawwwttttataaaaaaaaaaaa

SEQ ID NO: 294 - DNA, 600 bp, Homo sapiens
aactgagctataatatggagctttcataaaaatgggatgcattgaggacagaactagtgatgggagtatgcgtagctttgatttggatgattaggtctttaatagtgttgagtggcacaaccttgtaaatgtgaaagtacaactcgtatttatctctgatgtgccgctggctgaactttgggttcatttggggtcaaagccagtttttcttttaaaattgaattcattctgatgcttggcccccatacccccaaccttgtccagtggagcccaacttctaaaggtcaatatatcatcctttggcatcccaactamcaataaagagtaggctataagggaagattgtcaatattttgtggtaagaaaagctacagtcattttttctttgcactttggatgctgaaatttttcccatggaacatagccacatctagatagatgtgagctttttcttctgttaaaattattcttaatgtctgtaaaaacgattttcttctgtagaatgtttgacttcgtattgacccttatctgtaaaacacctatttgggataatatttggmwwwaaagtaaatagctttttcaaagtgcaaaaaaaaaaaa

SEQ ID NO: 295 - DNA, 600 bp, Homo sapiens; identical to SEQ ID NO: 294

SEQ ID NO: 296 - DNA, 1400 bp, Homo sapiens
gagtatttgtagaarggagacagcagtatttttctgacttatttaacattttagatactgccattattgtgattcytctgctggttgatgtcrtttacattttttttgacattaagttgcttaggaatattcccagatggacacatttasttcgacttctacgacttattattctgwtaagaatttttcatctgyttcatcaaaaaagacaacttgaaaagctgatragaaggckggtttcagaaaacaaaaggcgatacacaagggatggatttgacctagacctcacttacgttacagaacgtattattgctatgtcatttccatcttctggaaggcagtctttctatagaaatccaatyraggaagttgtgcggtttctagataagaaacaycgaaaccactatcgagtctacaatctatgcagtgaaagagcttaygatcctaagcacttccataatagggtcrktagaatcatgattgatgatcataatgtccccactctacatsagatggtggttttcaccaaggaagtaaatgagtggatggctcaagatcttgaaaacatcgtagcgattcactgtaaaggaggcamagrwagaacmggractatggtttgtgccytccttattgcctcygaaatatkttyaactgcmraggaaagcctrtattattttggagaaaggcgaacmrataaaacccacagcrawaaatttcagggagtagaaactccttctcagaakagatatgttgsatattttgcacaagtgaaacatctctacaactggaatctccctccaagacggatactctttataaaamrmttcattatttattcgattcstsgtkatgtaygtgatctaaaartccaartagwaatggagaaaaaggttgtcttttccastayttcattaggaaawtgttcgrtacttgcatracattrmaacagacaaaatattaattratgtatwygacggtccacctctgtatgatgatgtgaaagtgcagtttttctmttcgaatcttcctamatactatgacaattgyycattttwcttctggttsmacacrtcttttattsaaaataacaggctttrtctaccaaraaatgaattggataatcyacataaacaaaaagcayggaraatttatccaycagawtttgcygtggagatactttttggcgagaaaatgacttccartgatgttgtagctggatccgaytaagtatagctcccccttccccttctgggaaagaattatgttctttccaaccctgccacatgttcatatatcctaaatctatcctaaatgttcccttgaagtatttatttatgtttatatatgtttatacatgttcttcaataaatctattacatatatataaaaaaaaaaaaaaa

SEQ ID NO: 297 - DNA, 1400 bp, Homo sapiens; identical to SEQ ID NO: 296

SEQ ID NO: 298 - DNA, 1400 bp, Homo sapiens
aaccttgcctcatagcttaaagtataaaaaaagattcaagagcagtgaggtttgttctttccagtgaatggtggactgagtggtgcgaggtggagggctaacaagaggaaagaactacattcttcagaatacagtgatgaaaattcattttgaaactcaaatattttcattttggatattctcctgtttttattaaaccagtgattacacctggccatccctctaaatgttctaggaaggcatgtctattgtgattttgatgaagacagaattatttttctctgtagaaacacagataccactttatcagggaagttagtcaaatgaaatggaaattggtaaatggacaaaagctagctagtaaaaaggacgacccagcaacatgctttaaccccattgtatgtttgtggaaagagcatagtttaacatcttgagaaatttgggacataaagttttcatggtagacagttcatgcagtatatgaattgacataatggaaataatctgattttatttttacaactaacatccattccccttcatttaaacaccttttgtgttttacttcagtgaggagattggagtctgaatggatctgttttccaagagattctgagaaatttttgtattcagcagttggaaagctctctattctagttgataaaacttcccttttttgatgtagatgcagatattctatacagttctgttgtcttttactaggactgtaaacttttgtgataaaattcaaataagattttatttctttgtaattttggctttcacaatttatctttaaatccttgagcaatctgtatacaattaagagatttctgacatttattcttacactaaatggatcaactctaggatttaggcatgttaacttctgttgtgttttgaatctctccagagttgcatgtagatagcatttatttctgtgcccttaaacccatttagaaaataactacaaagtaaaaatgtagaggaaatagaaatgtattttttcatgaacattttgatacaaatttcatcatttaatgattcaccaatttcttgcattaatttgaatttaagcatttaattcaaagagaggggagcatccattattggtacatgtgggcttttaaaaactccatcctttataaatagtcaaggtttgggccacacaaagtatatttttatcatggaaaaatttcaactcctcaagccgtaatgttgaacagaattggagtattttctttataatttcttgaacaggcaaatgaaagcttattatagaatgcatgtattttcttttatctttggaacatcagcaccagtatattgctggcagctattgtattaaaaaataaagtatattttcactatcaaaaaaaaaaaaaaaaaaaaaaaaaaaa

SEQ ID NO: 299 - DNA, 600 bp, Homo sapiens
atycagstcagaaagctctcctacattataatgaagaggctgtccagataaatcccaagtgcttttacacacctaagtgccaccaagatagaaatgatttgctcaacagtgctctggacataaaagaattcttcgatcacaaaaatggaacycccttttcatgcttctacagtccagccagccaatctgaagatgtcattcttataaaaaagtatgaccaaatggctatcttccactgtttattttggccttcactgactctgctaggtggtgccctgattgttggcatggtgagattaacacaacacctgtccttactgtgtgaaaaatatagcactgtagtcagagatgaggtaggtggaaaagtaccttatatagaacagcatcagttcaaactgtgcaktakgaggaggagcaaaggaaggagcagagaaatcttaagacggtggccaaattaaagkgctggccttcagatgtctgtgatttctgcaactgaggacctaattatgcctgtctgcaaactaayaatgtaaaasgtaakatrtwamagwmtcakakttwmakrwrrgmaramattkamartttctgatgagcataaac

SEQ ID NO: 300 - DNA, 1400 bp, Homo sapiens
atgacagcttcttaaaactttattgaaaaagactcttgactttttatatacacctatctcaaccatttttttaactgatttttttcctaaatattcttctttacctttaacaaggcataggctgttgcaggacagtggttattaaagcatgggttgaacttccaaaatataaaaatagagccaccatatcaacacttagccctacccattagtatcacccccagttcttacagtaatccctgagaaatctccttcaagcatcaccaaacacagtttgaaaattacagggttagcaaaaagagcctgggctgtatgtagggtggaaacactctgatctgaagcccagctgactccactactaatttgctgtaaagctttggacatacacttagctgctgtgagccactaataacattgggctaatatctgctgtgcttctctgacaggtagtcatgaaaatcaaatgatgcaaaatatatacaagcactttgtaaattgtaaaatgatacaaaatttaaagtttatagagccagttacaaaatcctattagtcatatatttatagattgtgttcacagcaatcatttaaccacaaataaaatatcccttgatgatactgccataatgatatgtccattattagattatgttacatgacaaagttgaaggaatttggcagatgcagttaaggttcctaaacaactcactttgagactgttgaaagggcctgacctaatccaagtgaaccccttgcaagaagaattctccttgtaagccttgaagaagtatgtgagagggccacattggctaaaacctaaaggtggcctctaggagatgagacctaccttccagttgtcagcaagcaggaaaaaaaaattgggacctcagttgcaaccacaaggaactgaattctgccaaaaatctgagtcagcttagaagagtactccaagcttcagatgataaccacagcctgggctgacacctggatttcagctttgcatgatcctcagtatgagaatctatctgttctgtgctggacttctaatatatagaactgtgagataatgggtcacattggctggatgtggtggctcatacctgtaaatcccagcactttgggaggccgaggcaggcagatcacctgaggtcaagagttcaagaccggcctggccaacatggtgaaaccccgtctctactaaaaatacaaaaattagacgagcgtggtggtggacacctgtagtcccagctgcttgggaggctgaggcaggagactagctggaaccagggaggtagaggttgcagtgagctgagatcgtgccactgcactccagcctgggtgacagagtgagactccatcataaataaataaataaataaatgggtcccattaagcctttaaaa

SEQ ID NO: 301 - DNA, 1400 bp, Homo sapiens
ccctgccagccagctccctggactcctgtcccatggcctcctggccggcctctcctttgcagtggggtcctcctctggcctcctgcccctcctgctgctgctgctgcttccattgctggcagcccagggtgggggtggcctgcaggcagcgctgctggcccttgaggtggggctggtgggtctgggggcctcctacctgctcctttgtacagccctgcacctgccctccagtcttttcctactcctggcccagggtaccgcactgggggccgtcctgggcctgagctggcgccgaggcctcatgggtgttcccctgggccttggagctgcctggctcttagcttggccaggcctagctctacctctggtggctatggcagcggggggcagatgggtgcggcagcarggcccccgggtgcgccggggcatatctcgactctggttgcgggttctgctgcgcctgtcacccatggccttccgggccctgcagggctgtggggctgtgggggaccggggkctgtttgcactgtaccccaaaaccaacaaggatggcttccgcagccgcctgcccgtccctgggccccggcggcgtaatccccgcaccacccaacacccattagctctgttggcaagggtctgggtcctgtgcaagggctggaactggcgtctggcacgggccagccagggtttagcatcccacttgcccccgtgggccatccacacactggccagctggggcctgcttcggggtgaacggcccacccgaatcccccggctactaccacgcagccagcgccagctrgggccccctgcctcccrccagccactgccagggactctagccgggcggaggtcacgcacccgccagtcccgggccctgcccccctggaggtagctgactccagcccttccagcccaaatctagagcattgagcactttatctcccacgactcagtgaagtttctccagtccctagtcctctcttttcacccaccttcctcagtttgctcacttaccccaggcccagcccttcggacctctagacaggcagcctcctcagctgtggagtccagcagtcactctgtgttctcctggcgctcctcccctaagttattgctgttcgcccgctgtgtgtgctcatcctcaccctcattgactcaggcctggggccaggggtggtggagggtgggaagagtcatgttttttttctcctctttgattttgtttttctgtctcccttccaacctgtccccttccccccaccaaaaaaagaaaaagacaaacacaaataaaatatctgagcggaactgtgaaaaaaaaaaaaaaaaaraaaaaaaaaaaaaaaaaaaaaaaaaaaaaaaaaaaaaaaaaaaaaaaaaaaaaaaaaaaaaaaaaaaaa

SEQ ID NO: 302 - DNA, 1400 bp, Homo sapiens; identical to SEQ ID NO: 301

SEQ ID NO: 303 - DNA, 600 bp, Homo sapiens
gttaatttgataccagttgagtagaatgtgatcaatccagtttacaatctatcatgagtattattaactaaaatctatgtgcttttcaataggaatcattcttctcttgctgtaacacttgaccttaacttttagaaagtgttcatttttaaactgcaactggaaaggttgaaaagttaggactcttgtatttgtgaactgtaatctgaagcagattatttaaagtgtagaaaaagaaacaagttcttttttgcaaaggtctgtgataccatatttcagctttgtgtaagtaatttgaatatccaaagggttgggatgatcagttctgaatatgcaactgtccacttaataaggacaagtattccagtatctcttatgactgtagtcataaatgatgttggaatgtacattttgtgaaatagttggtatccctttactatgattaatttttgttattccaggaaatacttgtgaagccagccaattaataaagcactttagcatctgttcaggtagttttgaaaaccaacttttccccttcaggataagaacttccaggttacctaaaaatgcaataaaaatctttatagtctaagcttt

SEQ ID NO: 304 - DNA, 600 bp, Homo sapiens; identical to SEQ ID NO: 303

SEQ ID NO: 305 - DNA, 1400 bp, Homo sapiens
tctgtgtctggatggctgccatcttgctgagcataccccagctggttttttatacagtaaatgacaatgctaggtgcattcccattttcccccgctacctaggaacatcaatgaaagcattgattcaaatgctagagatctgcattggatttgtagtaccctttcttattatgggggtgtgctactttatcacagcaaggacactcatgaagatgccaaacattaaaatatctcgacccctaaaagttctgctcacagtcgttatagttttcattgtcactcaactgccttataacattgtcaagttctgccgagccatagacatcatctactccctgatcaccagctgcaacatgagcaaacgcatggacatcgccatccaagtcacagaaagcatcgcactctttcacagctgcctcaacccaatcctttatgtttttatgggagcatctttcaaaaactacgttatgaaagtggccaagaaatatgggtcctggagaagacagagacaaagtgtggaggagtttccttttgattctgagggtcctacagagccaaccagtacttttagcatttaaaggtaaaactgctctgccttttgcttggatacatatgaatgatgctttcccctcaaataaaacatctgcattattctgaaactcaaatctcagacgccgtggttgcaacttataataaagaatgggttgggggaagggggagaaataaaagccaagaagaggaaacaagataataaatgtacaaaacatgaaaattaaaatgaacaatataggaaaataattgtaacaggcataagtgaataacactctgctgtaacgaagaagagctttgtggtgataattttgtatcttggttgcagtggtgcttatacaaatctacacaagtgataaaatgacacagaactatatacacacattgtaccaatttcaatttcctggttttgacattatagtataattatgtaagatggaaccattggggaaaactgggtgaagggtacccaggaccactctgtaccatctttgtaacttcctgtgaatttataataatttcaaaataaaacaagttaaaaaaaaacccactatgctataagttaggccatctaaaacagattattaaagaggttcatgttaaaaggcatttataattatttttaattatctaagttttaatacaagaacgatttccctgcataattttagtacttgaataagtatgcagcagaactccaactatcttttttcctgttttttttaaatttgtaagtaattttataaaatccacctcctccaaaaaagcaataaaaaaaaaacaaactataaaaaaaaaaaaaaaaaaaaaaaaaaaaaaaaaaaaaaaaaaaaaaaaaaaaaaaaaaaaaa

SEQ ID NO: 306 - DNA, 600 bp, Homo sapiens
ctgaatcagtgtactattggctgcagaatttgtttcaattgaaaatagactcaggaagattgctgctcagaatatcatataatgtttattttttgaggtgtttttgtttttatttgtgtgttttttttttttaagtcagcttggaacttttttcctgggtagtatttgggagagggaaaggctgtactatatatttatttctaaatgttttgactgggcatttttcttttaatgaaatatgtggactgctctagcaaaccctattttcagctactatttgaatattcttgaacaccaccactgaagagtttcatatacaccaaataatgtctcatctctatagtacagggaatataaaattggtttcctgtggtcatgatcaagatagtagtattattacacaagaaacttggtctgcagtctggaagcttgtctgctctatagaaatgaaaatgcagcatgcagttgacattgtggaaatgaaagtaattgggtattagaaatctgaaagtactgtcatctaaaagcaattgtgattttattgtaattggttgtcactgttgtacggtgtctagaattaaagaatacatgtaaactttc

SEQ ID NO: 307 - DNA, 1400 bp, Homo sapiens
caaagcagtatattggttccaattagagtttactttttttgtattaatacattgctatttctaaataccactttcctcatctactagtaagattgctagcattgaactgtattatgtggtttttgttgatttggtataaagtttttccaattcatttatattttacaaatgctagatattggtctgggaggcaacattaatggtaccagcctgtcacaactgagcagttctaataatgcagaataaayacatgttgccttaaagggttatctagkatccyttcatcttatttagcactggagcaaatagycaagggaaatcraatcagtaactggtcatggtcatgcatctraaagtgcatggaagatcatttaktactttttcctttttttctcacatggtttgaaacttaaagtgcacatcmctgaaataatgagattttcttytrmggtgtgctacccttyytarastgttctaagaagcaggcagttgatgtatgtttatattttaagtcagctgtcraggggagaccacagccttagtatgacatcctgcacaatttgtgaagcatttattctactgaaggcacagtcttgtttatactttctgcacattcagtgtattggtmatttaaattatttcagttttaacttgtgaaagcttatawtatgatttctggtattttagaaatacattagagtctgtgagtctcattctttaagatacagatgtgtgaacttcaatataaagttgcatttgccaaaatttammmrwrwarmmwrwwaawwwwmwwraaataagttttacatttttggcacataacaacgttttttttaatttgggaggcaagcacaaactaggaagactagctttattatggttttgctttttgattcttgtagctactatattccagactggaaatgtatgaatgataatcaacataatgctgataaactgacataatattatctgtaaaagcattatttggtagtttattataatcatccctctattattcttaaatgccagtagtatttagagatgtgtacctgcttagttaattggctcagaattttaatataaacatcacactttaatttggagcatagtaccatagaaatttggggttctaaatatacaacttgtaagaagaatggtttacactaacattatgacaaaactagaaaaagttattatttttgtttgctttctgttgttttgtttattggttggtttttgtgaagtttattttttttttggtatttgataattaagattaggaatctaataacacagaattccatattgctatagtacttctgtaaagagaatatcaatataaataaggaaaataaatcaatgaaatgtttcaatggttaaaaaaaaaaaaaaaaaaa

SEQ ID NO: 308 - DNA, 1400 bp, Homo sapiens; identical to SEQ ID NO: 307

SEQ ID NO: 309 - DNA, 600 bp, Homo sapiens
cctaccacgtggtgaacctggctgaggcgggccgcgcgctggccggccaggccgccgggttagggctcgtggggaagcggctgagcctggcccgcaacgtgctcatcgtactcgccttcctgagcagcagcgtgaaccccgtgctgtacgcgtgcgccggcggcggcctcgtgcgctcggcgggcgtgggcttcgtcgccaagctgctggagggcacgggctccgaggcgtccagcacgcgccgcgggggcagcctgggccagaccgctaggagcggccccgccgctctggagcccggcccttccgagagcctcactgcctccagccctctcaagttaaacgaactgaactaggcctggtggaaggaggcgcactttcctcctggcagaatgctagctctgagccagttcagtacctggaggaggagcaggggcgtggagggcgtggagggcgtgggagcgtgggaggcgggagtggagtggaagaagagggagagatggagcaaagtgagggccgagtgagagcgtgctccagcctggctcccacaggcagctttaaccattaaaactgaagtctgaaatttggtcaaaaaaaaaaaaa

SEQ ID NO: 310 - DNA, 1400 bp, Homo sapiens
atttacaaacacctttacttttgcacttttaattcaacatgagtatcatatggtatctctctagatttcaaggaaacacactggatactgcctactgacaaaacctattcttcatattttgctaaaaatatgtctaaaacttgtttaaatataaataatgtaaaaatataatcaactttatttgtcagcattttgtacataagaaaattattttcaggttgatgacatcacaatttattttactttatgcttttgcttttgatttttaatcacaattccaaacttttgaatccataagatttttcaatggataatttcctaaaataaaagttagataatgggttttatggatttctttgttataatatattttctaccattccaataggagatacattggtcaaacactcaaacctagatcattttctaccaactatggttgcctcaatataaccttttattcatagatgtttttttttattcaacttttgtagtatttacgtatgcagactagtcttatttttttaattcctgctgcactaaagctattacaaatataacatggactttgttctttttagccatgaacaaagtggcaaagttgtgcaattacctaacatgatataaatttttgttttttgcacaaaccaaaagtttaatgttaattctttttacaaaactatttactgtagtgtattgaagaactgcatgcagggaattgctattgctaaaaagaatggtgagctacgtcattattgagccaaaagaataaatttcattttttattgcatttcacttattggcctctggggttttttgtttttgttttttgctgttggcagtttaaaatatatataattaataaaacctgtgcttgatctgacatttgtatacataaaagtttacatgaattttacaacaaactagtgcatgattcaccaagcagtactacagaacaaaggcaaattaaaagcagctttgtgaacttttatgtgtgcaaaggatcaagttcacatgttccaactttcaggtttgataataatagtagtaaccacctacaatagctttcaatttcaattaactcccttggctataagcatctaaactcatcttctttcaatataattgatgctatctcctaattacttggtggctaataaatgttacattctttgttacttaaatgcattatataaactcctatgtatacataaggtattaatgatatagttattgagaatttatattaacttttttttcaagaacccttggatttatgtgaggtcaaaaccaaactcttattctcagtggaaaactccagttgtaatgcatatttttaaagacaatttggatctaaatatgtatttcataattctcccataataaattatataaggtgg

SEQ ID NO: 311 - DNA, 600 bp, Homo sapiens
gggagagaaaaagcaaammrmrmmawmmwrmwwmwwdmwwmmgttcggcgttgggtgctgggctttgcttcagcccagcacggagaggacatccctgagctgacccgcatcgccgggcgccgaggctggagggcgcagggccctcccttagggagagctcgcctctccctttgggtcaagggatgaagacctgcagtgagcccccaggcgatggcggctctcgccaaaaggaaggagagtgaggctgggggcggcggctcatgcctgtcattccagtgctttgggagcctaaggcgggaggatcgcttgaacccaggggattgaggctgcagtgaacctcgatggtgccagtgcgttccggcatgggtgacagagcaaggctactgaaaaaaaagaagggaaatgccacctggtttccctctgtgtcctccccgccaccatctctgcccctgtggaaggcagagcttcggccttccgtgatggaaaccacttcctctacactgctcctgtcacgtagcctccgcgggaaggccgcccctgcctcttccccagcgtggcaccatcctctccctgtccccccgcttcagggagtgggggctc

SEQ ID NO: 312 - DNA, 600 bp, Homo sapiens
ttgctctgttgctgaggctggagtgcagtgatgtgatcttggctcactgcagcctctgcctcccaggttcaagcaattctcccacctcagcctccaaagtgctgggattacaggcgtgagccactgcgcccggccacattcagttcttatcaaagaaataacccagacttaatcttgaatgatacgattatgcccaatattaagtaaaaaatataagaaaaggttatcttaaatagatcttaggcaaaataccagctgatgaaggcatctgatgccttcatctgttcagtcatctccaaaaacagtaaaaataaccactttttgttgggcaatatgaaatttttaaaggagtagaataccaaatgatagaaacagactgcctgaattgagaattttgattttttaaagtgtgtttctttctaaattgctgttccttaatttgattaatttaattcatgtattatgattaaatctgaggcagatgagcttacaagtattgaaataattactaattaatcacaaatgtgaagttatgcatgatgtaaaaaatacaaacattctaattaaaggctttgcaacaccaaaaaaaaaaaaaaaaaa

SEQ ID NO: 313 - DNA, 600 bp, Homo sapiens; identical to SEQ ID NO: 312

SEQ ID NO: 314 - DNA, 600 bp, Homo sapiens
atttcatatccaacgacagaagcattccctataaggcctgcctctccgagctcttcttcttccacctcctggctggggcagactgcttcttgctgaccatcatggcctatgaccgctatctggccatctgccagtccctcacctacagcagccgcatgagctggggaatccagcaagccctggtgggcatgtcatgtgtcttttccttcaccaatgcactgacccaaactgttgscctgtctcctcttaacttctgtggscccaatgtgatcaatcacttctactgtgacctcccacagsycttccagctctcctgckccagyryycawctcaatgrgcwgytgctstttgywgyrgswkyywtcatggswgksrcmccyttggtyctcatcatcwstgtcctayrsccaygtggcagctgcagtyctrcgaatccgytcwgyrgagggcmraaagaargccttctccacgtgtrgytcccacctcacygtggtkkgymtyttctwtggrasrggyrtcttcarctacayragrctgggttcagwggagkcttcrgacaaggayaarggsrttggmrtyytcaacactgtyatcarcccy

SEQ ID NO: 315 - DNA, 600 bp, Homo sapiens
cccagcctgagtctcggccctcacccagggccctgcctcgggtcctggrmytgmtycmmgcttmytccccttcagtcagctccctctgtcctctgtcagcctggcctgacccctaccctccagcattgctcttcctactgtacatattggggagtggggggcagggtcgggaagggacatgccaggccaggcctggggccccggggcctgacccacaccacgcagaccccgggctccagtttttaacgatggttccatcaatacctgatccagaatgtttccgtgctacactttgtgtcctgctgcaatgtgttctgtctgtccatccatctctgccctctgtaccggacactgtgtctcctcagccaggaaggggtaatgagctccagcccctaagcaaccggacttgcctgcctcggcctcacccgcacttctcccaaaaggcagatgacggggagttaggcatggggagctccagaaggtcaccagagagctttcagctgagggagagttctctaggttggagtgggcatcacagccagggtggcctctgggtgtcagatgctctcaggagggtgcccagcctgtgaggcactggca

SEQ ID NO: 316 - DNA, 600 bp, Homo sapiens; identical to SEQ ID NO: 315

SEQ ID NO: 317 - DNA, 600 bp, Homo sapiens
ywgtcyaccykgacwctymagmtgccactstgtgrycmcwawgwrrtrgatcacttyytctgtgaagtccctgcwctgctcaagttrtcytgtgttgasacaacagcaaatgaggctgaactattcytyrtcagtgwgctmttccwtctaatacccstgacactcatccttatatcrtatgcttttattgtccragcagtrttgagratmcagtctgctgaaggtcracraaargcatttgggacatgtggytcccatctaattgtggtgtcwcttttttatrgtacagcyrtctcyrtgtacctgcaaccaccttcrcccagctccaargaccrrggaaagatggtttctctcttctrtggaatcattgcacccatgctgaatccccttatatatacacttaggaacaaagaggtaaaggaagcctttaaaaggttggttgcaaagagtcttcttaatcaagaaataagaaatatgcaaatgataagctttgctaaagacacagtgcttacttaccttactaacttctccgcaagttgtcctatttttgtcattactatagaaaactattgtaatctccctcaaagaaaatttccttga

SEQ ID NO: 318 - DNA, 600 bp, Homo sapiens
cttggcttgaacaagagaaaaacaatctcctttgtcccatgcacaatgcagacctttttatacatggcttttgctcacactgagtgtctcatcttggtaatgatgtcctacgatcggtacatggctatctgccaccctctgcaatattctgtcatcatgagatggggagtgtgcacagtcctggctgtcacttcttgggcatgtggttcccttctggccctggtccatgtggttctcatcctgaggctgcccttctgtgggccccatgaaatcaaccacttcttctgtgaaatcctgtctgtcctcaagttggcctgtgctgacacctggctcaaccaggtggtcatctttgctgcttcagtgttcatcctggtggggccgctctgcctggtgctggtctcctactcgcgcatcctggcggccatcttgrggatccagtctggggagggccgcagaaaggccttctccacctgctcctcccacctttgcatggtgggactcttctttggcagcgccattgtcatgtacatggcccccaagtcccgccaccctgaggagcagcagaaggtcctttccctgttttacagccttttcaacccg

SEQ ID NO: 319 - DNA, 600 bp, Homo sapiens
ccagcccccttataagccaaaagctagagacaagagagacacctccaacttcgacaaagagttcaccagacagcctgtggaactgacccccactgataaactcttcatcatgaacttggaccaaaatgaatttgctggcttctcttatactaacccagagtttgtcattaatgtgtaggtgaatgcaaactccatcgttgagcctggggtgtaagacttcaagccaagcgtatgtatcaattctagtcttccaggattcacggtgcacatgctggcattcaacatgtggaaagcttgtcttagaggcctttcttgtatgtgtagcttgctagtttgttttctacatttgaaaatgtttagtttagaataagcgcattatccaattatagaggtacaattttccaaacttccagaaactcatcaaatgaacagacaatgtcaaaactactgtgtctgataccaaaatgcttcagtatttgtaatttttcaagtcagaagctgatgttcctggtaaaagtttttacagttattctataatatcttctttgaatgctaagcatgagcgatatttttaaaaattgtgagtaagcttcggaattc

SEQ ID NO: 320 - DNA, 936 bp, Homo sapiens
atggatggagagaatcactcagtggtatctgagtttttgtttctgggactcactcattcatgggagatccagctcctcctcctagtgttttcctctgtgctctatgtggcaagcattactggaaacatcctcattgtgttttctgtgaccactgaccctcacttacactcccccatgtactttctactggccagtctctccttcattgacttaggagcctgctctgtcacttctcccaagatgatttatgacctgttcagaaagcgcaaagtcatctcctttggaggctgcatcgctcaaatcttcttcatccacgtcattggtggtgtggagatggtgctgctcatagccatggcctttgacagatatgtggccctatgtaagcccctccactatctgaccattatgagcccaagaatgtgcctttcatttctggctgttgcctggacccttggtgtcagtcactccctgttccaactggcatttcttgttaatttagccttctgtggccctaatgtgttggacagcttctactgtgaccttcctcggcttctcagactagcctgtaccgacacctacagattgcagttcatggtcactgttaacagtgggtttatctgtgtgggtactttcttcatacttctaatctcctacgtcttcatcctgtttactgtttggaaacattcctcaggtggttcatccaaggccctttccactctttcagctcacagcacagtggtccttttgttctttggtccacccatgtttgtgtatacacggccacaccctaattcacagatggacaagtttctggctatttttgatgcagttctcactccttttctgaatccagttgtctatacattcaggaataaggagatgaaggcagcaataaagagagtatgcaaacagctagtgatttacaagaggatctca

SEQ ID NO: 321 - DNA, 600 bp, Homo sapiens
cctggtgggcggcctgctgactgctccccacctcacccagcgcctgccccccagcacccggctgcctcagccctccggactcggatgactggaggtcgtccacccctcccgcctcctgatgaccctgccactctggggcctcacctggcctccgtggtgtaccccagagcacagcagccagctcgtgaccctgccccctccctggggcccctcctgaaagccataccctcccccatctgggggccctgggctcccatcctcatctctctccttgactggaattgctgctacccagctggggtgggtgaggcctgcactgattggggcctggggcaggggggtcaaggagagggttttggccgctccctccccactaaggactggacccttgggcccctctccccctttttttctatttattgtaccaaagacagtggtggtccggtggagggaagacccccccctcaccccaggaccctaggagggggtgggggcaggtagggggagatggccttgctcctcctcgctgtacccccagtaaagagctttctcacaaaaaaaaaaaaaaaaaaactcgaggggggcccgtacccaatcgcc

SEQ ID NO: 322 - DNA, 600 bp, Homo sapiens; identical to SEQ ID NO: 321

SEQ ID NO: 323 - DNA, 600 bp, Homo sapiens
  misc_feature (472)..(472): n is a, c, g, or t
  misc_feature (485)..(485): n is a, c, g, or t
  misc_feature (541)..(541): n is a, c, g, or t
  misc_feature (588)..(588): n is a, c, g, or t
ttccgtagccagctgctccccagcagcggaaccgcccaggatcagattgcatgtgactctgaagctgacgaacttccatggccctcattaatgacacttgtccccaaatccgaacctcctctgtgaagcattcgagacagaaccttgttatttctcagactttggaaaatgcattgtatcgatgttatgtaaaaggccaaacctctgttcagtgtaaatagttactccagtgccaacaatcctagtgctttccttttttaaaaatgcaaatcctatgtgattttaactctgtcttcacctgattcaactaaaaaaaaaaaagtattattttccaaaagtggcctctttgtctaaaacaataaaattttttttcatgttttaacaaaaaccaawmaggacaggtgtttgtttttgttttcttttttataaatatggaatatatataatatatatgtccctggtacatatacangtgggggtgctangtgggagactgtgggccgggcctggggccacccaggctgcgggggcccagaggggnggggtttttactggcaaggtcaggccttcaaggcacccggtggtttnttcttggaaaac

SEQ ID NO: 324 - DNA, 600 bp, Homo sapiens; identical to SEQ ID NO: 323
  misc_feature (472)..(472): n is a, c, g, or t
  misc_feature (485)..(485): n is a, c, g, or t
  misc_feature (541)..(541): n is a, c, g, or t
  misc_feature (588)..(588): n is a, c, g, or t

SEQ ID NO: 325 - DNA, 939 bp, Homo sapiens
atgaattgggaaaatgagagctccccaaaagagtttatactacttggcttctcagatagggcttggctacaaatgcccctttttgtggtcctgttaatatcatacacaatcaccatatttggcaatgtgtccatcatgatggtgtgcattctggatcccaaacttcatactcccatgtatttctttctcactaatctctccatcttagatctctgctataccacaactacagtccctcatatgttggtaaatattggttgcaacaaaaagaccatcagctatgctggctgtgtggcccacctcatcatcttcctggccctaggtgctacagagtgtctccttctggctgttatgtcctttgacagatatgtggctgtttgcagacccctccactatgtagtcatcatgaattattggttctgcctaaggatggcagccttctcatggctcattggtttcggcaactcagtgctgcagtcttccttgactcttaacatgccacgctgtggtcaccaggaagtggaccactttttctgtgaggtgcctgcacttctcaagttgtcatgtgctgacacaaagcctattgaggctgagctcttcttctttagtgtactaattcttctaattccagtgacattgatcctcatctcctatggcttcatagctcaagcagtattaaaaatcaggtcagcagaaggacggcaaaaagcatttgggacatgtgggtcccacatgattgtggtgtccctcttttatggaacagccatttatatgtatcttcaaccaccttcatccacctctaaggactggggaaagatggtttccctcttctatggaatcatcacatccatgttgaactccctcatctacagccttagaaataaagatatgaaggaggccttcaagaggctgatgccaagaatctttttctgtaagaaa

SEQ ID NO: 326 - DNA, 600 bp, Homo sapiens
gcagcaatctgtcaaccacttcattatgagactattatggatccccgtgcctgtaggcatgcagtgatagctgtgtggattgctgggggcctctctgggctcatgcatgctgccattaacttctccatacctctctgtgggaagagagtcattcaccaattcttctgtgatgttcctcagatgctgaaactagcctgttcttatgaattcattaatgagattgcactggctgcattcacaacgtctgcagcatttatctgtttgatctccattgtgctctcctacattcgcatcttctctacagtgctgagaatcccatcagctgagggccggaccaaggtcttctccacctgcctaccacacctatttgtagccaccttctttctttcagctgcaggctttgagtttctcagactgccttctgattcctcatcgactgtggaccttgtattctccgtattctatactgtgatacctccaacactcaatccagtcatttatagcttacggaatgattccatgaaggcagcactgaggaagatgctgtcaaaggaagagcttcctcagagaaaaatgtgcttaaaagccatgtttaaactc

SEQ ID NO: 327 - DNA, 600 bp, Homo sapiens
ttcatggcctatgacaggtatgtggccatttgtcatcctctgacatacatgaccctcatgagctcaagagcctgctggctcatggtggccacgtcctggatcctggcatccctaagtgccctaatatataccgtgtataccatgcactatcccttctgcagggcccaggagatcaggcatcttctctgtgagatcccacacttgctgaaggtggcctgtgctgatacctccagatatgagctcatggtatatgtgatgggtgtgaccttcctgattccctctcttgctgctatactggcctcctatacacaaattctactcactgtgctccatatgccatcaaatgaggggaggaagaaagcccttgtcacctgctcttcccacctgactgtggttgggatgttctatggagctgccacattcatgtatgtcttgcccagttccttccacagcaccagacaagacaacatcatctctgttttctacacaattgtcactccagccctgaatccactcatctacagcctgaggaataaggaggtcatgggggccttgaggagggtcctgggaaaatacatgctgccagcacactccacgctc

SEQ ID NO: 328 - DNA, 960 bp, Homo sapiens
atggaccaaagcaattatagttctttacatggttttattctgcttggcttctctaaccatccaaaaatggagatgatcctgtcaggagttgtcgccatcttctacttaattacattggtgggtaacacagccatcattcttgcatctctcctggattcccagcttcatacaccaatgtactttttcctcagaaatttatctttcctagatctatgtttcacaaccagcatcatccctcagatgctggtcaacttgtggggacctgataagaccatcagctatgtgggttgtatcatccaactctatgtttacatgtggttgggctcagttgagtgccttctcctggctgttatgtcctatgatcgttttacagctatatgtaagcccttgcattattttgtagtcatgaacccacatctatgtctaaagatgattatcatgatctggagtattagtttggccaattctgtagtattatgtacactcactctgaatttgcccacatgtggaaacaacattctggatcatttcttgtgtgagttgccagctctggtcaagatagcttgtgtagacaccacaacagttgaaatgtctgttttcgctttaggcattataattgtcctcacacctctcatccttattcttatatcctatggctacattgccaaagctgtgctgagaacgaagtcaaaagcaagccagcgaaaagcaatgaatacctgtggatctcatcttactgtagtgtctatgttctatggaactattatctacatgtacctgcaaccaggtaacagggcttccaaagaccagggcaagttcctcaccctcttttacaccgtcatcactccaagtctcaacccgctcatttacaccttaagaaataaggacatgaaggatgccctgaagaaactgatgagatttcaccacaaatctacaaaaataaagaggaattgcaagtca

SEQ ID NO: 329 - DNA, 600 bp, Homo sapiens
acccagtgattatgatgtaaattaagtagcaattaaagtgttttcctgaacactgatggaaatgtatagaataatatttaggcaataacgtctgcatcttctaaatcatgaaattaaagtctgaggacgagagcacgcctgggagcgaaagctggccttttttctacgaatgcactacattaaagatgtgcaacctatgcgccccctgccctacttccgttaccctgagagtcggcgtgtggccccatctccatgtgcctcccgtctgggtgggtgtgagagtggacggtatgtgtgtgaagtggtgtatatggaagcatctccctacactggcagccagtcattactagtacctctgcgggagatcatccggtgctaaaacattacagttgccaaggaggaaaatactgaatgactgctaagaattaaccttaagaccagttcatagttaatacaggtttacagttcatgcctgtggttttgtgtttgttgttttgtgtttttttagtgcaaaaggtttaaatttatagttgtgaacattgcttgtgtgtgtttttctaagtagattcacaagataattaaaaattcactttttctcag

SEQ ID NO: 330 - DNA, 1400 bp, Homo sapiens
gtgaagaagaaaaaaacccctggcctttgggccaggaggaatctgttactcgaatccacccaggaactccctggcagtggattgtgggaggctcttgcttacactaatcagcgtgacctggacctgctgggcaggatcccagggtgaacctgcctgtgaactctgaagtcactagtccagctgggtgcaggaggacttcaagtgtgtggacgaaagaaagactgatggctcaaagggtgtgaaaaagtcagtgatgctccccctttctactccagatcctgtccttcctggagcaaggttgagggagtaggttttgaagagtcccttaatatgtggtggaacaggccaggagttagagaaagggctggcttctgtttacctgctcactggctctagccagcccagggaccacatcaatgtgagaggaagcctccacctcatgttttcaaacttaatactggagactggctgagaacttacggacaacatcctttctgtctgaaacaaacagtcacaagcaaaggaagaggctgggggactagaaagaggccctgccctctagaaagctcagatcttggcttctgttactcatactcgggtgggctccttagtcagatgcctaaaacattttgcctaaagctcgatgggttctggaggacagtgtggcttgtcacaggcctagagtctgagggaggggagtgggagtctcagcaatctcttggtcttggcttcatggcaaccactgctcacccttcaacatgcctggtttaggcagcagcttgggctgggaagaggtggtggcagagtctcaaagctgagatgctgagagagatagctccctgagctgggccatctgacttctacctcccatgtttgctctcccaactcattagctcctgggcagcatcctcctgagccacatgtgcaggtactggaaaacctccatcttggctcccagagctctaggaactcttcatcacaactagatttgcctcttctaagtgtctatgagcttgcaccatatttaataaattgggaatgggtttggggtattaatgcaatgtgtggtggttgtattggagcagggggaattgataaaggagagtggttgctgttaatattatcttatctattgggtggtatgtgaaatattgtacatagacctgatgagttgtgggaccagatgtcatctctggtcagagtttacttgctatatagactgtacttatgtgtgaagtttgcaagcttgctttagggctgagccctggactcccagcagcagcacagttcagcattgtgtggctggttgtttcctggctgtccccagcaagtgtaggagtggtgggcctgaactgggccattgatcagactaaataaattaagcagttaacataactggc

SEQ ID NO: 331 - DNA, 1400 bp, Homo sapiens; identical to SEQ ID NO: 330

SEQ ID NO: 332 - DNA, 1375 bp, Homo sapiens
gacatgcccgccagccagcccattgacatcccggacgccaagaagaggggcaagaagaagaagcgcggccgggccaccgacagcttctcgggcaggtttgaagacgtctaccagctgcaggaagatgtgctgggggagggcgctcatgcccgagtgcagacctgcatcaacctgatcaccagccaggagtacgccgtcaagatcattgagaagcagccaggccacattcggagcagggttttcagggaggtggagatgctgtaccagtgccagggacacaggaacgtcctagagctgattgagttcttcgaggaggaggaccgcttctacctggtgtttgagaagatgcggggaggctccatcctgagccacatccacaagcgccggcacttcaacgagctggaggccagcgtggtggtgcaggacgtggccagcgccttggactttctgcataacaaaggcatcgcccacagggacctaaagccggaaaacatcctctgtgagcaccccaaccaggtctcccccgtgaagatctgtgacttcgacctgggcagcggcatcaaastmarckgggamwscycssctrwckcsaccccksmscygctcackcmgtgcggctcggcggagtacatggccccggaggtagtggaggccttcagcgaggaggctagcatctacgacaagcgctgcgacctgtggagcctgggcgtcatcttgtatatcctactcagcggctacccgcccttcgtgggccgctgtggcagcgactgcggctgggaccgcggcgaggcctgccctgcctgccagaacatgctgtttragagcatccaggagggcaagtacgagttccccgacaaggactgggcccacatctcctgcgctgccaaagacctcatctccaagctgctggtccgtgacgccaagcagaggctgagtgccgcccaagtcctgcagcacccctgggttcaggggtgcgccccggagaacaccttgcccactcccatggtcctgcakaggtgggacagtcacttcctcctccctccccacccctgtcgcatccacgtgcgacctggaggactggtcaraaccgttactgtgaatgagtgaagatcctggaggaccctgggccccaggccagctcccatcgctgggggacggtgaacggccatgtgttaatgttacgatgtttttaaaagacaawwraarraamwwrrcctcraaagywtttttaaagtgggggaaaaacatccaagcactttaattccaatgtaccaggtgaactgacggagctcagaagttttcctttacaccaactgtcaatgccggaattttgtattctgttttgtaaagatttaataaaagtcaaaaaacttgc

SEQ ID NO: 333 - DNA, 600 bp, Homo sapiens
cagcaatagcatgccaagccgcacccacagctcagtccagaggacccgctcgctgcccgtgcacacttccccacagaacatgctgatgttccagcagccagrwtyccarsttcacmgtgaccgaacctgwswtyaacarassytrgaggttsgttgwgcctsagtggaksmcckwmcaygccmgsgmtgacagtccccaagtcctcccagggaggtacaccagacctttctcctgaaggtggaaccaggtggcaccctgcttatctcctccttgtcaccaacataaccctttatcgcctgcagaattccagcttcccgtgaccgaacctgacatcaacaacaggctggagtcgttgtgcctcagtatgaccgaacacgccctgggagacggggttgaccggacctccaccatctagaagctgaagacgagagtgaccgcgctggccgtgaaatcgactgctgcgggtccagtgtccgccatcttcagggttgcacagaatcctccaagatactttgcagccttttttccccctggtccctctcccgttttgattttgtgagagcgtaggtcatcctcgtaaacatatcagtagacctggg

SEQ ID NO: 334 - DNA, 600 bp, Homo sapiens
catcctgaatttgcacagaggaaagcgggtgcccggcatggccatcctgatgttgctggmgggatccccatgcaccttgtccttctccactgatactggcagctcggctcctggacccaagatcccttgagtggaattctgcagtgcaagagcccttcgtgggagctgtcccatgtttccatggtccccagtctcccctccacttggtggggtcaccaactactcaccagaagggggcttaccaagaaagccctaaaaagctgttgacttatctgcgcttgttccaactcttatgcccccaacctgccctaccaccaccacgcgctcagcctgatgtgtttacatggtactgtatgtatgggagagcagactgcaccckccagcaacawcagatgaaagccagtgagcctactaaccgtgccatcttgcaaactacactttaaaaaaaactcattgctttgtattgtagtaaccaatatgtgcagtatacgttgaatgtatatgaacatactttcctatttctgttctttgaaaatgtcagaaatatttttttctttctcattttatgttgaactaaaaaggattaaaaaaaaaatctcc

SEQ ID NO: 335 - DNA, 600 bp, Homo sapiens; identical to SEQ ID NO: 334

SEQ ID NO: 336 - DNA, 600 bp, Homo sapiens
gccgttgtccgtccgggagcggctggagcagcagtggcggcggccgtgcacctcgggaggcgacaccacagggcagcggcggctgcaggagcagcagcaagacagactcgtggagacgcgccgccgccaccgggcgggtgtcgcgcgctgaggctggggggtgtcgtcgccgctgccgcagaggtaactgaggagaggggcgcctcctcgctcctgccaccgccggacttcaatgcccggtccccgctcgccagcgtttttcgttggaatatacgttgcacatttacggcgattctgagtgtgagggcagacttctgccgggctcagcacagcgttttcgctgasaascktmsagcccctgtggagatttcctgtgagaacatgcgttttcttgtaactcacaaccctaccagtgctactctcaacgagttcccagaggaacttaagaagtatggagtgatgactttggttcgagtttgtgatgctacgtatgataaagctccagttgaaaaagaaggaatccaccttctagattggccatttgatgatggagctccaccccctaatcagatagtagatgattggttaaacctgttataa

SEQ ID NO: 337 - DNA, 945 bp, Homo sapiens
atgatgtgggaaaactggacaattgtcagtgaatttgttctcgtgagcttctcagccctgtccactgagcttcaggctctactgtttctccttttcttgaccatttacttggttactttaatgggcaatgtcctcatcatcctggtcactatagctgactctgcactacaaagtcctatgtacttcttcctcagaaacttgtccttcctggagataggtttcaacttggtcattgtgcccaagatgctggggaccctgatcattcaagacacaaccatctccttccttggatgtgccactcagatgtatttcttcttcttttttggggctgctgagtgctgcctcctggccaccatggcatatgaccgctacgtggccatctgtgaccccttgcactacccagtcatcatgggccacatatcctgtgcccagctggcagctgcctcttggttctcagggttttcagtggccactgtgcaaaccacatggattttcagtttccctttttgtggccccaacagggtgaaccacttcttctgtgacagccctcctgttattgcactggtctgtgctgacacctctgtgtttgaactggaggctctgacagccactgtcccattcattctctttcctttcttgctgatcctgggatcctatgtccgcatcctctccactatcttcaggatgccgtcagctgaggggaaacatcaggcattctccacctgttccgcccacctcttggttgtctctctcttctatagcactgccatcctcacgtatttccgaccccaatccagtgcctcttctgagagcaagaagctgctgtcactctcttccacagtggtgactcccatgttgaaccccatcatctacagctcaaggaataaagaagtgaaggctgcactgaagcggcttatccacaggaccctgggctctcagaaacta

SEQ ID NO: 338 - DNA, 600 bp, Homo sapiens
aagtatgtagagcaatcaaacaattggattatgaatggaaggttgtaaacccatattatttgcgtgtacgaaggaagaatcctgtgacaagcacttactccaaaatgagtctacagttataccaagtggatagtagaacttatctactggatttccgtagtattgatgatgaaattacagaagccaaatcagggactgctactccacagagatcgggatcagttagcaactatcgatcttgccaaaggagtgattcagatgctgaggctcaaggaaaatcctcagaagtttctcttacctcatctgtgacctcacttgactcttctcctgttgacctaactccaagacctggaagtcacacaatagaattttttgagatgtgtgcaaatctaattaaaattcttgcacaataaacagaaaactttgcttatttcttttgcagcaataagcatgcataataagtcacagccaaatgcttccatttgtaatcaagttatacataattataaccgagggctggcgttttggaatgcaatttgcacagggattggaacatgatttatagttaaaagcctaatatgcagaaatgaattaagatca

SEQ ID NO: 339 - DNA, 600 bp, Homo sapiens; identical to SEQ ID NO: 338

SEQ ID NO: 340 - DNA, 1400 bp, Homo sapiens
gaaaactggggtcgcgaagaaatcacagccaaggaagatttgatgcattcagattctcgtgtaacacttgttgcttggcaacagtactggttgggttgaccagtaagtagaaaaaggctaaaggctatgcgatatgaatttcagaaatggactgaaaatggagagctatgtaacagatacactacagtagaagaacttacttctgaaatgaagggaaaaaaaccaccccatcgttccctactcctccccaccacttacccgttccccctttacctaatctagtagattagccatctttcaaattcacttttatttcagtccttatatttcatatacttccgtctcgatgctgttaacaacttctgataacatggaaaattcaaggattgtttaaaggtctgatgatcacacacaaaatgtaattccggttatttaagtcatttctgtgattctatcatgtacagtttccagaattgtcactgtgcattcaaaagtaatgaatctaacagacatttgatttaatgtacactcccttttgcttatagtgtgcattttttttggaggtcattcaaattttccctcttctgtgatagctgtagtttctttcatagaaagtagctaatccagtgtaatcttttacctttttaaaaaccaagatagagtatctattagagttttacattgttgatgatagattaacaataaagtgatgttctggtggaggtagactgaaatttttttaattcatgtttttcatttgatacttttaatttacacttagtaaattaaaagttgtttaatttacttggcattttaggacatgtacatgaaacagtgaaaatgagatccaccaacatcttttattaagttcagttattagtctgtgaagtgctttactttttgcacaattttaatagcttgctattcagtaatacattatagtgaattcatgatcaaggtttccttaaatttagcatttgcatttcagtactgactgtgtaagctaaattgctgatccaaaataaaaacccagactagaatagggttcttaaaatcaagtatcaatacaaaatagaacacaattaaaatcttaattgttggctgggcacagtggctcacgcctgtaatcccagcactttgggaggccgaggcgggcggatcatgaggttaggagagcgagaccatcctggctaacacggtgaaaccccgtctttactaaaaatacaaaaaaaattagccgggygtggtggcgggcgcctgtagtcccagctactcgggaggctgaggcaggagaatggcgtgaacccaggaggcggagcttgcagtgagccgagattgtgccactgcactccagcctgggcaacagagctagactctgtgtcaaaaataaatgactagat

SEQ ID NO: 341 - DNA, 1400 bp, Homo sapiens; identical to SEQ ID NO: 340

SEQ ID NO: 342 - DNA, 600 bp, Homo sapiens
cttcacgattcttaccctttcttttgaatcaatctggcttctgcattactattaactctgcatagacaaaggccttaacaaacgtaatttgttatatcagcagacactccagtttgcccaccacaactaacaatgccttgttgtattcctgcctttgatgtggatgaaaaaaagggaaaacaaatatttcacttaaactttgtcacttctgctgtacagatatcgagagtttctatggattcacttctatttatttattattattactgttcttattgtttttggatggcttaagcctgtgtataaaaaagaaaacttgtgttcaatctgtgaagcctttatctatgggagattaaaaccagagagaaagaagatttattatgaaccgcaatatgggaggaacaaagacaaccactgggatcagctggtgtcagtccctacttaggaaatactcagcaactgttagctgggaagaatgtattcggcaccttcccctgaggacctttctgaggagtaaaaagactactggcctctgtgccatggatgattcttttcccatcaccagaaatgatagcgtgcagtagagagcaaagatggctt

SEQ ID NO: 343 - DNA, 600 bp, Homo sapiens
gagaatctgttccattacttgactgaagtgaaatctaatggtggagtgaaaatcccagaagtcaaaggggatgaagcctggaaggttttctttgatgatgcttcccaagaaatagttgatgaatttgctatgcgttatggaattgaatccatttatcaagctatgacgcacttttcatgtctgtcttctaaatacatgtgccccggtgtccctgccgtcatgagcaccttgctggctaatataaatgctttttatgctcacacaacagtttcaacaaacatacaggtttctgcctcagatcgatttgctgctaccaactttggtagggaaaaattcataaaactactggaccagttacataactctttgaggattgatctgtcaaagtatagggaaaactttcctgcaagcaatactgaaagactgcaagacctgaaatcaactgttgacctgttaacaagtatcaccttttttaggatgaaggttctggagctgcaaagccccccaaaagcgagcatggtggtgaaggactgtgtaagggcttgcctggattctacatacaagtatatttttgacaactgccatgaactctactcccag

SEQ ID NO: 344 - DNA, 600 bp, Homo sapiens
tggtccatctgggtctgcttatgagaatgaatgaactgtgtctgtaaagtgctcacagctctctggagagggtatcttagcacaattaccataataataaatgctttctgttcatttggtatttgtgcatcctcggggcacccaggggctcagctcattaaggctctacaacttggacaaacaggttggtaggaagcgaggtgagaagctggccttgtatcaatagtgtcattccatgtttaaaaagccaaagcttagaaataccaattcacaaggtcagttgggccatttcagttagctagtgagtagcaggacgagggcaggacactgattgtttataggaaagcaacaaatgctcacagctcgtatggtaagcatcatagtttaagaaacactttgacacatgttatgaaattcaatctttataatagtcctgtgaggtagagatgaagtcagtttggttcttgtgcagatcacatagaaggaatgaggcagaactgaaggcagctcacattctgctatttacagctcccatcgtaaggacggactcctaattcaatgctctattatgttatcagtgttcactgagtactctccatt

SEQ ID NO: 345 - DNA, 1400 bp, Homo sapiens
cctggccgacctggtctcggagatggaggtgatgaagctgatcggccgacacaagaacatcatcaacctgcttggtgtctgcacccaggaagggcccctgtacgtgatcgtggagtgcgccgccaagggaaacctgcgggagttcctgcgggcccggcgccccccaggccccgacctcagccccgacggtcctcggagcagtgaggggccgctctccttcccagtcctggtctcctgcgcctaccaggtggcccgaggcatgcagtatctggagtcccggaagtgtatccaccgggacctggctgcccgcaatgtgctggtgactgaggacaatgtgatgaagattgctgactttgggctggcccgcggcgtccaccacattgactactataagaaaaccagcaacggccgcctgcctgtgaagtggatggcgcccgaggccttgtttgaccgggtgtacacacaccagagtgacgtgtggtcttttgggatcctgctatgggagatcttcaccctcgggggctccccgtatcctggcatcccggtggaggagctgttctcgctgctgcgggagggacatcggatggaccgacccccacactgccccccagagctgtacgggctgatgcgtgagtgctggcacgcagcgccctcccagaggcctaccttcaagcagctggtggaggcgctggacaaggtcctgctggccgtctctgaggagtacctcgacctccgcctgaccttcggaccctattccccctctggtggggacgccagcagcacctgctcctccagcgattctgtcttcagccacgaccccctgccattgggatccagctccttccccttcgggtctggggtgcagacatgagcaaggctcaaggctgtgcaggcacataggctggtggccttgggccttggggctcagccacagcctgacacagtgctcgaccttgatagcatggggcccctggcccagagttgctgtgccgtgtccaagggccgtgcccttgcccttggagctgccgtgcctgtgtcctgatggcccaaatgtcagggttctgctcggcttcttggaccttggcgcttagtccccatcccgggtttggctgagcctggctggagagctgctatgctaaacctcctgcctcccaataccagcaggaggttctgggcctctgaaccccctttccccacacctccccctgctgctgctgccccagcgtcttgacgggagcattggcccctgagcccagagaagctggaagcctgccgaaaacaggagcaaatggcgttttataaattatttttttgaaataaagctctgtgtgcctgggtcaaaaaaaaaaaaaaaaaaaaaaaaaaaaaaaaaaaaaaaaaaaaaaaaaaaaaaaaaaaaa

SEQ ID NO: 346 - DNA, 1400 bp, Homo sapiens; identical to SEQ ID NO: 345

SEQ ID NO: 347 - DNA, 600 bp, Homo sapiens
ttaggtgtcagctcttgagctgcttccctcatcacaccacactcacatgcatctgttctctctcacactctatacccctgccacttcctggcacctccccccatgcttgtcatttaattttggccacttgtaggtatcagtgtgatctgatcaacactctggttaccttggtcagtgaaaagatgctactatattgcttttgtcccaaagtgagtaaaatcccctagagcagagagagagagagagagagagagtgtcttcatgccaaccacagcctgtttctgctgagtttcttatcagccctcaagctatgctaggaaaagttataaaatgccaaaatatttataaacatttactttgtccataaaaaatttacattggatactctgtaagtaggaggtactttgtcccaaaaagatgtataagaatgtactaatagttttatttgattaggattgaacagttcagttgtatctatgccccacagtgaccagtaaagtccaattaaaatatggaaatgtaaaagtgtatgccgaataccttaaagtaactaattatccttacacacaaaaggctcagtgcattaaatatttgcctatc

SEQ ID NO: 348 - DNA, 1400 bp, Homo sapiens
ccatttcctcacgtgcaggacagctcttgatttgggtggaaaacagggtgctaaagccaaccagcctttgggtcctgggcaggtgggagctgaaaaggatcgaggcatggggcatgtcctttccatctgtccacatccccagagcccagctcttgctctcttgtgacgtgcactgtgaatcctggcaagaaagcttgagtctcaagggtggcaggtcactgtcactgccgacatccctcccccagcagaatggaggcaggggacaagggaggcagtggctagtggggtgaacagctggtgccaaatagccccagactgggcccaggcaggtctgcaagggcccagagtgaaccgtcctttcacacatctgggtgccctgaaagggcccttcccctcccccactcctctaagacaaagtagattcttacaaggccctttcctttggaacaagacagccttcacttttctgagttcttgaagcatttcaaagccctgcctctgtgtagccgccctgagagagaatagagctgccactgggcacctcgcgcacaggtgggaggaaagggcctgsscagtcctggtcctggctgcactcttgaactgggcgaatgtcttatttaattaccgtgagtgacatagcctcatgttctgtgggggtcatcagggagggttaggaaaaccacaaacggagcccctgaaagcctcacgtatttcacagagcacgcctgccatcttctccccgaggctgccccaggccggagcccagataccggcgggctgtgactctgggcagggacccggggtctcctggaccttgacagagcagctaactccgagagcagtgggcaggtggccgcccctgaggcttcacgccgggagaagccaccttcccrccccttcataccgcctcgtgccagcagcctcgcacaggccctagctttacgctcatcacctaaacttgtactttatttttctgatagaaatggtttcctctggatcgttttatgcggttcttacagcacatcacctctttscccccgacggctgtgacgcagccggagggaggcactagtcaccgacagcggccttgaagacagagcaaagcscccacccaggtcccccgactgcctgtctccatgaggtactggtcccttccttttgttaacgtgatgtgccactatattttacacgtatctcttggtatgcatcttttatagacgctcttttctaagtggcgtgtgcatagcgtcctgccctgccccctcgggggcctgtggtggctccccctctgcttctcggggtccagtgcattttgtttctgtatatgattctctgtggttttttttgaatccaaatctgtcctctgtagtattttttaaataaatcagtgtttacattag

SEQ ID NO: 349 - DNA, 1400 bp, Homo sapiens
gattgtatgcaggcccaatctatagaaacatattctactagctatcctgacaccatggaaaattcaacatcttcaaaacagacactgaagactcctggaaaaagtttcacaaggakywwkmsyttrwawwttttkckwwwsatkmwaaagagtatctgtaattcttgcccaccaaacaagcctgcagaatctgttcagtcaaataactccagctcatttctgaattttggttttgcaaaccgtttttcaaaacccaaaggaccaaggaatccaccaccaacttggaatatttaataaaactccagatttataataatatgggctgcaagtacacctgcaaataaaactactagaatactgctagttaaaataagtgctctatatgcataatatcaaatatgaagatatgctaatgtgttaatagcttttaaaagaaaagcaaaatgccaataagtgccagttttgcattttcatatcatttgcattgagttgaaaactgcaaataaaagtttgtcacttgagcttatgtacagaatgctatatgagaaacacttttagaatggatttatttttcatttttgccagttatttttattttcttttacttttytacataaacataaacttcaaaaggtttgtaagatttggatctcaactaatttctacattgccagaatatactataaaaagttaaaaaaaaaaacttactttgtgggttgcaatacaaactgctcttgacaatgactattccctgacagttatttttgcctaaatggagtataccttgtaaatcttcccaaatgttgtggaaaactggaatattaagaaaatgagaaattatatttattagaataaaatgtgcaaataatgacaattatttgaatgtaacaaggaattcaactgaaatcctgataagttttaaccaaagtcattaaattaccaattctagaaaagtaatcaatgaaatataatagctatcttttggtagcaaaagatataaattgtatatgtttatacaggatctttcagatcatgtgcaatttttatctaaccaatcagaaatactagtttaaaatgaatttctatatgaatatggatctgccataagaaaatctagttcaactctaattttatgtagtaaataaattggcaggtaattgtttttacaaagaatccacctgacttcccctaatgcattaaaaatatttttatttaaataactttatttataacttttagaaacatgtagtattgtttaaacatcatttgttcttcagtatttttcatttggaagtccaatagggcaaattgaatgaagtattattatctgtctcttgtagtacaatgtatccaacagacactcaataaactttttggttgttaaaaaaaaaaaaaaaaaa

SEQ ID NO: 350 - DNA, 1400 bp, Homo sapiens; identical to SEQ ID NO: 349

SEQ ID NO: 351 - DNA, 1400 bp, Homo sapiens
ctctggtatttgacctggatgcaccagggcccggaactatgcccctggctgactggcaggagcccctggccccacctattcgccggtggcgttccttgcctggttcgcctgagttcttgcatcaagaggcttgtccatttgtgggccgggaagaatcgctatctgatgggcccccaccacgcctaagtagtctcaagtacagagttaaagagatcccaccattccgggcatctgccctaccagctgctcaagcccatgaggctatggactgctccattctccaggaagaaaatggttttgggtccaggccccaggggaccagtccatgccctgcgggtgcttctgaggagatggaggtagaagaaaggccagcaggctcaactccagccaccttctccacctcaggcataggcctgcaaacccagggaaagcaggatgggtgagggggtttagtccctgcctcaccttggggatggaccttcagctgaaaccatatggccccctaggtgcacagccttgattcttccctggagcctacagagcaggcaggctaggccaagccaggctcaacttctgggctcccagtgcccattggctgtgtatgacgggaggcagcagtgagaggccttcctagttagggccaacagctgataccaagcctctgaaatccagcaaggaggtctgcctcccaccagaccctctccagtgtacttccccagataggaccagaggatgtctagttctaggctgagctggcaggcagctattaccccggttctttccccaccccaggtctgtctcttgccttttcttggggcatataagctactgagtggaacatggagctgatcaagaggccgtaayggtcatggctgtttcccagacctgaatattggggtgcttcttgccagtattctaagacatttgagtaattgctgtttgcacttactgcatggtcagaccacgtcactacatttctatgcaaggggacagcaaggcagcgtggtggtcatggctcttagctaacctattcaaagaccttttcctgttgattaatctattttcatatttataaaggagtcttaatgttctgccccataagactttcaaccttgtggttgggagtggggctggttttgtaggccctagggcctgcttctatgtatttatcaacatgtgatacattcaattggttaaatggtttatacagggactgatttgcttcccttcctgccatggctggagctttgggaacagtctgtccttacagagctgcaataagaaataaccaaagatgaagctggtcaaatattttcataacttgcttctgttgatttttttttttgtaaaactttcccaagacattttcagacttaaaaataaagtcagtgttacaggtg

SEQ ID NO: 352 - DNA, 600 bp, Homo sapiens
  misc_feature (580)..(581): n is a, c, g, or t
tacacactttaaaccaattaaaaagaaccaaaagtaaatagaaaagacattgaatcaccaaggcctgggatcaacctgggctgtccacacagaaaacaaaaacccaaccaaaccaagccctgttgtgctcactggtgcaaagagaagatcagggcagcttaagtggtctaagratccttcaggcattctttaaggagaaaaaggatacctttgattttgtgtgtttcatgctctggattttttttttttttccttctctgggtttaagagattttttttgaaatagtgaggaactgaccattatatgccttcactggcttcttgtgcaataatatgatgttttaagtgtgcaaacaagttagagctggcagctgaatgatagacaaatagtgcaaatttgccagcttggagatagaaaggaattcaacaatatatcaaatactttccttcccacctttttccttttttttttttttttctgatttgattctggttacagtgccataaaccttgttacatatgtatatcagaatgtaagaaaaaaaaatttatttaaaaatatttttcgcaaaaaaaaaannaaaaaactcgaggggggcc

SEQ ID NO: 353 - DNA, 1184 bp, Homo sapiens
aaatgctgagaatscacttmctawyacatgcyrscwtwkytgrcwtatgrwkwggacaaaggacagaagaccaaagcagttgtcatgctgaaccgcattrtggagaaagaatyggttaaatgtgcacagtactggccaacagatgaccaagagatgctgtttaaagaaacaggattcagtgtgaagctcttgtcagaagatgtgaagtcgtattatacagtacatctacyacaattagaaaatatcaatagtggtgaaaccagaacaatatctcactttcattatactacytggccagattttggagtccctsaatcaccagcttcatttctcaatttcttgtttaaagtgagagaatctggctccttgaaccctgaccatggrcctgyggtgatccacygtagtgcaggcaytggrcgctcyrgcaccttctctctgartasaswcwwgtcttstywwsatgraaaamksasatgakakwamcmtaaaayaagtgttactgaacatgagaaaataccgaatgggtcttattcagaccccagatcaactgagattctcatacatggctataatagaaggagcaaaatgtataaagggagattctagtatacagaaacgatggaaagaactttctaaggaagacttatctcctgcctttgatcattcaccaaacaaaataatgactgaaaaatacaatgggaacagaataggtctagaagaagaaaaactgacaggtgaccgatgtacaggactttcctctaaaatgcaagatacaatggaggagaacagtgagaggccaagattgacagacacctaatattcatgacttgagaatattctgcagctataaattttgaaccattgatgtgcaaagcaagacctgaagcccactccggaaactaaagtgaggctcgctaaccctctagattgcctcacagttgtttgtttacaaagtaaactttacatccaggggatgaagagcacccaccagcagaagactttgcagaacctttaattggatgtgttaagtgtttttaatgagtgtatgaaatgtagaaagatgtacaagaaataaattaggagagattactttgtattgtactgccattcctactgtatttttatactttttggcagcattaaatatttttgctaaaaaaaaaaaaaaaaaaaaaaaaaaaaaa

SEQ ID NO: 354 - DNA, 1184 bp, Homo sapiens; identical to SEQ ID NO: 353

SEQ ID NO: 355 - DNA, 600 bp, Homo sapiens
tgtaggtgagcctgggcagcttctgttggcagagcttttgcatttcctgtgtttgtcctgggttctggggcatcagccagctaccccttgtgggcaaaggcagggccacttttgaagtcttccctcagatttccattgtgtggcctggtgggtcagggggagtctttgcaccaaagatgtcctgactttgcccccttgcccatcagccatttgccatcaccccaaacaactcagcttcggggccggtgaggggaggggcctcccccagcacagatgaggagcagctggggtaggctgtctgtgccatggccccccactcccccttcccttggagggagaggtggcaggaatacttcacctttcctctccctcaggggcaggtggtggaggggcgcccagggtcgtctttgtgtatgggggaaggcgctgggtgcctgcagcgcctcccttgtctcagatggtgtgtccagcactcgattgttgtaaactgttgttttgtatgagcgaaattgtctttactaaacagatttaatagttaaaaaaaaaaaaaaaaaaaaaaaaaaaaaaaaaaaaaaaaaaaaaaaaaaaaaaaaaaggggg

SEQ ID NO: 356 - DNA, 600 bp, Homo sapiens; identical to SEQ ID NO: 355

SEQ ID NO: 357 - DNA, 1400 bp, Homo sapiens
ggccacctcatctaccacgtcggggactggctacaagagcgatatgaaatcgttagcaccttaggagaggggaccttcggccgagttgtacaatgtgttgaccatcgcaggggtggggctcgagttgccctgaagatcattaagaatgtggagaagtacaaggaagcagctcgacttgagatcaacgtgctagagaaaatcaatgagaaagaccctgacaacaagaacctctgtgtccagatgtttgactggtttgactaccatggccacatgtgtatctcctttgagcttctgggccttagcaccttcgatttcctcaaagacaacaactacctgccctaccccatccaccaagtgcgccacatggccttccagctgtgccaggctgtcaagttcctccatgataacaagctgacacatacagacctcaagcctgaaaatattctgtttgtgaattcagactatgagctcacctacaacctagagaagaagcgagatgagcgcagtgtgaagagcacagctgtgcgggtggtagactttggcagtgccacctttgaccatgagcaccatagcaccattgtctccactcgccattaccgagcaccagaagtcatccttgagttgggctggtcacagccttgtgatgtgtggagtataggctgcatcatctttgaatactatgtgggattcaccctcttccagacccatgacaacagagagcatctagccatgatggaaaggatcttgggtcctatcccttcccggatgatccgaaagacaagaaagcagaaatatttttaccggggtcgcctggattgggatgagaacacatcagctgggcgctatgttcgtgagaactgcaaaccgctgcggcggtatctgacctcagaggcagaggaacaccaccagctcttcgatctgattgaaagcatgctagagtatgaaccagctaagcggctgaccttgggtgaagcccttcagcatcctttcttcgcccgccttcgggctgagccgcccaacaagttgtgggactccagtcgggatatcagtcggtgacgatcaggccctgggcccccctgcatcttttatagcagtgggtgtccagtccaggacactggtgcttttttatacaagagaacgagccagagttcactccttcctcctggctctctatatacctgtgaatatgtgaaatagtgtaaatatgaaagaacttgtacctatcacttcaacccctgccttgtacataatactattccatccacacagtttccaccctcacctgccccctcatacggagttggatgggggccgagtgaggtaaccaggtggcatctaccccatgttttataaggaattttgtacagtctttgtgaaataaaataacgtgcttcatttga

SEQ ID NO: 358 - DNA, 600 bp, Homo sapiens
catgctccatcttccagvaggaccactctytgtggcaccytggactmcctgcccccygaaatgattgaaggtcgsatgcatgatgagaaggtggatctctggagccttggagttctttgctrtgaatttttagttgggaagcctccttttgaggcaaayacataccaagagacctacaaaagaatatcacgggttgaattcacattccctgactttgtaacagagggagccagggacctcatttcaagactgttgaagcataatcccagccagaggccaatgctcagagaagtacctcgagcggccgcccgggcaggtacgcggggtatgcaaagtttttgttgaaagctgtgctcagaggaggtgagaggagaggaaggagaaaactgcatcataactttacagaattgaatctagagtctccccgaaaagcccagaaacttctctgcagtatctggcttgtccatctggtctaaggtggctgcttcttccccagccatgagtcagtttgtgcccatgaataatacacgacctgttatttccatgactgctttactgatttttaaggtcaatatactgtacctcgggccgccaccgcgg

SEQ ID NO: 359 - DNA, 600 bp, Homo sapiens; identical to SEQ ID NO: 358

SEQ ID NO: 360 - DNA, 600 bp, Homo sapiens
ggacatagccaagctggtccctraaacccatytgatgtctgaatctgaatggaggaatcttggcrttcagcagagtcagggatgggtccattatatgatccatgaaccagamsmkcacvtckkgstvtkcckkyrymcrctasccwrgamvccwmwkwrrgcctggtgtgctccagatgcctggtctcacctggttggtccaaactgaataggcttgctcatgctgggctttcaaatgcacctaaagaggcctccatggagggagagagccagcaggagctgccgtcacatgacgtctatcctccagagaacgatttgtcttcattggggttggttgctgctgctgttgctgctgctaccttcgccagctacttggctccgtggcagctcgaccctgtgcctcctccatttgacagagctaaggccaaagaaagacattacacccagacagactgtgtgccaggagaaagcagcagccagccagagaaataccatgggaggggagttcttactggtgagatgctgagttcctcaagggaagaacacaaggatcgagaaacacaacaatttctgtactatgctaagcagagactcctgtag

SEQ ID NO: 361 - DNA, 600 bp, Homo sapiens
attcatacactgtgttacatgagagagccaatcttggacctaccacttgaaaccattagtgagctgactctgatgccagtatggactggagatgatgggagccagttggatagccccatggaaatccccaaagagctctggatgatggttgattacctgtaccgaaatgctgtccagcaggaagatctgtttcagcaaccaggcctgagcagcattatcggttccttaacaatggggccaaaagctgccagcaatcattctgtagccgaagccctgctgcttttcctggagagccttccagagcctgtcatctgttacagcacctaccataactgcttggagtgttctggcaactacacagcaagcaaacaggtcatttctactctccccatattccacaaaaatgtcttccactacttgatggcgtttttgcgagaactgctgaaaaattcagcaaaaaatcatttggatgagaatattctagctagcatatttggcagcttattgcttcgaaacccagctggtcaccaaaagcttgatatgacagagaagaagaaggctcaagaatttattcaccagttcctctgcaacccactctga

SEQ ID NO: 362 - DNA, 600 bp, Homo sapiens
gtggcagcccccacccacagcagtttctggcagtttcagaggagggtcaaacacatcacggggcgaagtgccttcttctcatattacggatatggctgctactgtgggcttggggataaagggatccccgtggatgacactgacaggcacagcccctcatctccctctccctacgagaagctgaaggagttcagctgccagcctgtgttgaacagctaccagttccacatcgtcaatggcgcagtggtttgtggatgcacccttggtcctggtgccagctgccactgcaggctgaaggcctgtgagtgtgacaagcaatccgtgcactgcttcaaagagagcctgcccacctatgagaaaaacttcaagcagttctccagccagcccaggkagwssccagmtgcaymascccwgstgcakccatccccttttggcacctttgggactgccacacagacctgggtcctcacccctgtgctcccggccacaccacttggcaccgcgtgtcaagcgacaatggtgctccaggggcactgccaggcgagcttgctggcggctgttgagtccgggcggagggtggcttcagtggttttcgggcag

SEQ ID NO: 363 - DNA, 600 bp, Homo sapiens; identical to SEQ ID NO: 362

SEQ ID NO: 364 - DNA, 600 bp, Homo sapiens
atggacgatgaagccatcattgctgcttggagacgccggcaagaagaaaccaggaccaagctgcagaaaaggagggaggactgagctggggaaaatctgagaacactgaaagaaaccactcacgttagcatagggctcagggcacacgttgccaccactcatcgcaggatgaggatacagagaggatcttccagaggggcagagccaaaatgagaggtaccaagcataagggcagcagaggtggagtagggaggaggcaaggagggggagaaccatcaatacgaatacgaggtccgaatgctggaccaactgataccattttctgttgctcagcgccctctaagctttggtgtttcacttaatgtatttgacagtgttcatcacaggctagagaggtgagcttggaaaagcactgtagtttgtcagagactccagtttacatccagaaaggccatgaacataggacacgcttctgtctgtagaggcttcatatgagacccagaaagtctatcctatggcaagtctgacctctcctggcaatgctcagttctgattttttttttttaatgttttgagtctccattaaaaatggtatgttgg

SEQ ID NO: 365 - DNA, 1400 bp, Homo sapiens
ggaacaggctgaaggttctgaacccacgagtggcactgaggggccagaacattctgtcaatggtcctgcaagtccagcyttaaatcaaggttcataggaaaagacataaatgaggaaactccaaacctcctgttagctgttatttctatttttgtagaagtaggaagtgaaaataggtatacagtggattaattaaatgcagcgaaccaatatttgtagaagggttatattttactactgtggaaaaatatttaagatagttttgccagaacagtttgtacagacgtatgcttattttaaaattttatctcttattcagtaaaaaacaacttctttgtaatcgttatgtgtgtatatgtatgtgtgtatgggtgtgtgtttgtgtgagagacagagaaagagagagaattctttcaagtgaatctaaaagcttttgcttttcctttgtttttatgaagaaaaaatacattttatattagaagtgttaacttagcttgaaggatctgtttttaaaaatcataaactgtgtgcagactcaataaaatcatgtacatttctgaaatgacctcaagatgtcctccttgttctactcatatatatctatcttatatagtttactattttacttctagagatagtacataaaggtggtatgtgtgtgtatgctactacaaaaaagttgttaactaaattaacattgggaaatcttatattccatatattagcatttagtccaatgtctttttaagcttatttaattaaaaaatttccagtgagcttatcatgctgtctttacatggggttttcaattttgcatgctcgattattccctgtacaatatttaaaatttattgcttgatacttttgacaacaaattaggttttgtacaattgaacttaaataaatgtcattaaaataaataaatgcaatatgtattaatattcattgtataaaaatagaagaatacaaacatatttgttaaatatttacatatgaaatttaatatagctatttttatggaatttttcattgatatgaaaaatatgatattgcatatgcatagttcccatgttaaatcccattcataactttcattaaagcatttactttgaatttcwmmaawrmwwaraatgtttttaccaggaatggatgtcgctaatcataataaaattcaaccattatttttttcttgtttataatacattgtgttatatgttcaaatatgaaatgtgtatgcacctattgaaatatgtttaatgcatttattaacatttgcaggacacttttacaggccccaattatccaatagtctaataattgtttaagatctagaaaaaaaaaatcaagaatagtggtatttttcatgaagtaataaaaactcgttttggtgaaaaaaaaaa

SEQ ID NO: 366 - DNA, 1400 bp, Homo sapiens; identical to SEQ ID NO: 365

SEQ ID NO: 367 - DNA, 600 bp, Homo sapiens
tttgagccagagagcatctttcccctgtgcttggaaaccttttttccttcttgacatttatcacctctgatggctgaagaatgtagacaggtataatgatactgcykkkcmccwmrakyyctayasyraggtawwcaggtgkttgccttatttaattttttactttcagttctacgtgaattagctttttctcagatgttgaaactttgaatgtccttttatgattttgtttatattgcagtagtatttattttttagtgatgagaattgtatgtcatgttagcaaacgcagctccaacttatataaaatagacttactgcagttacttttgacccatgtgcaaggattgtacacgttgatgagaatcatgcactttttctcctctgttaaaaaaaatgataaggctctgaaatggaatatattggttagaatttggctttgggagaagagatgctgccatttaaccccttggtactgaaaatgagaaaatccccaactatgcatgccaaggggttaatgaaacaaatagctgttgacgtttgctcatttaagaatttgaaacgttatgatgacctggcaacaaaaaaaaaaaaaaaaaa

SEQ ID NO: 368 - DNA, 600 bp, Homo sapiens
taagtattttagacattcctcgtcagtattaggaatttccatgggaaaagaggtttgcatgctggtaatgcaacctttgaaactttgtaaaggaaacatatatgtatatatttatgtatatgtaagtatgtgaatgtgcgcattttgcattccatatgaaaaaaatgccacgtctgtttaaattatttgatgtaggtttgggtttttgagatttgctggtgaagtcagtgacgaaaaataaaccttcccttatcttcctactctgcccctccccctaatgaaatcatattaagttgtttttccttttttttttgtaatatacagctttttttttaaggcatcattttcgagggtctaaaattatctggtaaaacaaatgaaattaagtgatccaaagctgctgaagtatgtttgaactctccagtgccctatagctgcragagttgaattagtcatgcagtcatatggcagcaggttggtgattcagtccgaccttctttaggtaaccgagcatttatttaaccaactataccactgcattgggacgtctgcacttgagcttctacaatctgatataaatctgaatacaggattattctg

SEQ ID NO: 369 - DNA, 600 bp, Homo sapiens; identical to SEQ ID NO: 368

SEQ ID NO: 370 - DNA, 600 bp, Homo sapiens
cagctgcagacctgtacaccaaacttccaggaggaggccacctgcgccatatccgtcgactacttcacacatactgtgatgaccgactcagccacaacttctgccgcgagtgcatccggcgctgctggggccacccgaagcccgcgtgtgccccgccaccgcgagccactggccgccttctgtggcgacgactgcgcctcctgtgtgcggcctgcgagcgctctggggagcactgggaggcaccgacgaactgctgcaggacgcggccgaagacctcaagggtggctgtgggggctcatgacacagcctgtttcaaccaggccccttgaggctgggaccatggccgccaatgagaccctgctctcggggacttggttccgcacacccctcccgccgctgggccacgtgctgagcctagtgtgtcccaggggccggccctgcgcgtccagctgcctgcagtgcccgtggctaacagaggaggcccggcctgttcgcggccgcgcccgtgaccttccctaccgcgctcgcgtcttcgtgcgcaatcgcgagaagagacgcgcgctgctgtacaagaggcacaacctggcccaggtgcgctga

SEQ ID NO: 371 - DNA, 1400 bp, Homo sapiens
aycagatatctggtcattgggcygyttgcygtatgagtyrbgtgcattaatgcctccatttacagcttttagccagaaagaactygctgggaaaatcagagaaggcaaattcaggcraattcyataccrtkactctgaygaattgaatgaaattattaygaggatgttaaacttaaaggattaccatcgaccttctgttgaagaaattctygagaaccctttaatagcagatttggttgcagamgarcraagaagaaatcttgagagaagagggcgacaattaggagagccagaaaaatygcmggattccagccytgtattgagtgagctgaaactraaggaaattcagttasaggagcragagcgagctctcaaagcargagaagaaagrttggagcagaaagaacaggagytttgtgtyygtgagagactagcagaggacaractggctakascagaaaatctgttgaagaaytacagcttgctaaaggaacrgaagttcctgtctctggcaagtartccagaacttcttartcttccatcctcagtaattaagaagaaagktcatttcagtggggaaagtaaagagaayrtcatgaggagtgagaatyctgagagtcagctcacatctaagtccaagtgcaaggacctgaagrwmgcakgcttcaygctgcccagctgcgggctcaagccctgtcagatwttgagaaaaattaycaactraaaagcagmcagatcctgggcatgcgctagccaggtagagagacacagagctgtgtacaggatgtaatattaccaacctttaaagactgatattcaaatgctgtagtgttgaatacttggyyccatgagccatgcctttctgtatagtacacatgatatttcggaattggttttactgttcttcagcaactattgtacaaaatgttcacatttaatttttctttcttcttttaagaacatattataaaaagaatactttcttggttgggcttttaatcctgtgtgtgattactagtaggaacatgagatgtgacattctaaatcttgggagaaaaaataatrttaggaaaaaaatatttatgcaggaagagtagcactcactgaatagttttaaatgactgagtggtatgcttacaattgtcatgtctagatttaaattttaagtctgagattttaaatgtttttgagcttagaaaacccagttagatgcaatttggtcattaataccatgacatcttgcttataaatattccattgctctgtagttcaaatctgttagctttgtgaaaattcatcactgtgatgtttgtattctttttttttttctgtttaacagaatatgagctgtctgtcatttacctacttctttcccactaaataaaagaattcttcagtta

SEQ ID NO: 372 - DNA, 1400 bp, Homo sapiens; identical to SEQ ID NO: 371

SEQ ID NO: 373 - DNA, 1323 bp, Homo sapiens
  misc_feature (47)..(47): n is a, c, g, or t
  misc_feature (1310)..(1310): n is a, c, g, or t
aattcggcacgagcggcacgagggaaattgagcggagagcgacgcgnttgttgtagctgccgctgcggccgccgcggaataataagccgggatctaccatacccattgactaactatggaagattataccaaaatagagaaaattggagaaggtacctatggagttgtgtataagggtagacacaaaactacaggtcaagtggtagccatgaaaaaaatcagactagaaagtgaagaggaaggggttcctagtactgcaattcgggaaatttctctattaaaggaacttcgtcatccaaatatagtcagtcttcaggatgtgcttatgcaggattccaggttatatctcatctttgagtttctttccatggatctgaagaaatacttggattctatccctcctggtcagtacatggattcttcacttgttaagagttatttataccaaatcctacaggggattgtgttttgtcactctagaagagttcttcacagagacttaaaacctcaaaatctcttgattgatgacaaaggaacaattaaactggctgattttggccttgccagagcttttggaatacctatcagagtatatacacatgaggyartaacactctggtacagatctccagaagtattgctggggtcagctcgttactcaactccagttgacatttggagtataggcaccatatttgctgaactagcaactaagaaaccacttttccatggggattcagaaattgatcaactcttcaggattttcagagctttgggcactcccaataatgaagtgtggccagaagtggaatctttacaggactataagaatacatttcccaaatggaaaccaggaagcctagcatcccatgtcaaaaacttggatgaaaatggcttggatttgctctcgaaaatgttaatctatgatccagccaaacgaatttctggcaaaatggcactgaatcatccatattttaatgatttggacaatcagattaagaagatgtagctttctgacaaaaagtttccatatgttatgtcaacagatagttgtgtttttattgttaactcttgtctatttytstcttatatatatyyctytgttatcaaacttcagcygtacttcgtcttctaatttcaaaaatataacttaaaaatgtaaatattctatatgaatttaaatataattctgtaaatgtgtgtaggtctcactgtaacaactatttgttactataataaaactataatattgatgtcaggaaaaaaaaaaaaaaaaaaaaaaaaaaaaaaaaaaaaaagggcggccgctngcgatctagaact

SEQ ID NO: 374 - DNA, 1323 bp, Homo sapiens; identical to SEQ ID NO: 373
  misc_feature (47)..(47): n is a, c, g, or t
  misc_feature (1310)..(1310): n is a, c, g, or t

SEQ ID NO: 375 - DNA, 1400 bp, Homo sapiens
taaataattggaaaagtaatcagcatatgtgtaaagatttatacagttgaaaacttgtaatcttccccaggaggagaagaaggtttctggagcagtggactgccacaagccaccatgtaacccctctcacctgccgtgcgtactggctgtggaccagtaggactcaaggtggacgtgcgttctgccttccttgttaattttgtaataattggagaagatttatgtcagcacacacttacagagcacaaatgcagtatataggtgctggatgtatgtaaatatattcaaattatgtataaatatatattatatatttacaaggagttattttttgtayygattttaaatggatgtcccaatgcacctagaaaattggtctctctttttttaatagctatttgctaaatgctgttcttacacataatttcttaattttcaccgagcagaggtggaaaaatacttttgctttcagggaaaatggtataacgttaatttattaataaattggtaatatacaaaacaattaatcatttatagttttttttgtaatttaagtggcatttctatgcaggcagcacagcagactagttaatctattgcttggacttaactagttatcagatcctttgaaaagagaatatttacaatatatgactaatttggggaaaatgaagttttgatttatttgtgtttaaatgctgctgtcagacgattgttcttagacctcctaaatgccccatattaaaagaactcattcataggaaggtgtttcattttggtgtgcaaccctgtcattacgtcaacgcaacgtctaactggacttcccaagataaatggtaccagcgtcctcttaaaagatgccttaatccattccttgaggacagaccttagttgaaatgatagcagaatgtgcttctctctggcagctggccttctgcttctgagttgcacattaatcagattagcctgtattctcttcagtgaattttgataatggcttccagactctttggcgttggagacgcctgttaggatcttcaagtcccatcatagaaaattgaaacacagagttgttctgctgatagttttggggatacgtccatctttttaagggattgctttcatctaattctggcaggacctcaccaaaagatccagcctcatacctacatcagacaaaatatcgccgttgttccttctgtactaaagtattgtgttttgctttggaaacacccactcactttgcaatagccgtgcaagatgaatgcagattacactgatcttatgtgttacaaaattggagaaagtatttaataaaacctgttaatttttatactgacaataaaaatgtttctacagatattaatgttaacaagacaaaataaatgtcacgcaactta

SEQ ID NO: 376 - DNA, 600 bp, Homo sapiens
ccagatattgatcagtggaataaagttattgaacagcttggaacaccatgtcctgaattcatgaagaaactgcaaccaacagtaaggacttacgttgaaaacagacctaaatatgctggatatagctttgagaaactcttccctgatgtccttttcccagctgactcagaacacaacaaacttaaagccagtcaggcaagggatttgttatccaaaatgctggtaatagatgcatctaaaaggatctctgtagatgaagctctccaacacccgtacatcaatgtctggtatgatccttctgaagcagaagctccaccaccaaagatccctgacaagcagttagatgaaagggaacacacaatagaagagtggaaagaattgatatataaggaagttatggacttggaggagagaaccaagaatggagttatacgggggcagccctctcctttaggtgcagcagtgatcaatggctctcagcatccatcatcatcgtcgtctgtcaatgatgtgtcttcaatgtcaacagatccgactttggcctctgatacagacagcagtctagaagcagcagctgggcctctgggctgctgtagatga

SEQ ID NO: 377 - DNA, 600 bp, Homo sapiens; identical to SEQ ID NO: 376

SEQ ID NO: 378 - DNA, 600 bp, Homo sapiens
ttggtcgtgatctgtacaggggcttgcctacagaggaaaggatccagaaactagagttcatgttggataagctacagaatgaaattgatcaggagttggaacacaataattcccttgttagagaagaaaaagagacaactgatacaaggaaaaaatcacttctttctgctgccttagctaaatcaggtgaaaggctacaagctctaacacttcttatgattcactacagagcaggcattgaagatatagaaactttagaaagtctgtctttagaccagcactccaaaaaaataagcaagtacacagatgatacagaagaagaccttgataatgaaataagccaactaatagactctcagccattcagcagcatatcagatgacttatttggcccatccgagtctgtgtagcagacaggtctatttaaactttcaaatgaacagggtaaagttgcatctaaagtaccacagatacaaccatgtttaaatcctcgtatgcactctggcctgcttctccagttacttgcttgtgtaagaacaaaaatgagaaaggttgttttccagtaaaaacatgaccagcttaaaaaaaaaaaaaaaaaaa

SEQ ID NO: 379 - DNA, 600 bp, Homo sapiens; identical to SEQ ID NO: 378

SEQ ID NO: 380 - DNA, 600 bp, Homo sapiens
gttttcatcatgattaagatgattcctagatttagcacaatggagagattccatgccatctttactatgtggatggtggtatcagggaagagggctcacaagacacatttgtcccccgggcccaccacatcatcctcacgtgttcggtactgagcagccactacccctgatgagaacagtatgaagaaagggggctgttggagtcccagaattgctgacagcagaggctttgctgctgtgaatcccacctgccaccagcctgcagcacaccccacagccaagtagaggcgaaagcagtggctcatcctacctgttaggagcaggtagggcttgtactcactttaatttgaatcttatcaacttactcataaagggacaggctagctagctgtgttagaagtagcaatgacaatgaccaaggactgctacacctctgattacaattctgatgtgaaaaagatggtgtttggctcttatagagcctgtgtgaaaggcccatggatcagctcttcctgtgtttgtaatttaatgctgctacaagatgtttctgtttcttagattctgaccatgactcataagcttcttgtcattcttcattgc

SEQ ID NO: 381 - DNA, 600 bp, Homo sapiens; identical to SEQ ID NO: 380

SEQ ID NO: 382 - DNA, 1400 bp, Homo sapiens
cacgtgctgaacgccgcccacaagggcctctactgtcagggcggccctgacttctacggcagcagtgtgagctacctgggggtgccagcccacgacctccctgattttgacatcagtgcctacttctcctctgcggctgacttcatccaccgtgccctcaacacgcctggggssttkktcrccmgsakgtmyysstcmgcsaakkycckggtssacyswsksgtssgcgtgagccgctctgccacgctggtcctggcctacctcatgctgcaccagcggctgtccctgcgccaggcggtgatcaccgtgaggcagcaccgatgggtcttccccaaccgaggcttcctgcaccagctctgcaggctggaccagcaactgcggggtgccggccagagctgaggggccagagctggtccttactccctgccatggggctctgccactttgccaccctggcactgatcctgctggtgctgctggaggctctggcccaggcggacacacagaagatggtggaagcccagcgtggggtcggccctagagcctgctactccatctggctcctcctggcgcctacaccccctctcagccactgtcttcagtctccacagaaacagcatcaagtgtgcggagacaggcggctgaaagccggcagcacgaactgcccgtcagagaagtgcacagcctgggccagatactcccacaggatggactcactgcagaagcaggacctccggaggcccaagatccatggggcagtccaggcatctccctaccagccgcccacattggcttcgctgcagcgcttgctgtgggtccgtcaggctgccacactgaaccatatcgatgaggtctggcccagcctcttcctgggagatgcgtacgcagcccgggacaagagcaagctgatccagctgggaatcacccacgttgtgaatgccgctgcaggccgcgtgctggtacactgtgccatgggggtaagccgctctgccacacttgtcctggccttcctcatgatctgtgagaacatgacgctggtagaggccatccagacggtgcaggcccaccgcaatatctgccctaactcaggcttcctccggcagctccaggttctggacaaccgactggggcgggagacggggcggttctgatctggcaggcagccaggatccctgacccttggcccaaccccaccagcctggccctgggaacagcaggctctgctgtttctagtgaccctgagatgtaaacagcaagtgggggctgaggcagaggcagggatagctgggtggtgacctcttagcgggtggatttccctgacccaattcagagattctttatgcaaaagtgagttcagtccatctctataataaaatattcatcgtcataaaaaaaaaaaa

SEQ ID NO: 383 - DNA, 1400 bp, Homo sapiens; identical to SEQ ID NO: 382

SEQ ID NO: 384 - DNA, 1400 bp, Homo sapiens
cgaatgcagcctggagcaggccctgcgccacgtgcaggagctccggcccatcgcccgccccaaccctggcttcctgcgccagctgcagatctaccagggcatcctgacggccagccgccagagccatgtctgggagcagaaagtgggtggggtctccccagaggagcacccagcccctgaagtctctacaccattcccacctcttccgccagaacctgagggtggtggggaggagaaggttgtaggcatggaagagagccaggcagccccgaaagaagagcctgggccacggccacgtataaacctccgaggggtcatgaggtccatcagtcttctggagccctccttggagctggagagcacctcagagaccagtgacatgccagaggtcttctcttcccacgagtcttcacatgaagagcctctgcagcccttcccacagcttgcaaggaccaagggaggccagcaggtggacagggggcctcagcctgccctgaagtcccgccagtcagtggttaccctccagggcagtgccgtggtggccaaccggacccaggccttccaggagcaggagcaggggcaggggcaggggcagggagagccctgcatttcctctacgcccaggttccggaaggtggtgagacaggccagcgtgcatgacagtggagaggagggcgaggcctgagccctcacacatgcccacgctcccctgacactgaagaggatccacaactccttggagaaacaccctcacgtctgttgccgcacacattcctctcagctccgccccatacccgtcactacagcctcacctcccacccctgtcactacggcctcacctcccacccctgtcactacagcctcacctcctacagccttaagtcccaggcccatgtctgcctgtccaagggctcaagactttctaactgggatgtggtagagggactgaaggtacctttgggggcaacagcaccctagtttcattctcaactctagccctgcacactcacctgtggcacggaatgaaaacagagcttcccgtgcaaaaagggtcacgcctcccacccccgccccctccctgcacctcctgtcctctcccagttcattcctggaaccagccaggccaggcaaccagtggcccccaaaggcaggcaggatcctcaggccccagccgcgggaggctggaagggctggcagatcgcttccctcatccacctccaccggtccaggtctttgctgctgtccccagacctcctgtgacaccacgccagatcacagggcaccaggccagagatagtcttctttttgtcctttctggcctctggctagtcagtttttcatagccttacagtatctggctttgtactgagaaataaaacacattttcataaaaaaaaaaa

SEQ ID NO: 385 - DNA, 1400 bp, Homo sapiens; identical to SEQ ID NO: 384

SEQ ID NO: 386 - DNA, 134 bp, Homo sapiens
ctgtaagagccatcgccaagatccggtcatacatccacatcaggcctggccagctggatgttcttaaagagttccacaagcagattactgcacgggcaacaaaggatgggacttttgtcatttcaaagacatga

SEQ ID NO: 387 - DNA, 600 bp, Homo sapiens
gattaaaccagccttctgcagtgggtactcgtcagcaaaaattgacatcagcattccagcagcagcatttgaacttcagtcaggttcagcactttggatctgggcwwcaagagtggaatggaaactttgggcacagaagacagcaagcttatattcctactmgtgttaccagtaatccattcactctttctcatggaagtcccaatcacacagcagtgcatgcccacctggctggaaatacacacctcggaggacagcctactctacttccatacccatcatcagccaccctcagtagtgctgcaccagtggcccacctgttagcctctccgtgtacctcaagacctatgttacagcatccaacttataatatctcccatcccagtggcatasttcaccaagtcccagtgggcttaaatccccgtstgttaccatccccaaccattcatcagactcagtacaaaccaatcttcccaccacattcttaacattgcagcaatcacctgcatatactgattccactgagtccaacaaaactcagccagtatccatatatgtgaaaaacagtatattgggaagctcaatgatacaaacatttga

SEQ ID NO: 388 - DNA, 600 bp, Homo sapiens; identical to SEQ ID NO: 387

SEQ ID NO: 389 - DNA, 600 bp, Homo sapiens
tccctgttcctctacggcaccgagaaggtccgcctgacctacctcaggaaccagctggcagagaaggacgagttcgacatcccggacctcaccgacaacagccggcgccagctgttccgcaccaagagcaagcgccgcttctttttccgcgtgtcggaggagcagcagaagcagcagcgcagggagatgctgaaggacccttttgtgcgctccaagctcatctcgccgcctaccaacttcaaccacctagtacacgtgggccctgccaacgggcggcccggcgccagggacaagtccccgcctccatgggcagcgaaggcctcggtggagacgcagaccccagtaagggcagcccctcagcctccagtgtgccaccccccaccccaagtttctaccccctttggatccctgaaatctgatcttggtatttttgtctcctcgtctgctgctggagcagtgaagaggaaaccctggacatccctgtccagcgagtctgtgtcctgcccccagggatcgctgagccctgcaacctccctaatgcaggtctcagaacggccccgaagcctccccctatcccctgaattggagagctctccttga

SEQ ID NO: 390 - DNA, 600 bp, Homo sapiens; identical to SEQ ID NO: 389

SEQ ID NO: 391 - DNA, 600 bp, Homo sapiens
ctgctcctgctgcagtggtatgagccgctgcagaagtttctgctgctgaagaacttctccagccctctgcccagcccagctgggatgctggagccgctggtgctggatgggaaggagctgccgcaggtgtgtgttggggccgaggggcctgaggggcccggctgccgcgtcctgttccatgtcctgcccctggaggctggcctgacgcccgacatcctcatcccacctgaggggatcccaggctcggcccagcaggtgatccaggtggacagggacacaatcctagtcagctttgaacgctgtgtgaggattgtcaacatgcagggcgagcccacggccacactggcacctgagctgacctttgatttccccatcgagactgtggtgtgcctgcaggacagtgtgctggccttctggagccatgggatgcaaggccgaagcctggataccaatgaggtgacccaggagatcacagatgaaacaaggatcttccgagtgcttggggcccacagagacatcatcctggagagcattcccmctgacaacccagaggcgcacagcaacctctacatcctcacgggccaccagagcacctactaa

SEQ ID NO: 392 - DNA, 600 bp, Homo sapiens; identical to SEQ ID NO: 391

SEQ ID NO: 393 - DNA, 600 bp, Homo sapiens
tgggaaaacagctccgtccctgttgccttttctcacttccggtttgacgtggagtgtggggatgaagtcctgtactgctatgaagtgcagttggaaagcaaggtgcggcggaaaggcctggggaagttcctcatacagatcctgcagctcatggccaacagcacacagatgaagaaggttatgttaacagtatttaaacacaatcatggtgcctaccagttcttcagagaagcgttgcaacctcacgtggtgggcagtggcggcaacgacaaagaaaaggaagaatttcgggaggccaagccccgctccctccgcttcacgtggagtatgaagaccacgagctccatggagcccaacgagatgatgcgggagatccgcaaggtgctggacgcgaacagctgccagagcgagctgcatgagaagtacatgctgctgtgcatgcacggcacgccgggccacgaggacttcgtgcagtgggagatggaggtgtgcaaactgccgcggctctctctcaacggggttcgatttaagcggatatcgggcacctccatggccttcaaaaacattgcctccaaaatagccaacgagctgaagctttaa

SEQ ID NO: 394 - DNA, 600 bp, Homo sapiens; identical to SEQ ID NO: 393

SEQ ID NO: 395 - DNA, 476 bp, Homo sapiens
tcaggcatgttcatattttacatctaatgctttgccattgaagattactttcatcaatgctaatccgatgggcaaaaacatcagcattatttttmaggctggagatgatcttcgtcaggatatgcttgttctgcagcttattcaagtgatggacaatatttggctgcaggaaggcttggatatgcaaatgatcatttatagatgtctatccacaggaaaagaccaaggtcagtatagattagaaagtgcgctggctcacattatttatttcacacattcactagtaataggctacgaaactttctccagctttcgtkramckagcwmstttsatttttacttcagagatggaatactttattacagagggtgggaaaaacccacagcattttcaagattttgtggaactttgctgtcgtgcttataatattatcagaaagcacagccaactgctcttgaacctgctggaaatggta

SEQ ID NO: 396 - DNA, 476 bp, Homo sapiens; identical to SEQ ID NO: 395

SEQ ID NO: 397 - DNA, 600 bp, Homo sapiens
tttgcctcacctaataggctgggagactgaagactcagcccgggtggggstgcagaaaaatgattggccccagtccccttgtttgtcccttctacaggcatgaggaatctgggaggccctgagacagggattgtgcttcattccaatctattgcttcaccatggccttatgaggcaggtgagagatgtttgaatttttctcttccttttagtattcttagttgttcagttgccaaggatccctgatcccattttcctctgacgtccacctcctaccccataggagttagaagttagggtttaggcatcattttgagaatgctgacactttttcagggctgtgattgagtgagggcatgggtaaaaatatttctttaaaagaaggatgaacaattatatttatatttcaggttatatccaatagtagagttggctttttttttttttttttggtcatagtgggtggatttgttgccatgtgcaccttggggttttgtaatgacagtgctaaaaaaaaaaagcatttttttttatgatttgtctctgtcacccttgtccttgagtgctcttgctattaacgttatttgtaatttagtttgta

SEQ ID NO: 398 - DNA, 600 bp, Homo sapiens
ctctgagagcgaattgtgtggagaactcagtgccacacctcgaactggttgtagtgggaagtcccgcgaaacccggtgcatctggcacgtggccaggagccatgacaggggcgcttgsgaggggccggaggaaccgaggtgttgccagtgctaagctgccctgagggtttccttcggggaccagcccacagcacaccaaggtggcccggaagaaccagaagtgcagcccctctcacaggcasctctgagccgcgctttcccctcctccctgggatggacgctgccgggagactgccagtggagacggaatctgccgctttgtctgtccagccgtgtgtgcatgtgccgaggtgcstcccccgttgtgcctggttcgtgccatgcccttacacgtgcgtgtgagtgtgtgtgtgtgtctgtaggtgcgcacttacctgcttgagctttctgtgcatgtgcaggtcgggggtgtggtcgtcatgctgtccgtgcttgctsgtgcctcttttcagtagtgagcagcatctagtttccctggtgcccttccctggaggtctctccctcccccagagcccctcatgccacagtggtactctgtgt

SEQ ID NO: 399 - DNA, 1400 bp, Homo sapiens
caacctgggctcacctgttgtgctttgccataatgacctattgtgtaagaatataatctacaatgagaaacaaggtgatgtacagttcattgattatgaatattctggatacaactacctggcatatgatattggaaatcatttcaatgaatttgcaggtgtgagtgatgtagactatagtctgtatccagatagagaactacagagtcagtggctgcgtgcttaccttgaagcctacaaagaatttaagggctttgggactgaagttactgaaaaggaggtagaaatactcttcattcaagtcaatcagtttgcattggcttctcatttcttttggggattgtgggctttgattcaagccaaatactccactattgagtttgatttccttgggtatgcaattgttcgttttaaccagtactttaaaatgaagcctgaggttactgcattaaaagtgcctgagtaaagaagagatttaattattctccagtagctgagcaatgcttgtgaatcttttcttaagaaatcccaaaaagccaatattagttaaaattctgttgtttaatttggttatcttgctttataaattatgcctctaaacaatcaaatctatttttgaaatagactgaatgatgtcaagaaatatacctactgctatccgtatgtggtggattagaaatgtgttaaatctgcaaaaggtataaagatgtcagtttaatttctttgataatttaacctatgttgtatgtgaattatttattataaacttagcacgattctgtgactgtttttctctgtttcacgttcgttgagtgtaagcaatgaaaatgtcccaaataagttttttaagttttactttaataagattaatttcagtaaacattctagttgttcagtgtaacctttttatcttgatgcattgtaagtaaaatgaatcatttactcttgaaatgccagtcattgactgatgtagataatttaggattttcatataaaaatagctgtttaggaaggtgaaatacattcactgtctctgttggtggtacatcttgttgaattcaatattagaaagtatttctttttggggtaatataacttagaattaaatccctgtttctctatgtagtctggcagtataaatataaatatttaccatataatcttggaataagtattagttaatgttaccaaaatctgtattaaataatgttttcaaatgctaaatatggtcgttactattttcagttttaaaaattttatagtatcaaattgtttctaaccaaaaatttccttttacttctagagatgctttatgtttttgattattaaatagtcactagtattgctaatttttgaaacaaatacccaaaatttatcatatgtagaaataagaaaaaaaa

SEQ ID NO: 400 - DNA, 1400 bp, Homo sapiens; identical to SEQ ID NO: 399

SEQ ID NO: 401 - DNA, 600 bp, Homo sapiens
  misc_feature (370)..(370): n is a, c, g, or t
  misc_feature (379)..(379): n is a, c, g, or t
  misc_feature (467)..(467): n is a, c, g, or t
  misc_feature (544)..(544): n is a, c, g, or t
  misc_feature (579)..(579): n is a, c, g, or t
  misc_feature (584)..(584): n is a, c, g, or t
  misc_feature (587)..(587): n is a, c, g, or t
ttcagtttctccccatgaagcgctctcgtctgacatttgtttggaatcgtgccactgctggtctgcgccagatgtaccgtcctttccaatacgattttctgttgcaccttgtagtggattctgcatatcatctttcccacctaaaaatgtctgaatgcttacacaaataaattttataacacgcttawwwwrcatactccttgaaatgtgactcttcagaggacagggtacctgctgtgtatgtgtggccgtgcgtgtgtactcgtggctgtgtgtgtgtgatgagacactttggaagactccagggagaagttcccagggctggagctgccgagtgcccaggtcagcgccctgggctgcttgcgcaatngctcaccgngatgatgcattggaggttgctgacctgtgcgattgctgtagcggttgccagggaccttaaggggttattttgcttccctgggaggggncctatgtttctaggcaagcagccatgtgtctaattttctgggtttgctgtggggacctgattgggggagggggaaanctttggggttcttggagtgggagggttcgtgccancaatnttncctggtaaaaaag

SEQ ID NO: 402 - DNA, 600 bp, Homo sapiens; identical to SEQ ID NO: 401
  misc_feature (370)..(370): n is a, c, g, or t
  misc_feature (379)..(379): n is a, c, g, or t
  misc_feature (467)..(467): n is a, c, g, or t
  misc_feature (544)..(544): n is a, c, g, or t
  misc_feature (579)..(579): n is a, c, g, or t
  misc_feature (584)..(584): n is a, c, g, or t
  misc_feature (587)..(587): n is a, c, g, or t

SEQ ID NO: 403 - DNA, 570 bp, Homo sapiens
atcaaaaagtacatgctcctcaagaccattggcaggggcgtgttcgtcaaggtgaagctaacagggcacatactgactgggacacaggtggttacaaaaatcatctataaaatgagtggcttccctagcctctctctacagaaagaggtagaaatcatgaaggtcccgaatcacctgaacatcattaaactcaaccaggtgattggcaggtggacaccctatttagtgatggaatatgccctcgaaggagtgcttttccaccaaatacaccatcacagccacatcaaagatgacaagaaggcccgggccatgtttaagcagacaccgtccaccctccagtacagctacagaaagaaaatcgtgaactgggacctgaagccgcagaacatcctactgcatgaagaacataacttaaatatagtcaactttggtttcagcaccacatttgcrgaaggagagatgctgggagccttttatgggacttgctcttatgttgccccagaactcttcctgggccatggttaccaagtccctaacaccttatttctctctctaaggcaggtcttttag

SEQ ID NO: 404 - DNA, 600 bp, Homo sapiens
cctggagtaaatgaactggaccaaatctcaaaaatccacgatgtcatcggcacacccgctcagaagatcctcaccaagttcaaacagtcgagagctatgaattttgattttccttttaaaaagggatcaggaatacctctactaacaaccaatttgtccccacaatgcctctccctcctgcacgcaatggtggcctatgatcccgatgagagaatcgccgcccaccaggccctgcagcacccctacttccaagaacagaggaaaacagagaagcgggctctgggcagccacagaaaagctggctttcmkgakcmcsmtgwggmaycgsrmccactcagkmacagctgccagmwyyccwaskwssrcagaacagcagaaacagtccctaaagcaagaggaggaccgtcccaagagacgaggaccggcctatgtcatggaactgcccaaactaaagctttcgggagtggtcagactgtcgtcttactccagccccacgctgcagtccgtgcttggatctggaacaaatggaagagtgccggtgctgagacccttgaagtgcatccctgcgagcaagaagacagatccgcagaaggaccttaa

SEQ ID NO: 405 - DNA, 600 bp, Homo sapiens
ccagctgaccctgggcattgcctacctgcacagcaagagcatcgtgcaccgggacttaaagttggagaacctgttgctggacaagtgggagaatgtgaagatatcagactttggctttgccaagatggtgccttctaaccagcctgtgggttgtagcccttcttaccgccaagtgaactgcttttcccacctcagccrgacttactgtggcagctttgcttacgcttgcccagagatcttacgaggcttgccctacaaccctttcctgtctgacacctggagcatgggcgtcatcctttacactctagtggtcgcccatctgccctttgatgacaccaatctcaaaaagctgctaagagagactcagaaggaggtcactttcccagctaaccataccatctcccaggagtgcaagaacctgatcctccagatgctacgccaagccactaagcgtgccaccattctggacatcatcaaggattcctgggtgctcaagttccagcctgagcaacccacccatgagatcaggctgcttgaggccatgtgccagctccacaacaccactaaacagcaccaatccttgcaaattacctgacctga

SEQ ID NO: 406 - DNA, 600 bp, Homo sapiens; identical to SEQ ID NO: 405

SEQ ID NO: 407 - DNA, 600 bp, Homo sapiens
aatgcaggtggctctgtaatgattcagcgtgtgaatggctctctggctgtatcgagggcccttggggattttgattacaaatgtgtccatggaaaaggtcctactgagcagcttgtctcaccagagcctgaagtccatgatattgaaagatctgaagaagatgatcagttcattatccttgcatgtgatggtatctgggatgttatgggaaatgaagagctctgtgattttgtaagatccagacttgaagtcactgatgaccttgagaaagtttgcaatgaagtagtcgacacctgtttgtataagggaagtcgagacaacatgagtgtgattttgatctgttttccaaatgcacccaaagtatcgccagaagcagtgaagaaggaggcagagttggacaagtacctggaatgcagagtagaagaaatcataaagaagcagggggaaggcgtccccgacttagtccatgtgatgcgcacattagcgagtgagaacatccccagcctcccaccagggggtgaattggcaagcaagaggaatgttattgaagccgtttacaatagactgaatccttacaaaaatgacgacactgtaagtagc

SEQ ID NO: 408 - DNA, 600 bp, Homo sapiens
tacagagatgcttttgcttatgttcaagaaagaagattttgtattaatcctaatgctggatttgtccatcaacttcagkmatwtgragycatcyacmtagmarmaytarcamtwcakmtgatgtcaccactccagatagaaaggtcattatctgttcattctggtaccacaggcagtttgaagagaacacatgaagaagaggatgattttggaaccatgcaagtggcgactgcacagaatggctgacttgaagagcaacatcatagagtgtgaatttctatttgggaaggagaaaatacaagagaaaattataatgtaaaawrrwaaaaamawaagtagtttttttttcaattacatgttgcttccagacatacttctctgcaacttgttgagcaacattttaagatgttggacttctgcaatagatgacactgatggttttactcctttttttaaaaacacatgcgcgcgcacacacacatgctttacaagttttattataaaccaagaattttggacttgcaaagaggtattattgcaataatgcacttttcatacttgaaatttatttgtatgatataaagttattactttaaacaa

SEQ ID NO: 409 - DNA, 600 bp, Homo sapiens; identical to SEQ ID NO: 408

SEQ ID NO: 410 - DNA, 600 bp, Homo sapiens
gatacagatgctgagagtgtaaatctagatgactataacatacacgtcattgcaagtgtattcaaacaatggcttcgagatttgcccaatcctctcatgacctttgaactctatgaggaatttcttcgagctatgggccttcaggagaggaaggagacaatccgtggtgtatactctgtgattgatcaactctcccgaactcatctcaatacactggaacgcctcatctttcatctaagtcaggattgctctgcaggaagacactaatcgaatgtctgctaatgctttgggccattggtgtttgcgccctgcattcyccgctgscctgacaccactgacccactacaaagtktmmaggrcatcagtwagactaccacttgtgtggaactgattgttgtggaacaaatgaataaatacaaggctcgtctcaaagatatcagtagcttggaatttgctgagaataaggcaaagaccaggttgtcactgattcgtagatcaatgtttaactcagctcaaagggcaatcgggaaggagcacaaggggaaatcagcaaagttatcagctaaaccttttcatgcaaaagttgaaaccaagccataa

SEQ ID NO: 411 - DNA, 600 bp, Homo sapiens; identical to SEQ ID NO: 410

SEQ ID NO: 412 - DNA, 1400 bp, Homo sapiens
ctgtctctggtagagatggcggttgggaggtatcccatccctcctccagatgccaaggagctggagctgatgtttgggtgccaggtggaaggagatgcggctgagaccccacccaggccaaggacccccgggaggccccttagctcatacggaatggacagccgacctcccatggcaatttttgagttgttggattacatagtcaacgagcctcctccaaaactgcccagtggagtgttcagtctggaatttcaagattttgtgaataaatgcttaataaaaaaccccgcagagagagcagatttgaagcaactcatggttcatgcttttatcaagagatctgatgctgaggaagtggattttgcaggttggctctgctccaccatcggccttaaccagcccagcacaccaacccatgctgctggcgtctaagtgtttgggaagcaacaaagagcgagtcccctgcccggtggtttgccatgtcgcttttgggcctccttcccatgcctgtctctgttcagatgtgcatttcacctgtgacaaaggatgaagaacacagcatgtgccaagattctactcttgtcatttttaatattactgtctttattcttattactattattgttcccctaagtggattggctttgtgcttggggctatttgtgtgtatsctgatgatcaaaacctgtgccaggctgaattacagtgaaatttttggtgaatgtgggtagtcattcttacaattgcactgctgttcctgctccatgactggctgtctgcctgtattttcggactttgacatttgacatttggtggactttatcttgctgggcatactttctctctaggagggagccttgtgagatccttcacaggcagtgcatgtgaagcatgctttgctgctatgaaaatgagcatcagagagtgtacatcatgttattttattattattatttgcttttcatgtagaactcagcagttgacatccaaatctagccagagcccttcactgccatgatagctggggcttcaccagtctgtctactgtggtgatctgtagacttctggttgtatttctatatttattttcagtatactgtgtgggatacttagtggtatgtctctttaagttttgattaatgtttcttaaatggaattatttgaatgtcacaaattgatcaagatattaaaatgtcggatttatctttccccatatccaagtaccaatgctgttgtaaacaacgtgtatagtgcctaaaattgtatgaaaatccttttaaccattttaacctagatgtttaacaaatctaatctcttattctaataaatatactatgaaataaaaaaaaaaggagaaagctaaaaaaaaaaaaaaaaaaaaaaaaaaaaaaaaaaaaaaa

SEQ ID NO: 413 - DNA, 600 bp, Homo sapiens
ctcatctgcgtccggaaggargtcatccrcccgtccctcatctgcgtcckgaaggaatcatccacccgttcctcatcggcgtcccgaaggaagctcatggagtatgttccgggctgtgagctcttcagctacctgcgcaaccgggggctcttctactctgcagagatcatctgtgccatcctgcactctaaggagatcatctacagggacttgaagccggagaacatcctgctggatagggacggacacatcaagctcacggactttgggttcgccaagaagctgaaaattcttgcagacaagatagatttccccagacatttggatttccatgtgaaagatctcattaagaaactgctcgtggttgacagaacaaggtggttaggaaatatgaagaacggggcgaatgatgtgaaacgccatcggtggttccgctctgtggactgggaagctgttcctcagagaaaactgaagcctcccatcgtgcccaagatagcccgcgaaggcgacacctccaacttcggaacttaccccgagaatgactgggacacagccgcgaccgtgccgcagaagggtttagaaatcttcaagaatttctga

SEQ ID NO: 414 - DNA, 549 bp, Homo sapiens
atgaaatgtatacctggatctgaacagagaccacagctggggataaagatgttggtgtctacagctgaagctgtaaaaggaaaaaaggagcagggagaccttagctccgagaagcaactagaggaggaagaagaggaggaggaagatgctgacagcctccaggatattacgtgtgcaccggcgtgggatcctggaactggcaggaattgccatggscagmcmygmgwtgccakksamkggtgctgccatggccacgactgttgttacactcgagctgaggaggccggctgcagccccaagacagagcgctactcctggcagtgcgtcaatcagagcgtcctgtgcgttcagtgtgaaaaaccagacctcaccaattcatcacaactaactccatcggaagcagaggattgctcctcatctgactcctcctgtgtgagacctgattctcagtcagaggctgatgccggaactgagaccatcagccatagagagatccttccagaatatggtgtcattaaccccgcagttcactactgcactttgccatga

SEQ ID NO: 415 - DNA, 600 bp, Homo sapiens
catctggccatggtgcgctaccacgagggtgggcgcttctgcgagaagggcgaggagtgggaccaggagtcggctgtcttccacctggagcacgcagccaacctgggcgagctggaggccatcgtgggcctgggactcatgtactcgcagttgcctcatcacatcctagccgatgtctctctgaaggagacagaagagaacaaaaccaaaggatttgattacttactaaaggccgctgaagctggcgacaggcagtccatgatcctagtggcgcgagcttttgactctggccagaacctcagcccggacaggtgccaagactggctagaggccctgcactggtacaacactgccctggagatgacggactgtgatgagggcggtgagtacgacggaatgcaggacgagccccggtacatgatgctggccagggaggcmgagatgctgttcacaggaggctacgggctggagaaggacccgcagagatcaggggacttgtatacccaggcagcagaggcagcgatggaagccatgaagggccgactggccaaccagtactaccaaaaggctgaagaggcctgggcccagatggaggartaa

SEQ ID NO: 416 - DNA, 600 bp, Homo sapiens
  misc_feature (513)..(514): n is a, c, g, or t
  misc_feature (517)..(517): n is a, c, g, or t
  misc_feature (552)..(552): n is a, c, g, or t
  misc_feature (562)..(562): n is a, c, g, or t
  misc_feature (568)..(568): n is a, c, g, or t
  misc_feature (572)..(572): n is a, c, g, or t
  misc_feature (583)..(583): n is a, c, g, or t
  misc_feature (587)..(588): n is a, c, g, or t
  misc_feature (592)..(592): n is a, c, g, or t
  misc_feature (597)..(597): n is a, c, g, or t
  misc_feature (599)..(599): n is a, c, g, or t
ggggcttcaggcctcagccccgtcctctttccctgctctcccctgtagatcttctgcgtgcacgggggcctctccccctccatccagacctggatcagattcggacaatcgaccgaaagcaagaggtgcctcatgatgggcccatgtgtgacctcctctggtctgacccagaagacaccacaggctggggcgtgagcccccgaggagccggctacctatttggcagtgacgtggtggcccagttcaacgcagccaatgacattgacatgatctgccgtgcccaccaactggtgatggaaggttacaagtggcacttcaatgagacggtgctcactgtgtggtcggcacccaactactgctaccgctgtgggmrtgtggcagccatcttggagctggacgmgcatctccagaaagatttcatcatctttgaggctgctccccaagagacacggggcatcccctccaagaagcccgtggccgactacttcctgtgaccccgcccggcccctgccnnttncaacccttctggccctcgcaccactgtgactctgncatcttcctnagacgnaggntgggcgtgggngggnntgtnctggntnt

SEQ ID NO: 417 - DNA, 600 bp, Homo sapiens; identical to SEQ ID NO: 416
  misc_feature (513)..(514): n is a, c, g, or t
  misc_feature (517)..(517): n is a, c, g, or t
  misc_feature (552)..(552): n is a, c, g, or t
  misc_feature (562)..(562): n is a, c, g, or t
  misc_feature (568)..(568): n is a, c, g, or t
  misc_feature (572)..(572): n is a, c, g, or t
  misc_feature (583)..(583): n is a, c, g, or t
  misc_feature (587)..(588): n is a, c, g, or t
  misc_feature (592)..(592): n is a, c, g, or t
  misc_feature (597)..(597): n is a, c, g, or t
  misc_feature (599)..(599): n is a, c, g, or t

SEQ ID NO: 418 - DNA, 600 bp, Homo sapiens
cagcagcagcaccaagcccgggtggagctcatggagcagttccagaaggagaaggaggaactggacaggggctgctgggagtacaagtgcaagatggccgagtgccagaggaagctgaaggagctggaggtgtcagagggtgccagggtggaggtggagtggctacacgaggagctgagctgggagcaaaagctggaggagatgcccaagaaaaagagcatgacctggaaccctgatgagaagatggtcaactacctggtcatctggtgtgctgatctagaggtgcaggagaaatgcgccctcatggagcagtgtawcgaygcyggcctcygkgtcsccaacwctsrgactcccatcgcctatacgaaatatggttccttttgtggcttgggaggccatggccagccctgcgatgccattgactggtgctgccatggccacgactgttgttacactcgagctgaggaggccggctgcagccccaagacagagcgctactcctggcagtgcgtcaatcagagcgtcctgtgcgrtgagtccccagcagcaccatgccacccaccccgagtatcccctgggcaycctggcatagccagatga

SEQ ID NO: 419 - DNA, 600 bp, Homo sapiens
cctgaggtgtgccaggcgggccgcgccgacgggctggcggtggacacgggcgtggacgtgtgggccttcggcgtgctcatcttctgcgtgctcaccggcaacttcccgtgggaggcggcgtcgggcgccgacgccttcttcgaggagttctggcgccgcttcaccgagcccgcgctgcgcatgttccagcgcttactggccctggagcccgagcgccgcggcccagccaaggaggtgttccgcttcctcaagcacgagctcacggactgtgcccctggctgcatcctgcattttcctccttttgtccacaggtatgaggtagatgacattgatgaagaaggcaaagcccccaaaggctaccgtccccttgccagccctggcagccttggcaagccccaagtcagcggcttcccttctgcagccccaggagaaccagctctgagacaggaagctcctgccctgaacccacggctcctgccccctcatgctcctggtgacatgggacacaagccacctgaggccaggatccctgcctgccaccatctgggctgccctcggtcctctgaacacagagtccctgaaaggcagcagaccctctag

SEQ ID NO: 420 - DNA, 600 bp, Homo sapiens
aaattcttccctaaggcaagagacctcgtggagaaacttttggttttagatgccacaaagcggttaggctgtgaggaaatggaaggatacggacctcttaaagcacacccgttcttcgagtccgtcacgtgggagaacctgcaccagcagacgcctccgaagctcaccgcttacctgccggctatgtcggaagacgacgaggactgctatggcaatccgaaaggggagggtgtctgtgccactgcggcaggcctgctggtggttgtagtctttgctgccgtgaggcagtggcgggtgaggtgctgggtgggtcattttctcctcatttccgtggccgtggacaggctagtgagtttccacccacagggtgccgctagaaccggacgccgagcacccccggcactggccccggggtcccacgtacggggcctcctgcccggcctgtcgcatctgcgcttggcttggtgcttgtacaactgtgcggccaagatgctccagaacactgcctgtctttccacagaaacccccgagtgttgtgtgcttgaacttttgggacgtggcgttggtggggacactggtaccttcttcagtgctgagtag

SEQ ID NO: 421 - DNA, 600 bp, Homo sapiens; identical to SEQ ID NO: 420

SEQ ID NO: 422 - DNA, 361 bp, Homo sapiens
agcggtgcaagagagaaactcctatgcagtgagtgtgtggaagagagtgaaagccaagttagagggccgagatgttgatccgaataggaggatgtcagttgctgaacaggttgactatgtcattaaggaagcaactaatctagataacttggctcagctgtatgaaggttggacagcctggaacagcagcagacgtgtcgggaggttagctgcggaaagaaatcgggatgccgcggagcacagagtgatttggaactccattccacctgaccctgtgtgtacaatccaggaaaaaaacaaaccccactcagaaacagagaaaactggggtcgcgaagaaatcacagccaaggaagatttga

SEQ ID NO: 423 - DNA, 361 bp, Homo sapiens; identical to SEQ ID NO: 422

SEQ ID NO: 424 - DNA, 600 bp, Homo sapiens
gtcacagcccaagattatttggcagccaagtggatggaactaactttcctggactgtgtttcgcattcggcgttatctggaaagtggactgaacggaatcaagctctgagcagaggcctgaagcggaagcaccacatcgtccctgcccatctcactctctcccttgatgatgcccctagagctgaggctggagaagacaccagggctgactttgaccgagggccatggacgcgacaggcctgtggccctgcgcatgctgaaataactggaacccagcctctcctcctacaccggcctacccatctgggcccaagagctgcactcacactcctacaacgaaggacaaactgtccaggtggcctctgcggcaattgcctcaccctgaggacatcagcagtcagcctgctcagagcgggggtgctggagcgcgtgcagacacagctcttccggagcagccttcaccttctctctgggatcagtgtccggctggccgacgtggcatttgctgaccgaatgctcatagaggttgacccccacagggtcacgcaggactcggacactgccctggaaacatggatggacaagggcttttggccacag

SEQ ID NO: 425 - DNA, 1316 bp, Homo sapiens
cacaacggccatcaccacctctccgcaccctctgtctccttccttctcgggcctcacccctggccctcgctttcagtgcccagcccggaccgcagcactccagttccgccccaacccgggaaccctggactgaggctcccgtttctgtcctttctattgggcgcacttccgatggcgtcaggaatttcagccaataggagccagccaggaagtacctctctgagcggttggtgccgggtataaaagaaggccgcgcagccacggctgctcacgacgccgcggatcccgaagcctgtgtagcagtgagacatcatggctacagcaaaccaaacagcccagcagcccagcagcccagccatgcggcgcctcacagtcgatgactttgaaatcgggcgtcccctgggcaaggggaaatttgggaatgtgtacctggctcggctcaaggaaagccatttcattgtggccctgaaggttctcttcaagtcgcagatagagaaggaaggactggagcaccagctgcgccgggaaattgagatccaggctcatctacawmassmcartmtcctgcgcctgtataactatttccatgatgcacgccgggtgtacctgattctggaatatgctccaaggggtgagctctacaaggagctgcagaaaagcgagaaattagatgaacagcgcacagccacgataatagaggagttggcagatgccctgacctactgccatgacaagaaagtgattcacagagatattaagccagagaacctgctgctggggttcaggggtgaggtgaagattgcagattttggctggtctgtgcacaccccctccctgaggaggaagacaatgtgtgggacactggactacttgccgccagaaatgattgaggggagaacatatgatgaaaaggtggatttgtggtgcattggagtgctctgctatgagctgctggtgggatatccaccctttgagagcgcctcccacagtgagacttacagacgcatcctcaaggtagatgtgaggtttccactatcaatgcctctgggggcccgggacttgatttccaggcttctcagataccagcccttggagagactgcccctggcccagatcctgaagcacccctgggttcaggcccactcccgaagggtgctgcctccctgtgctcagatggcttcctgagccctgtctgcctctgttccctttgtgtgtgttcagggagctctcctggctctgccacctcatttgtctttatttttttctcttttaagatgtaagatgctaattaataaaagctgaatcatttcatacca

SEQ ID NO: 426 - DNA, 1316 bp, Homo sapiens; identical to SEQ ID NO: 425

SEQ ID NO: 427 - DNA, 600 bp, Homo sapiens
aagatgacagtggcgattgtgaaggcgctgtactacctgaaggagaagcacggtgtcatccaccgcgacgtcaagccctccaacatcctgctggacgagcggggccagatcaagctctgcgacttcggcatcagcggccgcctggtggactccaaagccaagacgcggagcgccggctgtgccgcctacatggcacccgagcgcattgaccccccagaccccaccaagccggactatgacatccgggccgacgtatggagcctgggcatctcgttggtggagctggcaacaggacagtttccctacaagaactgcaagacggactttgaggtcctcaccaaagtcctacaggaagagcccccgcttctgcccggacacatgggcttctcgggggacttccagtccttcgtcaaagactgccttactaaagatcacaggaagagaccaaagtataataagctacttgaacacagcttcatcaagcgctacgagacgctggaggtggacgtggcgtcctggttcaaggatgtcatggcgaagactgagtcaccgcggactagcggcgtcctgagccagccccacctgcccttcttcaggtag

SEQ ID NO: 428 - DNA, 600 bp, Homo sapiens
tctctgtttgatgaagagggagccaagaytgtcaaagacctaatgtccaaagctgagaagaatggtgtgaagattaycttgcctgttgactttgtcactgctgrcaagtttgatgagaataccaagactggccaagccactgtggcttctggcatacctgctggctggctgggcttggactgtggccctgaaagcagcaagaagtatgctggggctgtcactcaggctaagcagattgtgtggaatgaatggaacatggaggataaagtcagccaggtgagcactgggggtggtgccggtttagagctcctagaagttggtcatgctaatgatatagtgggacaggcagaactgggtcttcaagacttcaggtgccaggctgaggagcttggacttgcacttgagagcactagggagccatgggaggatctgtccacgccctgcatatgcctggtaccaaaaaaggaaactgggtctgcaggacgttgctgcagttcaggcattggccgcgtgggggcagaagtgcacaggtcaaagcgtctggaaaaagccctcaggctgcaggaccagcagagcatcaccaaggacgtccctggttga

SEQ ID NO: 429 - DNA, 600 bp, Homo sapiens
agctcttcaccgacctcttcgaccgcagtggcttcgtgttcgactatgagtacgactgggccgggaagcccctgccgacccccatcggcaccgtccacaccgacctgccctcccagcctcagctccgggacaaaacccagccgcacagcaaaaaccaggcgttgaactccaccaacggggagctgaatgcggacgaccccacggccggccactccaacgccccgatcacagcgcctgcagaggtggaggtggccgatgaaaccaaatgctgctgtttcttcaagaggagaaagagaaaatcgctgcagcgacacaagtgaccctgggcgcgtgcagccccctgaatcttctccgtgcagccccttggggcgcgaccttgtgcgaggccctcggggcccacccacagcggcccagggccagaccctggctggaagccagaacgcagactgcaggggccgcgcctggctcaggcggccccacccccgggacgtggggtcacttccttcatgtaagactttggccgaaatttctacacctgtgtctagtcctcccctccaagagcattaactatttaaaacaaggaaaagaggaaaaaaaaaa

SEQ ID NO: 430 - DNA, 600 bp, Homo sapiens; identical to SEQ ID NO: 429

SEQ ID NO: 431 - DNA, 600 bp, Homo sapiens
accgacctgctaatcaagacctttgtacagacgcaatcggcccagggcttgggtgtagaagaccctgtgggtgaagtctctgtccatgttgagctgttcactcatccaggaactggggaacacaaggtcacagtgaaagtggtggctgccaatgacctcaagtggcagacttctggcatcttccggccgttcatcgaggtcaacatcattgggccccagctcagcgacaagaaacgcaagtttgcgaccaaatccaagaacaatagctgggctcccaagtacaatgagagcttccagttcacgctgagcgccgacgcgggtcccgagtgctatgagctgcaggtgtgcgtcaaggactactgcttcgcgcgcgaggaccgcacggtggggctggccgtgctgcagctgcgtgagctggcccagcgcgggagcgccgcctgctggctgccgctcggccgccgcatccacatggacgacacgggcctcacggtgctgcgaatcctctcgcagcgcagcaacgacgaggtggccaaggagttcgtgaagctcaagtcggacacgcgctccgccgaggagggcggtgccgcgcctgcgccttag

SEQ ID NO: 432 - DNA, 600 bp, Homo sapiens; identical to SEQ ID NO: 431

SEQ ID NO: 433 - DNA, 600 bp, Homo sapiens
tgctcctcagagccatctcctgaacccacaaattattcttacagaaagatagttatccagaaattctcattccccgtctgcggtgcggtgcgtgcctgcacacctctcctaaacacagcagggctttggagtctggcccatgctccttggccagaaggacagcaggaaagggggctgcaccccgctggccctgcgctcgcccttggccctgctgcctctgtctatttcaatatagaactgttcagcagtcctgcttcaagcctgctctcactgcctggggcttggactggccctggggggaatgggggctccaggctggcacccagtgacttgctctgcgatgctgggcccagctgaccactggcttaggcgggagcctgggctgctgtcacactaggagggaaagctgtgcttggttgactaaccttgtcctaatacgctatgtgcttggcgtgtgggaatccaccctgagacatgctgggttcagtatgggttaaaaaaaaaaaaaaaaaaaaaaaaaaaaaaaaaaagggcggccgctctagagtatccctcgaggggcccaagcttacgcgtacccagctttcttgtacaaagtgt

SEQ ID NO: 434 - DNA, 1280 bp, Homo sapiens
ttttttctccaacgaagtcttatattttaccattctgcgtgtattagaaagctaaatttaaacagcaacaataagaaatcttccccagtggatccctcgagcctttcgggaaaatgcaggtttctggctgacaggaagaagaaacagcatccaatcggcacttgtgtctcaatgaccaatcaaatttcgccttacattgcatcsctgggataaacggasctggacractcastctcttggtctgtggctgctgcggttacctggatgggcgarcacctctgaggctggctttgttacctgggcaataagggactagcagttcagccgttttctatgcctgctggatttgtttgtatttgttcccagccactgctcatgtaatrtrstcmctkaaccaggaaattaaagcattctcccggaataatctcaggaagcaatgcaccagggtgacaacgctaactggaaagaaaattatagaaacatggaaagatgccagaattcatgttgtggaagaagtagagccgagcagtgggggtggttgtggttatgtgcaggaccttagctcggacctgcaagttggcgttattaagccatggttgctcctagggtcacaagatgctgctcatgatttggatacactgaaaaagaataaggtgactcatattcttaatgttgcatatggagttgaaaatgctttcctcagtgactttacatataagagcatttctatattggatctgcctgaaaccaacatcctgtcttattttccagaatgttttgaatttattgaagaagcaaaaagaaaagatggagtggttcttgttcattgtaatgcaggcgtttccagggctgctgcaattgtaataggtttcctgatgaattctgaacaaacctcatttaccagtgctttttctttggtgaaaaatgcaagaccttccatatgtccaaattctggcttcatggagcagcttcgtacatatcaagagggcaaagaaagcaataagtgtgacagaatacaggagaacagttcatgagttgcattgtagcagacaatggacaactgtagtttctgaattgacttctatagccatcttttcccttttttggagagtagactagcaaaaytcccttttttctcttgccttttttatgcataaatggaggtcaatctgattgtcctgacctactgtataagtaaatttcaaatgtcattactttctctttgttattataatgtgtgattaaatgcttttttaaattgctaagggaaaataaaaaaa

SEQ ID NO: 435 - DNA, 600 bp, Homo sapiens
gaaaatattacaattccaaccatctttacattcaataagttatacctcatctctaacctgctaaagtttgaacttattctctcattagaaaagctccctcacatcagagactccattgttatttatcttgtcatctccagcaaaccagtatttaaccataatgtactagacaaataccagctccagcactacaggacaggtagagacacagcagacatcggaaagatttctttaaggccaccgaggagaaatgaaacttgggtcgatactaatgattcttacagggattggtgtttagagggatgcagatgcttggccacccgtggaagtagctattggacagacacactcatcctcttcctttcagacttgactggagagggagaaggtccagtttggggtgatgatttagagcagcagagcctttacctggttgtgtcttcaattccactgagcacaagtacccttgattcaggaaacctgtgccgccatgcttcctgttacggggaccactggcagcaatttgactggaacagccagatgggccctgtggctttgacggttattgcaggtttcaaggcaagaaaagggtcttcttga

SEQ ID NO: 436 - DNA, 1400 bp, Homo sapiens
gaaagccggtatcagaaccatagtagcaagtcttctggtagaagtggaagaagtagttataaaagcaaacacaggattcaccacagtacttcacatcgtcgttcacatgggaagagtcaccgaaggaaaagaaccaggagtgtagaggatgatgaggagggtcacctgatctgtcagagtggagacgtactaagtgcaagatatgaaattgttgatactttaggtgaaggagcttttggaaaagttgtggagtgcatcgatcataaagcgggaggtagacatgtagcagtaaaaatagttaaaaatgtggatagatactgtgaagctgctcgctcagaaatacaagttctggaacatctgaatacaacagaccccaacagtactttccgctgtgtccagatgttggaatggtttgagcatcatggtcacatttgcattgtttttgaactattgggacttagtacttacgacttcattaaagaaaatggttttctaccatttcgactggatcatatcagaaagatggcatatcagatatgcaagtctgtgaattttttgcacagtaataagttgactcacacagacttaaagcctgaaaacatcttatttgtgcagtctgactacacagaggcgtataatcccaaaataaaacgtgatgaacgcaccttaataaatccagatattaaagttgtagactttggtagtgcaacatatgatgacgaacatcacagtacattggtatctacaagacattatagagcacctgaagttattttagccctagggtggtcccaaccatgtgatgtctggagcataggatgcattcttattgaatactatcttgggtttaccgtatttccaacacacgatagtaaggagcatttagcaatgatggaaaggattcttggacctctaccaaaacatatgatacagaaaaccaggaaacgtaaatattttcaccacgatcgattagactgggatgaacacagttctgccggcagatatgtttcaagacgctgtaaacctctgaaggaatttatgctttctcaagatgttgaacatgagcgtctctttgacctcattcagaaaatgttggagtatgatccagccaaaagaattactctcagagaagccttaaagcatcctttctttgaccttctgaagaaaagtatatagatctgtaattggacagctctctcgaagagatcttacagactgtatcagtctaatttttaaattttaagttattttgtacagctttgtaaattcttaacatttttatattgccatgtttattttgtttgggtaatttggttcattaagtacatagctaaggtaatgaacatctttttcagtaattgtaaagtgatttattcagaataaattttttgtgcttatga

SEQ ID NO: 437 - DNA, 1400 bp, Homo sapiens; identical to SEQ ID NO: 436

SEQ ID NO: 438 - DNA, 1400 bp, Homo sapiens
aggccagagccgtgttagtgtgaacgcaggcctgggtgcctgggtccggtggctgcaaagatcagtgatccatactcggttctctctctgagctggatctagccttctgtgtggggatttcatggagtaggatatatattttgagaagaaaattctatgattgaagtagagaaagtgaggttgggaaggaaggatgaggccagatacagtcctggaatgactgagaaagtatgtttaatggttaaggtttatttacatacataaaatatccacaacaatcataaaaattaaccagtaagggttaggatgcagccagagagcgtctcaaaggcatgtgtgcggcacagcggcctgcaggttgtaagtgcccactaaatggtggctgttgaggtaattaaccagcaaaactgagatcctgacattctcacttttcagtaagtatttgtcttgatctgtttcgtgtctaattacatattgaacttcggccattattttattggaatgggagagtgatgatccaaataggaaggcaccctagcagagggacagggggaagaaacggtaactcgtgttgggttttaaggagagggtggcggttccatcctgtactgctcccagctcccccagaagaactggagaaataccagcaaagggctgtgtagacaactcacatttgctcttggattgtttgctggggacaactcgatttctaatgacagcttccgtgaatcaacatttcttccttaaagctacacactctcgggttgttgggtttccgaagtttagtttctcaggctcctacttgtaagtttcagatattatggttctgcaaaaaagggtcacctctctccctcttcctgtgttggaaggtgacgtcctccctttagtttgtggccaacacttgtttctgaaactttttacagcaaacagagtatctgtatgaggttatgttgagggtcgcttgttaaaagctgctgcctgacagctgttaattctggggctagtgagacacataattatggtgtttatactctaaaatttttgccaaaagaatctctaccccttttgtaaatatatagacataaatgttattctatgtaaatacagatgcacaattttataaagtatatgatcgcacatcaatgtatgtaggaatcatgctggttctcagggcattgcctgtcagctccagattcatcaggacctgctcagcagcggggtcggggagctgggcctgggaacagccctggcttggttcaggccgctccagggcagcatggccagtccagggcacagaagcatctgcaggaagagcagctttcttcaagtcgctctttagccctttgtggttaatctctcagtactagttaataaatcttaatgaaactttccatgttcaa

SEQ ID NO: 439 - DNA, 600 bp, Homo sapiens
gcagtgtgctcgggcggggagcctgtgtacatcgtcacggaactcatgcgcaaggggaacctgcaggccttcctgggcacccccgagggccgggccctgcgtctgccgccactcctgggctttgcctgccaggtggctgagggcatgagctacctggaggagcagcgcgttgtgcaccgggacttggccgcccggaacgtgctcgtggacgacggcctggcctgcaaggtggctgacttcggcctggcccggctgctcaaggacgacatctactccccgagcagcagctccaagatcccggtcaagtggacagcgcctgaggcggccaattatcgtgtcttctcccagaagtcagacgtctggtccttcggcgtcctgctgcacgaggttttcacctatggccagtgtccctatgaagggatgaccaaccacgagacgctgcagcagatcatgcgagggtaccggctgccgcgcccggctgcctgcccggcggaggtctacgtgctcatgctggagtgctggaggagcagccccgaggaacggccctccttcgccacgctgcgggagaagctgcacgccatccacagatgccacccctga

SEQ ID NO: 440 - DNA, 600 bp, Homo sapiens
  misc_feature (164)..(164): n is a, c, g, or t
  misc_feature (166)..(167): n is a, c, g, or t
  misc_feature (187)..(187): n is a, c, g, or t
  misc_feature (191)..(191): n is a, c, g, or t
  misc_feature (196)..(196): n is a, c, g, or t
  misc_feature (198)..(198): n is a, c, g, or t
  misc_feature (462)..(462): n is a, c, g, or t
  misc_feature (485)..(485): n is a, c, g, or t
  misc_feature (506)..(506): n is a, c, g, or t
ctaggtcgattcctcgggacccacagtctcaccacgtctcctccagaggacggcagagggtacaggtggtggcctggccggttggcgatctcccgacagctggatccggcaatgtgaagcttttgtttgggtttccccgcttctttttagttttgctttatttntnnccttttcttttctttttttntttnccacntncctttttttaaatttaaaccattgagacttcagaagagcaggacacaatgctgtggacaggcaccaatttctttaaagaaattcaatgtgggcaaggcatatgtgtaaatttcacttttactttttataaggggttagggagctatttttggttttgtccttcactttccctctgtcttccttctttatacttttctcagttctacttatgacacctcacttccctagagaaggcctgcctccccatagggaatctgggggtancttctggaacggggcgtgagganacaaggagcctctgggccacncctccctaccagatgcaggaactcctggactccttggtgggctggccctggctagcccttgggcctcggagatgatcagaggtgaagaaccgcc

SEQ ID NO: 441 - DNA, 600 bp, Homo sapiens; identical to SEQ ID NO: 440
  misc_feature (164)..(164): n is a, c, g, or t
  misc_feature (166)..(167): n is a, c, g, or t
  misc_feature (187)..(187): n is a, c, g, or t
  misc_feature (191)..(191): n is a, c, g, or t
  misc_feature (196)..(196): n is a, c, g, or t
  misc_feature (198)..(198): n is a, c, g, or t
  misc_feature (462)..(462): n is a, c, g, or t
  misc_feature (485)..(485): n is a, c, g, or t
  misc_feature (506)..(506): n is a, c, g, or t

SEQ ID NO: 442 - DNA, 600 bp, Homo sapiens
  misc_feature (434)..(436): n is a, c, g, or t
  misc_feature (482)..(482): n is a, c, g, or t
  misc_feature (499)..(499): n is a, c, g, or t
  misc_feature (502)..(502): n is a, c, g, or t
  misc_feature (506)..(506): n is a, c, g, or t
  misc_feature (516)..(516): n is a, c, g, or t
  misc_feature (524)..(524): n is a, c, g, or t
  misc_feature (528)..(528): n is a, c, g, or t
  misc_feature (586)..(586): n is a, c, g, or t
  misc_feature (592)..(592): n is a, c, g, or t
tctctgcatccctggtgtgtaagattgctgactttggcctggcccgggtcattgaggacaacgagtacacggctcgggaaggggccaagttccccatcaagtggacagctcctgaagccatcaactttggctccttcaccatcaagtcagacgtctggtcctttggtatcctgctgatggagatcgtcacctacggccggatcccttacccagggatgtcaaaccctgaagtgatccgagctctggagcgtggataccggatgyctcgcccagagaactgcccagaggagctctacaacatcatgatgcgctgctggaaaaaccgtccggaggagcggccgaccttcgaatacatccagagtgtgctggatgacttctacacggccacagagagccagtaccaacagcagccatgatagggaggaccagggcannnccagggggtgcccaggtggtggctgcaaggtggctccagcaccatncgccagggcccacaacncgntttnctactttccnagacaacnaccntcggtttcaggccacagttttcttcatctgtccagttggggtaggtttgggacttggnaaaatntttttttt

SEQ ID NO: 443 - DNA, 600 bp, Homo sapiens; identical to SEQ ID NO: 442
  misc_feature (434)..(436): n is a, c, g, or t
  misc_feature (482)..(482): n is a, c, g, or t
  misc_feature (499)..(499): n is a, c, g, or t
  misc_feature (502)..(502): n is a, c, g, or t
  misc_feature (506)..(506): n is a, c, g, or t
  misc_feature (516)..(516): n is a, c, g, or t
  misc_feature (524)..(524): n is a, c, g, or t
  misc_feature (528)..(528): n is a, c, g, or t
  misc_feature (586)..(586): n is a, c, g, or t
  misc_feature (592)..(592): n is a, c, g, or t

SEQ ID NO: 444 - DNA, 600 bp, Homo sapiens
tgccgccttaatggggggaactgccttgtgcactgcaccacgattgtgacagcgtatgtgatgactgtgacggggctaggctggcgggacgtgcttgaagccatcaaggccaccaggcccatcgccaaccccaacccaggctttaggcagcagcttgaagagtttggctgggccagttcccagaagcttcgccggcagctggaggagcgcttcggcgagagccccttccgcgacgaggaggagttgcgcgcgctgctgccgctgtgcaagcgctgccggcagggctccgcgacctcggcctcctccgccgggccgcactcagcagcctccgagggaaccgtgcagcgcctggtgccgcgcacgccccgggaagcccaccggccgctgccgctgctggcgcgcgtcaagcagactttctcttgcctcccccggtgtctgtcccgcaagggcggcaagacgggcccagaggctgggggagccccgcggcggcctgaaccctgcctcccgcgcccgccctgctcgtccgcgtctgcagtcagcgtccccaacctgtgcgtctctgtgtccgggccggcctgctgcagccacctggtgccttag

SEQ ID NO: 445 - DNA, 600 bp, Homo sapiens; identical to SEQ ID NO: 444

SEQ ID NO: 446 - DNA, 600 bp, Homo sapiens
tttggcctcaacgtgaagcttttctgggagaagtttgttcccacagattgtcccccggccttcttcccgctggccgccatctgctgcagactggagcctgagagcagagccccccccggggccgcaggagagggcccgggctgcgcggatgatgagggcccagtgaggcgccaagggaaggtcaccatcaagtatgaccccaaggagctacggaagcacctcaacctagaggagtggatcctggagcagctcacgcgcctctacgactgccaggaagaggagatctcagaactagagattgacgtggatgagctcctggacatggagagtgacgatgcctgggcttccagggtcaaggagctgctggttgactgttacaaacccacagaggccttcatctctggcctgctggacaagatccgggccatgcagaagctgagcacaccccagaagaaaccagcattctcgaaattggaggactcctttgaggccctctccctgtacctgggggagctgggcatcccgctgcctgcagagctggaggagttggaccacactgtgagcatgcagtacggcctgacccgggactcacctccctag

SEQ ID NO: 447 - DNA, 600 bp, Homo sapiens; identical to SEQ ID NO: 446

SEQ ID NO: 448 - DNA, 600 bp, Homo sapiens
cagctgggccgccagacagacttcggcatgtacgactacttcacacgccagtacggggatgagtccactctggccttccagcaggcccgctacaacttcatccgaagcatggccgcctacagcctcctgctgttcctgctgcagatcaaggacagacacaacggcaacattatgctggacaagaagggccatatcatccacatcgactttggcttcatgtttgaaagctcgccgggcggcaatctcggctgggaacccgacatcaagctgacggatgagatggtgatgatcatggggggcaagatggaggccacacccttcaagtggttcatggagatgtgtgtccaggctacctggctgtgcggtgagcctgggccctacatggatgtggtcgtctccctggtcactatcatgttggacacgggcctgccctgttttcgcggccagacaatcaagctcttgaagcacaggtttagccccaacatgactgagcgcgaggctgcaaatttcatcatgaaggtcatccagagctgcttcctcagcaacaggagccggacctacaacatgatccagtactatcagaatgacatcccctactga

SEQ ID NO: 449 - DNA, 600 bp, Homo sapiens
tgggagatgtccaatcaggatgtaattaaagctgtagatgagggctatcgactgccaccccccatggactgcccagctgccttgtatcagctgatgctggactgctggcagaaagacaggaacaacagacccaagtttgagcagattgttagtattctggacaagcttatccggaatcccggcagcctgaagatcatcaccagtgcagccgcaaggccatcaaaccttcttctggaccaaagcaatgtggatatcwctaccttccgcacaacaggtgactggcttaatggtgtcyggacagcacactgcaaggaaatcttcacgggygtggagtacagttcttgtgacacaatagccaagatttccacagatgacatgaaaaaggttggtgtcaccgtggttgggccacagaagaagatcatcagtagcattaaagctctagaaacgcaatcaaagaatggcccagttcccgtgtaaagcacgggacggaagtgcttctggacggaagtggtggctgtggaaggcgtmrmrtcatcctgcagacagacaataattctggagatactggtggaagttccaagtccaataagacactcaaat

SEQ ID NO: 450 - DNA, 600 bp, Homo sapiens
gcagcaaagggacctggcagttgcaacacagtaagtcaggaattcaagcgtgaacccatattgataagtgggccagaattatttaggggcctggcttgctgctctccatttcctgtatcgctaatttatcatttttccaaccttggtattttatattatttagagaaaatgctgggtcactctctttgcctaaggtgactcaaacagccaaacgaaacttccgttgcctcccagccctctgtatccacctggttttgttctttccctgtgagcatttgtggttatagcttcccatatgccacattcaccggccacctcctcgccgtggaaccctgccctctcccctcctgctgctgtagagttttcccaaagcagtgtccaggatagaatttgagagagtgaagaaattgccttgtagatgtggagggctgcaatctgtcttgatttctccaagcacttaactttctttgactgcactgagaattgctaatgatttcccatgagatttgcttacttttgtatactgtattttccagcattacagaaccttggttattgttttttagccatagaatcttctagtaaaaaatatctgccacc

SEQ ID NO: 451 - DNA, 600 bp, Homo sapiens; identical to SEQ ID NO: 450

SEQ ID NO: 452 - DNA, 588 bp, Homo sapiens
atggacagtggttggtccagatatgtagtagcatttgggacatctgaaaagtcagtgacggcctgcccgtggcccgcgggtctccttcctcaaagggggaccttctactcagaatatcccgagtgctgcgtggaagtaaaactattccacaagatcgacatgctgtacatcagctatgggccagcttatgaccagggtggcccagttgaaatwtksmctycmtykrctktgkcagggggaaaaggaggcaaggtcctggtccactgtgaggctggaatctcccattcacccaccagctgcaagtcttcccccatgaagaccagacagctctgcctgaaggagaccttcaattacatcaagcagaggaggagcatgatctggtccaattttggcttcatggaccagctcctacagaaggaatctgagatcccaccctccacgcccacccccagcctccctcttgccaagcgaggcagcaggctcttcactgaaggtcatttgcagatactgagcccaggcctgcaggatgcctactgcacattcccttccccggtgctggcactggtgcccacccaccggacagtctaa

SEQ ID NO: 453 - DNA, 588 bp, Homo sapiens; identical to SEQ ID NO: 452

SEQ ID NO: 454 - DNA, 600 bp, Homo sapiens
ggcatgtgtaaggaaggattacggccaggagatacaaccagcactttctgtggtactcctaattacattgctcctgaaattttaagaggagaagattatggtttcagtgttgactggtgggctcttggagtgctcatgtttgagatgatggcaggaaggtctccatttgatattgttgggagctccgataaccctgaccagaacacagaggattatctcttccaagttattttggaaaaacaaattcgcataccacgttctctgtctgtaaaagctgcaagtgttctgaagagttttcttaataaggaccctaaggaacgattgggttgtcatcctcaaacaggatttgctgatattcagggacacccgttcttccgaaatgttgattgggatatgatggagcaaaaacaggtggtacctccctttaaaccaaatatttctggggaatttggtttggacaactttgattctcagtttactaatgaacctgtccagctcactccagatgacgatgacattgtgaggaagattgatcagtctgaatttgaaggttttgagtatatcaatcctcttttgatgtctgcagaagaatgtgtctga

SEQ ID NO: 455 - DNA, 600 bp, Homo sapiens
cacaagtgtggagtttaagtgaccaccatcctgagcacatatcagctgtgctcctccaccatggaagtcagttcctggctacacccctcatgggaagaaaacgggcaatgcttgtgagagccattggaagactgtcctctatggcaatgatctcagggctcagtggcaggaaatcctcaacagggtcaccaaccagcccgctcaatgcagaaaaactagaatctgaaggtgagaatctgagtttagattcccttgaagatgtgtcccaagctttccttgaggctgttgctgaggaaaagcctcatgtaaaaccctatttctctaagaccattcgcgatttagaagttgtggagggaagtgctgctagatttgactgcaagattgaaggatacccagaccccgaggttgtctggttcaaagatgaccagtcaatcagggagtcccgccacttccagatagactacgatgaggacgggaactgctctttaattattagtgatgtttgcggggatgacgatgccaagtacacctgcaaggctgtcaacagtcttggagaagccacctgcacagcagagctcattgtggaaacgatggaggaag

SEQ ID NO: 456 - DNA, 600 bp, Homo sapiens; identical to SEQ ID NO: 455

SEQ ID NO: 457 - DNA, 380 bp, Homo sapiens
ggtgcttagaaagaggactcacagtacagtgggttatttctctttcacggaacaatcccaaatgcactgtcttcatctgtgtggttgaaactgccatagccatgctcacatccaagctgtgcttagctcttcgatacttacacaaggagaagaggattgtccatagagatctgacaccaaacaacattatgttgggggataaggacaaagtaaccgttaagaatactcttcaagtatcttgcctgggggtatgtgcgcctgtttgctgtcattctgagcagcgtcaacaaacggggctcaaggaaccacattcagtttataaattttcgtcgaattctaccgtgcttggttccttgctggtttatttctttgaaaaatga

SEQ ID NO: 458 - DNA, 380 bp, Homo sapiens; identical to SEQ ID NO: 457

SEQ ID NO: 459 - DNA, 600 bp, Homo sapiens
aaggagggagggcttcttccaggcccagggcggtccttacaagacgggaggcagcagagaacttcctataactgtgttgcactggtttcgctcatgtgagactcgagccagtagcaagggcccggtcccacagcttcgacagccaatcaggtgtcgaagacaagcaggcggcgggcatgccaaaagctatgggtgggctcagaatgccccggaaggaagtcagataactgaaaagaacacttgcactggtcacaggaaaaccagcctgagctgccrryakcctytgrragaacgtaacatcaaaatagccaactatgggtttagttcaacatttgcaaagagagacaacactgaaaagggaacgtttgatgggactctcccttatgcaggcccagaactcttcttgggccatggrtaccaatgccctgccatcaacgtttggagccttggcatcatcgtatgcaaaatggtgkmwgksrmcctkccmtktymwrmscagaagaggamtcraaammagccgacctttcccactttctaattcacagaagcatgaacaccatcctgggagttagggcagaaccctacttggcctggagatga

SEQ ID NO: 460 - DNA, 600 bp, Homo sapiens; identical to SEQ ID NO: 459

SEQ ID NO: 461 - DNA, 453 bp, Homo sapiens
atggagtatgccagaggaggagagctgcatcacctgatacaccaccaccacgacatcaaggatggggaggaggcctggatcatgttaaggcagattctgtcagccctgcagtactgccacttaaagaatatcacacatccagacctaaagctacaaaacatcctactcaatgaggaaggcaaaataaaaatcatagactttggctttagcacaatattcagggagcagcggattgctgaaaaccttttaaagatgagtatcatgaagacacccaaccgcccaaatataattcagctctaccaggcagcaggggaggccccgatcaacttcaggcagattctgtcaggcctgcagtactgccgcttaaagaacatcacacatccagagctaaagccacaaacccatctagtcatagaggaaggcaatataaaaataacggatttttgcctttag

SEQ ID NO: 462 - DNA, 600 bp, Homo sapiens
ttctctgccctgtctgtgcttgcagccatggtgcccagtctggccccaccaggagacaccagaacgactgtccatgtgtctactccttggcaccttccccgcatggtgggtagatgggcagggaggggtgggaatctgtgtaaccgtggaagggaacggccctcagacccagagggtttggagcctggggtattgtcaccgacagtggccttagcctagctagcacagttagtgctgtgcatcacagcatagcttttagaggcaggatttgtagtcagtatagttgggaggcaccatggagcagggatcaccctccacctcacttgacaaggagatacaaaactatcagttcatagacaccatctgatagggaactggctcagcataggccaactgggacccaggttgccatcttgaagactttccatcacccaaatatcattcagctcttccaggtggtgagggagtaaaccagaggaggagagttgcaccaccagatataccactatggccacatcgaggaggaagaggaggcccggaccatgttcaggcagattctgtcagccctgcagtactgccacttaaaaaaaaaaaaaaaaa

SEQ ID NO: 463 - DNA, 600 bp, Homo sapiens
gcctccccaccccaggcctttgtctatcctgagcttctggctggtgagttcacccgactggagttccctcggcggctgaagggggatgacttgggacagaaggttttgttcagggatcaccacatgagtggctggagctacaaacgtgtggagaaatcggatctcaagtacccactgatccatggacagggtaggcaggctcggttactaggaacactggctgtctcccggggcctgggagaccatcagctcagagtcctggacacaaacatccagctcaagcccttcttgctctctgtgccacaggtgactgtgctggatgtggaccagctggagctacaggaggatgatgtggttgtcatggcaactgatggactctgggatgtactgtccaacgagcaggtggcatggctggtgcggagcttcctccctgggaaccaagaggacccacacaggttctcaaagctggcccagatgctgatacacagcacacagggaaaggaagacagtctcacagaggaagggcaggtgtcctacgatgacgtctctgtgttcgtgattcccttgcacagtcagggccaagagagcagtgaccactga

SEQ ID NO: 464 - DNA, 1400 bp, Homo sapiens
gtcccacagagcacgctccttggtatcctgctgcctttgctgctgcttgtggctgcactggcgactgcactggtcttcagctactggtggcggaggaagcagctagttcttcctcccaacctgaatgacctggcatccctggaccagactgctggagccacacccctgcctattctgtactcgggctctgactacagaagtggccttgcactccctgccattgatggtctggattccaccacttgtgtccatggagcatccttctccgatagtgaagatgaatcctgtgtgccactgctgcggaaagagtccatccagctaagggacctggactctgcgctcttggctgaggtcaaggatgtgctgattccccatgagcgggtggtcacccacagtgaccgagtcattggcaaaggtgtgggggccagccccaccgtgaaggacctcatcagctttggcctgcaggtagcccgcggcatggagtacctggcagagcagaagtttgtgcacagggacctggctgcgcggaactgcatgctggacgagtcattcacagtcaaggtggctgactttggtttggcccgcgacatcctggacagggagtactatagtgttcaacagcatcgccacgctcgcctacctgtgaagtggatggcgctggagagcctgcagacctatagatttaccaccaagtctgatgtgtggtcatttggtgtgctgctgtgggaactgctgacacggggtgccccaccataccgccacattgacccttttgaccttacccacttcctggcccagggtcggcgcctgccccagcctgagtattgccctgattctctgtaccaagtgatgcagcaatgctgggaggcagacccagcagtgcgacccaccttcggagtactagtgggggaggtggagcagatagtgtctgcactgcttggggaccattatgtgcagctgccagcaacctacatgaacttgggccccagcacctcgcatgagatgaatgtgcgtccagaacagccgcagttctcacccatgccagggaatgtacgccggccccggccactctcagagcctcctcggcccacttgacttagttcttgggctggacctgcttagctgccttgagctaaccccaagctgcctctgggccatgccaggccagagggcagtggccctccaccttgttcctgccctttaactttcagaggcaataggtaaatggggcccattaggtccctcactccacagagtgagccagtgagggcagtcctgcaacatgtatttatggagtgcctgctgtggaccctgtcttctgggcacagtggactcagcagtgaccacaccaacactgacccttgaaccaataaaggaacaaatgactattaaagcacaaa

SEQ ID NO: 465 - DNA, 1400 bp, Homo sapiens; identical to SEQ ID NO: 464

SEQ ID NO: 466 - DNA, 600 bp, Homo sapiens
agaaacgcaaaaagtttctacggactttaaattaaaatggaaaaatatgaaaacctgggtttggttggagaagggagttatggaatggtgatgaagtgtaggaataaagatactggaagaattgtggccataaagaagttcttagaaagtgacgatgacaaaatggttaaaaagattgcaatgcgagaartcaagttactaaagcwmyttmsrmatgractwgastasmawctasttcrraagtacktgtwwmarawwawtaataatggaattggattttgtcgcagtcacgatcaacttaggcatgaaaacttggtgaatctcttggaagtgtgtaagaaaaaaaaacgatggtacctagtctttgaatttgttgaccacacaattcttgatgacttggagctctttccaaatggactagactaccaagtagttcaaaagtatttgtttcagattattaatggaattggattttgtcacagtcacaatgtattgcataatcaatgctggctgataattttagatctgatttattcttctttggaagaggtaatttattcttctttggaagaggtaatcaagagaggaggtgaagattag

SEQ ID NO: 467 - DNA, 600 bp, Homo sapiens; identical to SEQ ID NO: 466

SEQ ID NO: 468 - DNA, 600 bp, Homo sapiens
tgaccccacatatcgtgcagtatcaagctaacaagtgtgttaaaatgtcgcttttcatctcctgtcccaggattagcagagtggaggagtcggctctgagagctctgagggagaagctgtttgctcattcttcagatcttctcagtgaatttaagaagcatgatgcagataaagtcggtttaatcaccttgagtgactgggcagcagcggtggagtctgtgttgcacctaggactgccatggcggatgctgaggccacagctggtgaacagctcagcagacaacatgctggagtacaagtcttggctgaagaacttggccaaggaacaactgagtcgcgaggcatttggagagcaagggttcatctcactggacgagttcaggcagacctggaagctgttcagctctcacatgaatatcgacattacagatgactgcatctgtgaccttgctcggagcattgatttcaacaaagatggccacattgatatcaatgagttcctggaggccttccgccttgtggagaaatcctgcccagagggcgatgcctcagaatgcccacaagctacaaatgctaaagacagtggctgcagcagtccag

SEQ ID NO: 469 - DNA, 600 bp, Homo sapiens; identical to SEQ ID NO: 468

SEQ ID NO: 470 - DNA, 600 bp, Homo sapiens
tgtgagaagagcaattacaatctcttcattgaatggatggcagggggatcggtggctcatttgctgagtaaatatggagccttcaaagaatcagtagttattaactacactgaacagttactccgtggcctttcgtatctccatgaaaaccaaatcattcacagagatgtcaaaggtgccaatttgctaattgacagcactggtcagagactaagaattgcagattttggagctgcagccaggttggcatcaaaaggaactggtgcaggagagtttcagggacaattactggggacaattgcatttatggcacctgaggtactaagaggtcaacagtatggaaggagctgtgatgtatggagtgttggctgtgctattatagaaatggcttgtgcaaaaccaccatggaatgcagaaaaacactccaatcatcttgctttgatatttaagattgctagtgcaactactgctccatcgatcccttcacatttgtctcctggtttacgagatgtggctcttcgttgtttagaacttcaacctcaggacagacctccatcaagagagctactgaagcatccagtctttcgtactacatggtag

SEQ ID NO: 471 - DNA, 600 bp, Homo sapiens; identical to SEQ ID NO: 470

SEQ ID NO: 472 - DNA, 1400 bp, Homo sapiens
gcccggtgggatcggcgcgacagtgtagaaagtggctgtcagaccgagagtagcaaggwgggtgaggagggacagccccgccagctgacgcccttcgagaaactgacacaggacatgtcccaggatgagaaggtggtgagggagatcacgctggggaaacggataggcttctaccgaattcgakgrgwrawmgsaagwgkaaaswwcwsssaagtgaakswtgggakwsamtscctaaccaaagaaaaggtggccattaagatcctggacaagaccaagttagaccagaaaacccagaggctactatcccgagaaatctccagcatggaaaagctgcaccatcccaacatcatccgcctttacgaagtggtggagaccctatccaagctgcacttggtgatggagtatgcagggggtggggagctcttcggaaaaattagcactgaggggaagctctctgaaccagaaagcaagctcatcttctcccagattgtgtctgccgtgaagcacatgcatgaaaaccaaattattcatagagatctgaaagcagaaaatgtattctataccagtaatacttgtgtgaaggtgggcgattttggattcagcacagtaagcaaaaaaggtgaaatgctgaacactttctgtgggtctcctccctacgctgcgcctgaactcttccgggacgagcactacatcggcatttacgtggatatctgggccttgggggtgcttttgtacttcatggtgactggcaccatgccatttcgggcagaaaccgtggccaaactaaaaaagagcatcctcgagggcacatacagtgtaccgccgcacgtgtcagagccctgccaccgactcatccgaggagtccttcagcagatccccacggagaggtacggaatcgactgcatcatgaatgatgaatggatgcaaggggtgccataccctacacctttggaacctttccaactggatcccaaacatttgtcggaaaccagcactctcaaggaagaagaaaatgaggtcaaaagcactttagaacatttgggcattacagaagagcatattcgaaataaccaagggagagatgctcgcagctcaatcacaggggtctatagaattattttacatagagtccaaaggaagaaggctttggaaagtgtcccagtcatgatgctaccagaccctaaagaaagagacctcaaaaaagggtcccgtgtctacagagggataagacacacatccaaattttgctcgattttataaattgcactagactgcttgtaactaaccaagatgattgttgctgcttctaaatttttttcaaggacaacttgagtggagacatttttgtaatttttaaataaacttaaatttgagatatgcaaaaaaaaaaaaaaaaa

SEQ ID NO: 473 - DNA, 600 bp, Homo sapiens
tgtgagctggtcatggccctggactacctgcagaaccagcgcatcattcacagggatatgaagcctgacaatattttacttgacgaacatgggcacgtgcacatcacagatttcaacattgctgcgatgctgcccagggagacacagattaccaccatggctggcaccaagccttacatggcacctgagatgttcagctccagaaaaggagcaggctattcctttgctgttgactggtggtccctgggagtgacggcatatgaactgctgagaggccggagaccgtatcatattcgctccagtacttccagcaaggaaattgtacacacgtttgagacgactgttgtaacttacccttctgcctggtcacaggaaatggtgtcacttcttaaaaaggtaagaaggaagactgcatgtccaaacgaagtaacaaaaggaagcaggctctctggcttaagtttagaagttagtatacaatattggggacaccaactgtcttccttgcagaaaggcaggctgaattgtgatcctacctttgaacttgaggaaatgattttggagtccaaacctctacataagaaaaaaaagcgtctggcaaag

SEQ ID NO: 474 - DNA, 1400 bp, Homo sapiens
cgggcaaagcgttatgagaagctggacttccttggggagggacagtttgccaccgtttacaaggccagagataagaataccaaccaaattgtcgccattaagaaaawywawctyrswywtwgmtywgmmkytwwakataggtataaatagaaccgccttaagagagataaaattattacaggagctaagtcatccaaatataattggtctccttgatgcttttggacataaatctaatattagccttgtctttgattttatggaaactgatctagaggttataataaaggataatagtcttgtgctgacaccatcacacatcaaagcctacatgttgatgactcttcaaggattagaatatttacatcaacattggatcctacatagggatctgaaaccaaacaacttgttgctagatgaaaatggagttctaaaactggcagattttggcctggccaaatcttttgggagccccaatagagcttatacacatcaggttgtaaccaggtggtatcgggcccccgagttactatttggagctaggatgtatggtgtaggtgtggacatgtgggctgttggctgtatattagcagagttacttctaaggagtataccagaaattcacactgagaatttatcaaccaccacaatccattcatggccaagaagaaaacagaattccatagcccctaatgttatgactgatcactccattgagaaagcaaatgaagagagacagcagttgagagtagacaggttagagattgtggacctgttaacaatcatacttggaaatttattagccattggcattgttgctggaatcatctttaaagttataaggaaaatgacatgcagactaaagaattgtactcttctgccataccttttgtcctattttaagctgttcttgtgctcaattgaaaaggttccttttttgccaggagattcagaccttgatcagctaacaagaatatttgaaactttgggcacaccaactgaggaacagtggccggacatgtgtagtcttccagattatgtgacatttaagagtttccctggaatacctttgcatcacatcttcagtgcagcaggagacgacttactagatctcatacaaggcttattcttatttaatccatgtgctcgaattacggccacacaggaggtagaaatgttaaaaactgaacttgaggcatctcaaagacaactcagaggtaaagaggaagcattgaaaattcttcaaagcatggcactgaaaatgaagtatttcagtaatcggccagggccaacacctggatgtcagctgccaagaccaaactgtccagtggaaaccttaaaggagcaatcaaatccagctttggcaataaaaaggaaaagaacagaggccttagaacaag

SEQ ID NO: 475 - DNA, 1400 bp, Homo sapiens; identical to SEQ ID NO: 474

SEQ ID NO: 476 - DNA, 600 bp, Homo sapiens
gaccgcatcatcgatgagagctacaatttgacggagcttgataccatcctgttcatgaagcagatatgtgaggggataaggcacatgcatcagatgtacattctccacttggacctgaagcctgagaatatcctgtgtgtgaatcgggatgctaagcaaataaaaattattgattttggattggccagaagatacaaacccagagagaagctgaaggtgaactttggaaccccagaatttctcgcccctgaagttgtgaactatgattttgtttcatttcccactgacatgtggagtgtgggggtcatcgcctatatgctacttagcggtttgtcgcctttcctgggtgacaatgatgctgagacgctgaacaacatcctggcctgcaggtgggacttagaggatgaagaatttcaggacatctcggaggaggccaaggagttcatctctaagcttctgattaaggagaagagttggcgaataagtgcaagcgaagctctcaagcacccctggttgtcagaccacaagctccactccagactcaatgcccagaagaagaagaatcgtggctctgatgcccaggactttgtgaccaaatag

SEQ ID NO: 477 - DNA, 600 bp, Homo sapiens
tccatagagaagaaatgtacatcttcatggagtactgcgatgaggggactttagaagaggtgtcaaggctgggacttcaggaacatgtgattaggctgtattcaaagcagatcaccattgcgatcaacgtcctccatgagcatggcatagtccaccgtgacattaaaggtgccaatatcttccttacctcatctggwttaatcaaactgggagattttggatgttcagtaaagctcaaaaacaatgcccagaccatgcctggtgaagtgaacagcaccctggggacagcagcatacatggcacctgaagtcatcactcgtgccaaaggagagggccatgggcgtgcggccgacatctggagtctgtgggtgtgttgtcatagagatggtgactggcaagaggccttggcatgagtatgagcacaactttcaaattatgtataaagtggggatgggacataagccaccaatccctgaaagattaagccctgaaggaaaggacttcctttctcactgccttgagagtgacccaaagatgagatggaccgccagccagctcctcgaccattcgtttgtcaaggtttggcagattactggatag

SEQ ID NO: 478 - DNA, 600 bp, Homo sapiens
gacaagatccaacttatcaaaaatatgctggacaaagtcaatgagatgattattggtggtggaatggcttataccttccttaaggtactcaacaacatggagattggtgcttccctgtttgatgaagagggagccaagatcgttaaagatatcatggccaaagcacaaaagaatggtgtaaggattacttttcctgttgattttgttactggggacaagtttgacgagaacgctcaggttggaaaagccactgtagcatctggcatatctcctggctggatgggtttggactgtggtcctgagagcaacaagaatcatgctcaagttgtggctcaagcaaggctaattgtttggaatgggccgttaggagtatttgaatgggatgcctttgctaagggaaccaaagccctcatggatgaaattgtgaaagccacttccaagggctgcatcactgttatagggggtggagacactgctacttgctgtgccaaatggaacactgaagataaagtcagccatgtcagcactggaggcggtgccagtctagagcttctggaaggtaaaatccttcctggagtagaggccctcagcaacatgtag

SEQ ID NO: 479 - DNA, 600 bp, Homo sapiens
gatcaccatgatcttttctttgcrgatggcagcacccctactgatgccattgtcaaaagatttctggatatctgtgaaaatgctgagggtgccattgcagtacattgtaaagctggccttggtcgcacaggcactctgatagcctgctacatcatgaagcattacaggatgacagcagccgagaccattgcgtgggtaaggatctgcagacctggcttggtgatcgggcctcmgcagcagtttttggtgatgaagcaaacaagcctctggctggaaggggactattttcgtcagargttaaaggggcaggagaatggacaacacagagcagccttctccaaacttctctctggtgttgatgacatttccataaatggggtcgagaatcaagaccagcaagaacccaaaccttacrgtgatgacgacgaaatcaatggagtgacacaaggtgatagaagtcgggccctgaaaaggcraagacaatcaaaaacaaacgatattcttctcccatctcccctggctgtgctgacctttacactgtgtagtgttgtcatctggtggattgtttgtgactacattcttcccatcctgctatyctga

SEQ ID NO: 480 - DNA, 600 bp, Homo sapiens; identical to SEQ ID NO: 479

SEQ ID NO: 481 - DNA, 1400 bp, Homo sapiens
tattgattggggatcttggagtttttcattgtcgctattgatttttacttcaatgggctcttccaacaaggaagaagcttgctggtagcacttgctaccctgagttcatccaggcccaactgtgagcaaggagcacaagccacaagtcttccagaggatgcttgattccagtggttctgcttcaaggcttccactgcaaaacactaaagatccaagaaggccttcatggccccagcaggccggatcggtactgtatcaagtcatggcaggtacagtaggataagccactctgtcccttcctgggcaaagaagaaacggaggggatgaattcttccttagacttacttttgtaaaaatgtccccacggtacttactccccactgatggaccagtggtttccagtcatgagcgttagactgacttgtttgtcttccattccattgttttgaaactcagtatgccgcccctgtcttgctgtcatgaaatcagcaagagaggatgacacatcaaataataactcggattccagcccacattggattcatcagcatttggaccaatagcccacagctgagaatgtggaatacctaaggataacaccgcttttgttctcgcaaaaacgtatctcctaatttgaggctcagatgaaatgcatcaggtcctttggggcatagatcagaagactacaaaaatgaagctgctctgaaatctcctttagccatcaccccaaccccccaaaattagtttgtgttacttatggaagatagttttctccttttacttcacttcaaaagctttttactcaaagagtatatgttccctccaggtcagctgcccccaaaccccctccttacgctttgtcacacaaaaagtgtctctgccttgagtcatctattcaagcacttacagctctggccacaacagggcattttacaggtgcgaatgacagtagcattatgagtagtgtgaattcaggtagtaaatatgaaactagggtttgaaattgataatgctttcacaacatttgcagatgttttagaaggaaaaaagttccttcctaaaataatttctctacaattggaagattggaagattcagctagttaggagcccattttttcctaatctgtgtgtgccctgtaacctgactggttaacagcagtcctttgtaaacagtgttttaaactctcctagtcaatatccaccccatccaatttatcaaggaagaaatggttcagaaaatattttcagcctacagttatgttcagtcacacacacatacaaaatgttccttttgcttttaaagtaatttttgactcccagatcagtcagagcccctacagcattgttaagaaagtatttgatttttgtctcaatgaaaataaaactatattcatttcc

SEQ ID NO: 482 - DNA, 600 bp, Homo sapiens
aagaagttgaaaatgaagctgattggtttctctctgccaatgtgatgtataaaattggtgacctgggccacgcaacatcaataaacaaacccaaagtggaagaaggagatagtcgcttcctggctaatgagattttgcaagaggattaccggcaccttcccaaagcagacatatttgccttgggattaacaattgcagtggctgcaggagcagagtcattgcccaccaatggtgctgcatggcaccatatccgcaagggtaactttccggacgttcctcaggagctctcagaaagcttttccagtctgctcaagaacatgatccaacctgatgccgaacagagaccttctgcagcagctctggccagaaatacagttctccggccttccctgggaaaaacagaagagctccaacagcagctgaatttggaaaagttcaagactgccacactggaaagggaactgagagaagcccagcaggcccagtcaccccagggatatacccatcatggtgacactggggtctctgggacccacacaggatcaagaagcacaaaacgcctggtgggaggaaagagtgcaaggtcttcaagctttacct

SEQ ID NO: 483 - DNA, 600 bp, Homo sapiens
agactatgtggctgtggcacgaggaagcaaagatcacaacattcgtgcccaagaaccagagagtgggctttcagaagagactcaagtgaagtgcctgatggaccaggcaacagaccccaacatccttggcagaacctgggaaggatgggagccctggatgtgaggtctgtgggagtctgcagatagaaagcattacattgtttaaagaatctactatacttggttggcagcattccatgagctgattttcctgaaacactaaagagaaatgtcttttgtgctacagtttcgtagcatgagtttaaatcaagattatgatgagtaaatgtgtatgggttaaatcaaagataaggttatagtaacatcaaagattaggtgaggtttatagaaagatagatatccaggcttaccaaagtattaagtcaagaatataatatgtgatcagctttcaaagcatttacaagtgctgcaagttagtgaaacagctgtctccgtaaatggaggaaatgtggggaagccttggaatgcccttctggttctggcacattggaaagcacactcagaaggcttcatcaccaagattttgggagagtaaagcta

SEQ ID NO: 484 - DNA, 1400 bp, Homo sapiens
gctacctggcaactgaacccatcatcaccacagccactcctgcagctgccacggtttctgccacctctaagatgtgccctggtaactggctttgggcttctatgacttttatggcccgcttctcccggagtagctcaaggtctcctgttcgaactcgagggaccctggaggagatgccaaccgttcaacatcctttcctcaatgtcttcgagttggagcggctcctctacacaggcaagacagcctgtaaccatgccgacgaggtctggccaggcctctatctcggagaccaggacatggctaacaaccgccgggagcttcgccgcctgggcatcacgcacgtcctcaatgcctcacacagccggtggcgaggcacgcccgaggcctatgaggggctgggcatccgctacctgggtgttgaggcccacgactcgccagcctttgacatgagcatccacttccagacggctgccgacttcatccaccgggcgctgagccagccaggagggaagatcctggtgcattgtgctgtgggcgtgagccgatccgccaccctggtactggcctacctcatgctgtaccaccaccttaccctcgtggaggccatcaagaaagtcaaagaccaccgaggcatcatccccaaccggggcttcctgaggcagctcctggccctggaccgcaggctgcggcagggtctggaagcatgaggggagggggagagaggtcaggccaggcccgtgggtaggtccctggctcccagctggagataggaggcccaggtggcaggtagcaggaggcccagatcacccatcctcccctggggtcaggagaggccgagccccaggccactgtcactctttgtgggaggggacggggagtgaggttgggcagtgtggtggatgggcacccaggaagggttgaccagggaaggaggcagctaggctgtagatggaagatggtcctgggattcgaacaccgctgggatctggccagggtgctccctgggattcacagtcccttcccctctttgtgcccaagtgtttccctctctccctcaccaaaacaaaagggccatctctgccctgcacttgtgcagaaagtcagggatacggcaagcatgaatgcaatggtgtagagttgtgtgaaacccctagcatagagacagacagcgaagagatggtgtgaaaagcttgcagaaccagacagagaaccccacagactttccactccaagcacaggaggaggtagctagcgtgtgagggttggcactaggcccacggctgctgcttgggccaaaaacatacagaggtgcatggctggcagtcttgaaattgtcactcgcttactggatccaagcgtctcgaggataaataaagatcatgaaaaagaaaaaaaaaaaa

SEQ ID NO: 485 - DNA, 600 bp, Homo sapiens
ctgggcctgctctgggccctcctgctggacgaccccatcttggcactccagcgccccaggaaaaagagagctccaaaccacggaaagcccgggaaacccaagaaccctgccagcacccaaagtatcattgtgaacaaggcccccttggagaaggtcccggacctcatcagccaggtgttggccacctaccctgcggatggggaaatggcagaagccagctgcggagtcttctggctgctgtccctgctgggctgcatcaaggagcagcagtttgaacaagtggtggcgctgctcctgcaaagcatccggctgtgccaggacagagccctgctggtgaacaatgcctaccggggactggccagcctggtgaaggtgtcagagctggcggccttcaaggtggtggtgcaggaggagggcggcagtggcctcagcctcatcaaggagacctaccagctccacagggacgacccggaggtggtggagaacgtgggcatgctgctggtccacctggcttcctatgaggagatcctgccggagctggtgtccagtagtatgaaggccctgctccaggagatcaaggagcgcttcacctccagcctg

SEQ ID NO: 486 - DNA, 1400 bp, Homo sapiens
cgcggaccycgaggagatcaggcccaaggaggtttacctggaccgaaagctgctgacgctggaagacaaagaactgggctctggtaattttggaactgtgaaaaagggctactaccaaatgaaaaaagttgtgaaaaccgtggctgtgaaaatactgaaaaacgaggccaatgaccccgctcttaaagatgagttattagcagaagcaaatgtcatgcagcagctggacaacccgtacatcgtgcgratgatcgggatatgcgaggccgagtcctggatgctrgttatggagatggcagaacttggtcccctcaataagtatttgcagcagaacagacatgtcaaggataagaacatcatagaactggttcatcaggtttccatgggcatgaagtacttggaggagagcaattttgtsmaymgwgayctsgcygcmmgaaatgtgttgctagttacccaacattacgccaagatcagtgatttcggactttccaaagcactgcgtgctgatgaaaactactacaaggcccagacccatggaaagtggcctgtcaagtggtacgctccggaatgcatcaactactacaagttctccagcaaaagcgatgtctggwsctttggartkytgatgtgggaagcattctcctatgggcagaagccatatcgagggatgaaaggaagtgaagtcaccgctatgttagagaaaggagagcggatggggtgccctgcagggtgtccaagagagatgtacgatctcatgaatctgtgctggacatacgatgtggaaaacaggcccggattcgcagcagtggaactgcggctgcgcaattactactatgacgtggtgaactaaccgctcccgcacctgtcggtggctgcctttgatcacaggagcaatcacaggaaaatgtatccagaggaattgattgtcagccacctccctctgccagtcgggagagccaggcttggatggaacatgcccacaacttgtcacccaaagcctgtcccaggactcaccctccacaaagcaaaggcagtcccgggagaaaagacggatggcaggatccaaggggctagctggatttgtttgttttcttgtctgtgtgattttcatacaggttatttttacgatctgtttccaaatccctttcatgtctttccacttctctgggtcccggggtgcatttgttactcatcgggcccagggacattgcagagtggcctagagcactctcaccccaagcggccttttccaaatgcccaaggatgccttagcatgtgactcctgaagggaaggcaaaggcagaggaatttggctgcttctacggccatgagactgatccctggccactgaaaagctttcctgacaataaaaatgttttgaggctttaaaaagaaaa

SEQ ID NO: 487 - DNA, 600 bp, Homo sapiens
tcatcaaaggcggtcttggccctgctggtggtgcctcctccgtgtgccagcccaagcctcgccacaggcctgtggatggcagccctccagagccccttctatggagataagatgaatctcttctccctgtgccagaagatcgagcagtgtgactaccccccactccccggggagcactactccgagaagaagcttgaagctgtgcaactggagctggtgacaactctgtgctttggctgtcagtctagaaatgggagtcgccctctctacttcagtgatgaggctgaaatgaacattgaagcccctgtcccaagaccacccagcttcctgctgctgctgctgcttcggctgctgtggcctgcggggctgaccacccctccagcagcagctaaacaccgttcttcagctctaacggggacaacgggaccatctagttgctctgaggatgaagtgccttcatgcagacagactgtggagtgcggagcctcattacgagaactggtcagcatgtgcatctgccctgacccccaccagagacctgacatcggatacgtgcaccaggtggccaagcagatgcacatctggatgtccagcacctga

SEQ ID NO: 488 - DNA, 600 bp, Homo sapiens
atggagaatggagatctcaatcagtttctttcccgccacgagccccctaattcttcctccagcgatgtacgcactgtcagttacaccaatctgaagtttatggctacccaaattgcctctggcatgaagtacctttcctctcttaattttgttcaccgagatctggccacacgaaactgtttagtgggtaagaactacacaatcaagatagctgactttggaatgagcaggaacctgtacmgtggtgactattaccggatccagggccgggcagtgctccctatccgctggatgtcttgggagagtatcttgctgggcaagttcactacagcaagtgatgtgtgggcctttggggttactttgtgggagactttcaccttttgtcaagaacagccctattcccagctgtcagatgaacaggttattgagaatactggagagttcttccgagaccaagggaggcagacttacctccctcaaccagccatttgtcctgactctgtgtataagctgatgctcagctgctggagaagagatacgaagaaccgtccctcattccaagaaatccaccttctgctccttcaacaaggcgacgagtga

SEQ ID NO: 489 - DNA, 600 bp, Homo sapiens
ctgctggatgcccagggattcctgaagatcgcagactttggactctgcaaggaagggatcggcttcggggaccggactagcaccttctgtggcaccccggagttcctggctcccgaggtgctracscakgaggcatacacacgggctgtggactggtgggggctgggtgtgctgctctacgagatgctggtgggtgagtgcccgttcccaggggacacagaggaagaggtgtttgactgcatcgtcaacatggacgccccctaccccggctttctgtcggtgcaagggcttgagttcattcagaagctcctccagaagtgcccggagaagcgcctcggggcaggtgagcaggatgccgaggagatcaaggtccagccattcttcaggaccaccaactggcaagccctgctcgcccgcaccatccagccccccttcgtgcctaccctgtgtggccctgcggacctgcgctactttgagggcgagttcacagggctgccgcctgccctgaccccacctgcaccccacagcctcctcactgcccgccaacaggccgccttccgggacttcgactttgtgtcagagcgattcctggaaccctga

SEQ ID NO: 490 - DNA, 600 bp, Homo sapiens; identical to SEQ ID NO: 489

SEQ ID NO: 491 - DNA, 576 bp, Homo sapiens
atgccagcaggggcaccgggggcagcatctgcatggctgctcttggcttctaggaagcggcacttcacccaaagtggctccttcatcctgtggaatggattacgagcctcaatgttggggagtgatttattgtttgtgaacctctgcttcgtgggtcattgtttccccattgctgtggtttgtggggctatggttttgcagtgcgatggtctttctgtagaggactatgggcctacctcacccaccccagttgtaggtagaacaagaacagcagctcttcccacagaggaggaactgcccagtggtgcttaccatgtgggagcagtaatggaagagatggtctttaccacagtgatgccgcccaccagtaatggtgacatagtgagtgtgaactcccactcaccgatgattcctttccttggtgggaragaattagatcatccaaacatctgcagattcactggaggctgtattgcactgccagatgtggttattgtgatggaatactgcccaaagggaagcttgatggatgttctgctcaatgataacatctctttcaactggggattttggtag

SEQ ID NO: 492 - DNA, 600 bp, Homo sapiens
tttcccaatcacatctagcaccaagccaggtttttcacttagctttcattcagcagcagcagatgactcattcatctcatagacaagcacaggaaacccatcagttgtctactcaggaaggtcccataaatcaacagcaatctttatttagtcaacatgctgctctccagcagcaggtacctcattgacaggcacctaagcaagttcagccattaccaggtattccaaacaccattacaaacatggtccagattatacatccattgcaagaacagttgcaactggcagccctggaacaacaatatataatacagcctttagagcagcctcaagtacttcaggcactagataacagtctgacttttcccctacagaaaaacctagcacaataccagccagcatacatccagcagcagtctgctgactggccgcagtggtagccatcttacagcttagcacctgtttctgggtcatcagagccacaattacaacagcagaccctctatcaaagctctgggatagcccttccaaatcagcaatcttcagttcatctcctgacacttagcattctggtagacgcttccactgcttttcagagca

SEQ ID NO: 493 - DNA, 600 bp, Homo sapiens
ttctccgaagaccctacctcctcaggaaggacacgtatgagagctatggccttggcagctgctgtccatgaagagccccagggatggaggcacctagaacaagcctgttgggttcctggttgcctcttcctgaagccctttgggttgatgtggagctgggaagcagcagaagatgggcctgtggaagcgatggtggatttctctgggcaaattgtcgcctttacaacgccagggggcggaggcgggagggagagcggcgagggtaagggcggggcaactgctgacgttcccggtgacgactccggctcagccctcaccctggtttccggcggcgcgcggctcccttttccgctctcccgcgcgctcacagtgcagatgaagagtttaccatggcagacttcactgagaataaaagaagagaccaagacacataaagatgtggacccactttctccttggggaagcaaaaggaagaagctgtcaagagccagggagattgaaggctctcttgccctctcaatgatcaactctaacaactcatccaagaggaaagaactatttgaggccgaagaaggagacataaggcagttttcactctga

SEQ ID NO: 494 - DNA, 600 bp, Homo sapiens
ttacacgccaagtcaatcatccacagagacctcaagagtaataatatatttcttcatgaagacctcacagtaaaaataggtgattttggtctagctacagtgaaatctcgatggagtgggtcccatcagtttgaacagttgtctggatccattttgtggatggcaccagaagtcatcagaatgcaagataaaaatccatacagctttcagtcagatgtatatgcatttggaattgttctgtatgaattgatgactggacagttaccttattcaaacatcaacaacagggaccagataatttttatggtgggacgaggatacctgtctccagatctcagtaaggtacggagtaactgtccaaaagccatgaagagattaatggcagagtgcctcaaaaagaaaagagatgagagaccactctttccccaaattctcgcctctattgagctgctggcccgctcattgccaaaaattcaccgcagtgcatcagaaccctccttgaatcgggctggtttccaaacagaggattttagtctatatgcttgtgcttctccaaaaacacccatccaggcagggggatatggtgcgtttcctgtccac

SEQ ID NO: 495 - DNA, 600 bp, Homo sapiens
  misc_feature (559)..(559): n is a, c, g, or t
  misc_feature (580)..(580): n is a, c, g, or t
  misc_feature (584)..(584): n is a, c, g, or t
  misc_feature (595)..(595): n is a, c, g, or t
  misc_feature (599)..(599): n is a, c, g, or t
caaaatccaggctgggaacatgctaggcaccgcctgtgggacccctggatatgtggccccagagctcttggagcagaaaccctacgggaaggccgtagatgtgtgggccctgggcgtcatctcctacatcctgctgtgtgggtacccccccttctacgacgagagcgaccctgagctcttcagccagatcctgagggccagctatgagtttgactctcctttctgggrtgacatctcagaatcagscaaagacttyatycggcaccttctggagcgagaccyycagaagaggttcacctgccaacaggccttgcggsacctttggrtctytkgggacacagscttygrcagggacatcttaggstytgtcagtgagcagatccggaagaactttgctyggacacactggaagcgagccttcaatgccacctygttcctgcgccacatccggaagctggggcagatcccagagggcgagggggcctctgagcagggcatggsccgccacagccactcaggcctycgtgctggccagccccccaagtggtgatgcccaggnagatgccgaggccaagtggantganccccagatttncttnc

SEQ ID NO: 496 - DNA, 600 bp, Homo sapiens; identical to SEQ ID NO: 495
  misc_feature (559)..(559): n is a, c, g, or t
  misc_feature (580)..(580): n is a, c, g, or t
  misc_feature (584)..(584): n is a, c, g, or t
  misc_feature (595)..(595): n is a, c, g, or t
  misc_feature (599)..(599): n is a, c, g, or t

SEQ ID NO: 497 - DNA, 1400 bp, Homo sapiens
  misc_feature (1395)..(1396): n is a, c, g, or t
gcaacaaatgcccaagtcattttttaaaaatttctaatgaaagaagtttgtgttctgtccaaaaagtcactgaactcatacttcagtacatatacatgtataaggcacactgtagtgcttaatatgtgtaaggacttcctctttaaatttggtaccagtaacttagtgacacataatgacaaccaaaatatttgaaagcacttaagcactcctccttgtggaaagaatataccaccatttcatctggctagttcaccatcacaactgcattaccaaaaggggatttttgaaaacgaggagttgaccaaaataatatctgaagatgattgcttttccctgctgccagctgatctgaaatgttttgctggcacattaatcatagataaagaaagattgatggacttagccctcaaatttcagtatctatacagtactagaccatgcattcttaaaatattagataccaggtagtatatattgtttctgtacaaaaatgactgtattctctcaccagtaggacttaaactttgtttctccagtggcttagctcctgttcctttgggtgatcactagcacccatttttgagaaagctggttctacatggggggatagctgtggaatagataatttgctgcatgttaattaattctcaagaactaagcctgtgccagtgctttcctaagcagtatacctttaatcagaactcattcccagaacctggatgctattacacatgcttttaagaaacgtcaatgtatatccttttataactctaccactttggggcaagctattccagcactggttttgaatgctgtatgcaaccagtctgaataccacatacgctgcactgttcttagagggtttccatacttaccaccgatctacaagggttgatccctgtttttaccatcaatcatcaccctgtggtgcaacacttgaaagacccggctagaggcactatggacttcaggatccactagacagttttcagtttgcttggaggtagctgggtaatcaaaaatgtttagtcattgattcaatgtgaacgattacggtctttatgaccaagagtctgaaaatctttttgttatgctgtttagtattcgtttgatattgttacttttcacctgttgagcccaaattcaggattggttcagtggcagcaatgaagttgccatttaaatttgttcatagcctacatcaccaaggtctctgtgtcaaacctrtggccactctatatgcactttgtttactctttatacaaataaatatactaaagactttaaaararaararaaaaaaraaaaraaaaaaaaaarrrrraaraaaaaaaaaaaaaaaaaaaaaaaaaaaaaaaaaaaaaaaaaaaaaaaaaaaaagggggggggccnnaaaa

SEQ ID NO: 498 - DNA, 1400 bp, Homo sapiens
ttctcatgcttcttctcatggggtggggttggggcaaagcctcctttttaatacattaagtggggtagactgagggattttagcctcttccctctgatttttcctttcgcgaatccgtatctgcagaatgggccactgtaggggttggggtttattttgttttgtttttttttttcttgagttcactttggatccttattttgtatgacttctgctgaaggacagaacattgccttcctcgtgcaragctggggctgccagcctgagcggaggctcggccgtgggccgggaggcagtgctgatccggctgctcctccagcccttcagacgagatcctgtttcagctaaatgcagggaaactcaatgtttttttaagttttgttttccctttaaagcctttttttaggccacattgacagtggtgggcggggagaagatagggaacactcatccctggtcgtctatcccagtgtgtgtttaacattcacagcccagaaccacagatgtgtctgggagagcctggcaaggcattcctcatcaccatcgtgtttgcaaaggttaaaacaaaaacaaaaaaccacaaaaataaaaaacaaaaaaaacaaaaaacccaaraaaaaaaaaaagagtcagcccttggcttctgcttcaaaccctcaagaggggaagcaactccgtgtgcctggggttcccgagggagctgctggctgacctgggcccacagagcctggctttggtccccagcattgcagtatggtgtggtgtttgtaggctgtggggtctggctgtgtggccaaggtgaatagcacaggttagggtgtgtgccacaccccatgcacctcagggccaagcgggggcgtggctggcctttcaggtccaggccagtgggcctggtagcacatgtctgtcctcagagcaggggccagatgattttcctccctggtttgcagctgttttcaaagcccccgataatcgctcttttccactccaagatgccctcataaaccaatgtggcaagactactggacttctatcaatggtactctaatcagtccttattatcccagcttgctgaggggcagggagagcgcctcttcctctgggcagcgctatctagataggtaagtgggggcggggaagggtgcatagctgttttagctgagggacgtggtgccgacgtccccaaacctagctaggctaagtcaagatcaacattccagggttggtaatgttggatgatgaaacattcatttttaccttgtggrtgctagtgctgtagagttcactgttgtacacagtctgttttctatttgttaagaaaaactacagcatcattgcataattcttgatggtaataaatttgaataatcagatttcttacaaammarraaaaaaaaaaa

SEQ ID NO: 499 - DNA, 600 bp, Homo sapiens
gtctttggaggagatgaaaagaagtcttcaatacacacccattgacaaatatggctatgtatccgatcccatgagctcaatgcattttcattcttgccgaaatagtagcagctttgaggacagcagctgacagcattcggcgtatacctaaggagagttttttccccgaactgacagcaacgattccaaccacggcaagctggcttccaactataacattttactctcaaaggtctccttaaattgggcttgtttttacttgtcctatttaattccccactattagcaggctttggatttgtgcctaaggaataatatgcaaaagaaccaagacagaatgtatatgaagaattgtttttaattttgtaaattaaaaaaaaatttagatcgttacttggaaatggagcctaagtctgtggtggacagataataattatgttttcctgggctgaattatgtagacttgtgtttgacagctatgggtttatttcttagaacattgttcattttcttttctcattatgttacttctagtgttcacctctgtgattaaagattctttggtgaaatagaaaaaaaaaaaaaaaaaagggcggccgc

SEQ ID NO: 500 - DNA, 1400 bp, Homo sapiens
tagaaggcgatccattttctcagcctattaaatttcccataaatggactctcagatgtaaaaaatacttcggaggacagtgaaaacttcccatcaagttctaaaaagtctgaggagtggcctgactggagtgaacctgaggagcctgaaaatcaaactgtcaacatacagatttggcctagagaaccttgtgatgatgtcaagtcccagtgcactaccttggatgtggaagagtcatcttgggatgactgcgagcccagcagcttagatactaaagtaaacccaggaggtggaatcactgctacaaaacctgttacctcaggggagcagaagcctattcctgctttgctttcactcactgaagagtctatgccttggaaatcaagcttaccccaaaagattagccttgtacaaaggggggatgacgcagaccaaatcgagccgccaaaagtgtcatcacaagaaaggccccttaaggttccatcagaacttggtttaggagaggaattcaccattcaagtaaaaaagaagccagtaaaagatcctgagatggattggtttgctgatatgatcccagaaattaagccttctgctgcttttcttatattacctgaactgaggacagaaatggtcccaaaaaaggatgatgtctccccagtgatgcagttttcctcaaaatttgctgcagcagaaattactgagggagaskytkawggmtgkraagaagaaggggagctgaactgggaagataataactggtgacaatagatgtgagttaaactttaggaaaaaggattccctttttttaaaaaaaatcaatacctcaaaagcaggctttgggacaagaaaaccccaaagtggcctgcttttcccatcccaggagctcattatccagtctgtgccaactgaagtaggagactgactgtgagtgctggctaaaagccctgggtggtgaggctcacagtactggtttccaggaggaagagcctttgtgcatttgactgaggccagtttctatgaagagcaagtagctgaggagaggtcgaatttactgctttttccaggacaattctggaagtaaagaaaatgtaattcaagctggttagcttaattttgtgccattctttaacataagagtaagctctattatgaaatacaactttaaaaaattttagctataaattatataaatgattttaaattgctgaggtttccttaggcagcttatttatttgtttacagttagactatctgagtaaatggttctttgtggacctaggcagttcctgactgttccacatgtagtacattgtaccaaagttcttaataagaatattccccacaatcctgttctctaaatgtcaaataaagattattttcactagattcaactttacaaaa

SEQ ID NO: 501 - DNA, 1400 bp, Homo sapiens; identical to SEQ ID NO: 500

SEQ ID NO: 502 - DNA, 600 bp, Homo sapiens
gaagccatttctataatgagaaggctgttaagaagaaatcctgaacggcgccttggggctagcgagaaagatgcagaggatgtaaaaaagcacccatttttccggctaattgattggagcgctctgatggacaaaaaagtaaagccaccatttatacctaccataagaggacgagaagatgttagtaattttgatgatgaatttacctcagaagcacctattctgactccacctcgagaaccaaggatactttcggaagaggagcaggaaatgttcagagattttgactacattgctgattggtgttaagttgctagacactgcgaaaccaagctgactcacaagaagacctcttaaaaatagcaacccttcatttgctctctgtgccaccaatagcttctgagttttttgttgttgttgtttttattgaaacacgtgaagatttgtttaaaagtaccattctaatacttcttcaaaagtggctcctcattgtacttcagcgtaaatatgagcactggaaacagtttcatggagtttaagttgagtgaacatcggccatgaaaatccatcacgaatacttttggatcaatagtctatttt

SEQ ID NO: 503 - DNA, 600 bp, Homo sapiens
tatattctttaaatttttatcttacttttggataatatccactscamtwskamttrasmarsmtgaaytwkytcmarrggcacacaatgctattgaaattactgaaaacaaaatatctgacatcttatttacttgtagaaatctgtaattctattgtgcctatgataaattcacataggcaatatctttaataggttaatatcaatgaagatttttaattacaataatgagttcactacagacgattaacacaccacactggcgaaccatctcaatgtaagggtggtttggcaacacctccttgctttgctgtttggtgtaggtaaatctagtttacttcctaaatttcagtaggctttatgctgtgtttatgcccccaatttattttaacaaaagaagattaaaaagtaaaagaaccacgagtaagatattatttaaatgttgaaatcttaaaaacctgcctccaagatttcagaagccaagtttttctaacagtatttgtacaaatactgcctagtgtattcaacagaaggactgtggtcatgtaacaggtaaccacaattttcaggtttcttaaaaacagctgtaactaactcagga

SEQ ID NO: 504 - DNA, 600 bp, Homo sapiens; identical to SEQ ID NO: 503

SEQ ID NO: 505 - DNA, 600 bp, Homo sapiens
cagatatttcataatttctaacctctgttctctcagtaaacagaatgtctgatcgatcatgcagatacaatgttggtatttgagaggttagtttttttcctacacttttttttgccaactgacttaacaacattgctgtcaggtggaaatttcaagcacttttgcacatttagttcagtgtttgttgagaatccatggcttaacccacttgttttgctatttttttctttgcttttaattttccccatctgattttatctctgcgtttcagtgacctaccttaaaacaacacacgagaagagttaaactgggttcattttaatgatcaatttacctgcatataaaatttatttttaatcaagctgatcttaatgtatataatcattctatttgctttattatcggtgcaggtaggtcattaacaccacttcttttcatctgtaccacaccctggtgaaacctttgaagacataaaaaaaacctgtctgagatgttctttctaccaatctatatgtctttcggttatcaagtgtttctgcatggtaatgtcatgtaaatgctgatattgatttcactggtccatctatatttaaaacgtgc

SEQ ID NO: 506 - DNA, 600 bp, Homo sapiens
atggactgatttgctggagttcagggaactacttattagctgtagagtccttggcaaatcacaacattctgggccttttaactcaccaggttgcttgtgagggatgagttgcatagctgatatgtcagtccctggcatcgtgtattccatatgtctataacaaaagcaatatatacccagactacactagtccataagctttacccactaactgggaggacattctgctaagattccttttgtcaattgcaccaaaagaatgagtgccttgacccctaatgctgcatatgttacaattctctcacttaattttcccaatgatcttgcaaaacagggattatcatccccatttaagaactgaggaacctgagactcagagagtgtgagctactggcccaagattattcaatttatacctagcactttataaatttatgtggtgttattggtacctctcatttgggcaccttaaaacttaactatcttccagggctcttccagatgaggcccaaaacatatataggggttccaggaatctcattcattcattcagtatttattgagcatctagtataagtctgggcactggatgcatgaatt

SEQ ID NO: 507 - DNA, 1400 bp, Homo sapiens
actgaaaagcaaggttcagaaatgtcagatatcctccgggagctgctctgtgtctctgagaaggctgctaacattgcccgggcgtgcagacagcaggaagccctcttccagctgctgatcgaagaaaagaaagagggagaaaagaacaagaagtttgcagttgacttcaagacgctggctgatgtactggtacaggaagttataaaacagaatatggagaacaagtwkmmaggcwtrgmmaaraatatttttggagaagaatccaatgagtttactaatgactggggggaaaagattaccttgaggttgtgttcaacagaggaggaaacagcagagcttcttagcaaagtcctcaatggtaacaaggtggcatctgaagcattagccagggttgttcatcaggatgttgcctttactgacccaactctggattccacagagatcaatgttccacaggacattttgggaatttgggtggaccccatagattcaacttatcagtatataaaaggttctgctgacattaaatccaaccagggaatcttcccctgtggacttcagtgtgtcaccattttaattggtgtctatgacatacagacaggggttcccctgatgggagtcatcaatcaaccttttgtgtcacgagatccaaacaccctcaggtggaaaggacagtgctattggggcctttcttacatggggaccaacatgcattcactacagctcaccatctctagaagaaacggcagtgaaacacacactggaaacaccggctctgaggcagcattctcccccagtttttcagccgtaattagtacaagtgaaaaggagactatcaaagctgcattgtcacgtgtgtgtggagatcgcatatttggggcagctggggctggttataagagcctatgtgttgtccaaggcctcgttgacatttacatcttttcagaagataccacattcaaatgggactcttgtgctgctcatgccatactgagggccatgggtgggggaatagtagacttgaaagaatgcttagaaagaaatccagaaacagggcttgatttgccacagttggtgtaccacgtggaaaatgagggtgctgctggggtggatcggtgggccaacaagggaggactcattgcatacagatccaggaagcggctggagacattcctgagcctcctggtccaaaacctggcacctgcagagacgcatacctagaggaactctaaccccggtgtacctgtataaactgaactgtgaaactgtttcggttatctctgtcttttgaggatggctttgtcctgttgctggttaacattcaccttcctcttttgaggagtatttttccattatgtattcataataatgttaatttcaataaatgacattcatgcagc

SEQ ID NO: 508 - DNA, 600 bp, Homo sapiens
ggcgattggctccaggccattaaaatggaccggtataaggataacttcacagctgctggttataccacactagaggctgtggtgcacgtgaaccaggaggacctggcaagaattggtatcacagccatcacrcaccagaataagattttgagcagtgtccaggcaatgcgaacccaaatgcagcagatgcacggcagaatggttcccgtctgagccagtactgaataaactcaaaactcttgaaattagtttacctcatccatgcactttaattgaagaactgcactttttttacttcgtcttcgccctctgaaattaaagaaatgaaaaaaaaaaaacaatatctgcagcgttgcttggtgcacagattgctgaaactgtggggcttacagaaatgactgccggtcatttgaatgagacctggaacaaatcgtttctcagaagtacttttctgttcatcaccagtctgtaaaatacatgtacctatagaaatagaacactgcctctgagttttgatgctgtatttgctgccagacactgagcttctgagacatccctgattctctctccatttggaattacaacggtcgacgagctcga

SEQ ID NO: 509 - DNA, 1400 bp, Homo sapiens
tgtgcctaccaagcagagccaaacacctgtgccaccgcgcagggggagggcaacatcaaaaagaaccggcatcctgacttcctgccctatgaccatgcccgcataaaactgaaggtggagagcagcccttctcggagcgattacatcaacgccagccccattattgagcatgaccctcggatgccagcctacatagccacgcagggcccgctgtcccataccatcgcagacttctggcagatggtgtgggagagcggctgcaccgtcatcgtcatgctgaccccgctggtggaggatggtgtcaagcagtgtgaccgctactggccagatgagggtgcctccctctaccacgtatatgaggtgaacctggtgtcggagcacatctggtgcgaggactttctggtgcggagcttctacctgaagaacgtgcagacccaggagacgcgcacgctcacgcagttccacttcctcagctggccggcagagggcacaccggcctccacgcggcccctgctggacttccgcaggaaggtgaacaagtgctaccggggccgctcctgccccatcatcgtgcactgcagtgatggtgcggggaggaccggcacctacatcctcatcgacatggtcctgaaccgcatggcaaaaggwgtgaaggagattgacatcgctgccaccctggagcatgtccgtgaccagcggcctggccttgtccgctctaaggaccagtttgaatttgccctgacagccgtggcggaggaagtgaatgccatcctcaaggccctgccccagtgagaccctggggccccttggcgggcagcccagcctctgtccctctttgcctgtgtgagcatctctgtgtacccactcctcactgccccaccagccacctcttgggcatgctcagcccttcctagaagagtcaggaagggaaagccagaaggggcacgcctgcccagcctcgcatgccagagcctggggcatcccagagcccagrgcatcccatgggggtgctgcagccaggaggagaggaaaggacatgggtagcaattctacccagagccttctcctgcctacattccctggcctggctctcctgtagctctcctggggttctgggagttccctgaacatctgtgtgtgtccccctatgctccagtatggaagaatggggtggagggtcgccacacccggctccccctgcttctcagccccgggcctgcctctgactcacacttgggcgctctgccctccctggcctcacgcccagcctsstcccaccaccctcccaccatgcgctgctcaacctctctccttctggcgcaagagaacatttctagaaaaaactacttttgtaccagtgtgaataaagttagtgtgttgtctgtgcagctgcaaaaaaa

SEQ ID NO: 510 - DNA, 1400 bp, Homo sapiens
ctgttttatggatctggtctgactgaattcaagggaagaagttacagatttatggtaatggaaagactaggaatagatttacagaagatctcaggccagaatggtacctttaaaaagtcaactgtcctgcaattaggtatccgaatgttggatgtactggaatatatacatgaaaatgaatatgttcatggtgatrtaaaagcagcaaatctacttttgggttacaaaaatccwkaccaggtttatcttgcagattatggactttcctacagatattgtcccaatgggaaccacaaacagtatcaggaaaatcctagaaaaggccataatgggacaatagagtttaccagcttggatgcccacaagggagtagccttgtccagacgaagtgacgttgagatcctcggctactgcatgctgcggtggttgtgtgggaaacttccctgggaacagaacctgaaggaccctgtggctgtgcagactgctaaaacaaatctgttggacgagctcccccagtcagtgcttaaatgggctccttctggaagcagttgctgtgaaatagcccaatttttggtatgtgctcatagtttagcatatgatgaaaagccaaactatcaagccctcaagaaaattttgaaccctcatggaatacctttaggaccactggacttttccacaaaaggacagagtataaatgtccatactccaaacagtcaaaaagttgattcacaaaaggctgcaacaaagcaagtcaacaaggcacacaataggttaatcgaaaaaaaagtccacagtgagagaagcgctgagtcctgtgcaacatggaaagtgcagaaagaggagaaactgattggattgatgaacaatgaagcagctcaggaaagcacaaggagaagacagaaatatcaagagtctcaagaacctttgaatgaagtaaacagtttcccacaaaaaatcagctatacacaattcccaaactcattttatgagcctcatcaagattttaccagtccagatatattcaagaagtcaagatctccatcttggtataaatacacttccacagtcagcacggggatcacagacttagaaagttcaactggactttggcctacaatttcccagtttactcttagtgaagagacaaacgcagatgtttattattatcgcatcatcatacctgtccttttgatgttagtatttcttgctttattttttctctgaagatgataccaaaattccttttgataattttttaagtttccagctcttcaccgaaatgttgtattcttatttcagtgtttccttccagacatttttaaggtaattggctttaaaaagagaacatattttaacaaagtttgtggacactctaaaaaataaaattgctttgtactagt

SEQ ID NO: 511 - DNA, 600 bp, Homo sapiens
ctctgaaacacactgaaagctctgttgcaattaggattttgatgtgacaataatattgttgtataatttcgagatttgtaggaaggtctcattcttccaagctgagagtctagcactcattttctataacagatatggcagcttagaggtgttggctttgtttggatgtaatttagggtactaaatttaaatttaaagatattgttcaaacaatatcatatcatcacattgagctgatataaattctgtgggtccgataatatctttgtgataatttaagagctaaccagttaccacacatctatgatataaccctaacacacacagaaaagcatacatgcaaaaagaaatgactaattagggtacatttataattgcatctaggtaatttttaccctaatgtcttcataaagtacttgagtgtaatgtttgttacctccaacagaactaaatgttctatggttatgaaagaatatatttatttaaagcattgcttttattttgaaaagcttcttaattaatttgattaacaaatatgctaatttggggaaacctagagaagataattgttgaaattttgcaaatataaacatctcctat

SEQ ID NO: 512 - DNA, 600 bp, Homo sapiens; identical to SEQ ID NO: 511

SEQ ID NO: 513 - DNA, 600 bp, Homo sapiens
tgtccaaggcccctgtactccaggagggtccaatcatgaggcacctaataatgcctttgggcagaaagtcctagaactcagaagtgccatgaccttgcataggggtaggcctgcagctgaggggtgtcacgtggtgcaaaaggcctcccagctacatcctgggatggggtttgagatggattaatggcctttgcatggcacagaggatgtttgcccccaggtttatcccttaataaaagtgaaattaccagaaaaaattaaggtgcctttcagcccatctcttctgacatggaagaggtttgctgagcggcttatgttctgaatttgtttatgagaactgatcattagtgagactggccacagtatttaaccttgcacatgcatgctcagtgaagcctagacattcagagcagcagaaataaagtaacttatttttctttccaccttgcctgagactggcattttagagacctgttaaaagaaagtcttcacatggctgggtgcagtggctcacacttgtaaccacaggactttgggaggccaaggtgggatagatcgcttgagctcaggagcaagacaccatctcaaaaaatgagaatt

SEQ ID NO: 514 - DNA, 600 bp, Homo sapiens; identical to SEQ ID NO: 513

SEQ ID NO: 515 - DNA, 1400 bp, Homo sapiens
ttgtctaactgctagtaaccctaccgagttttatatatgagtgggatactcaatctggccttaaaaagatacacaaagatgggctgtgggtccctggaaagggggagagttgccctttacagaatcactcgagccctttccagcactgttggtctgatgaacaaggttgttttaccttattttctcttggaacatatctgaaaaccttccccacaaataacttgtcacaccttttgtttcattctgagtctttagttttagtcatgggctttcttcacctgctctaggtgcaaaggcatgttgggaaagagatggatgttggggaggaagagaggagatggatttcagttgggagttaggaggagagtaggtgagatgatcagacaccggagttcaacgtcccagcagtcttggtaaaaggagggagcctgctgagccaggagggagaaaagaagattgaccagcttgctagaaaaatacttagcttttctttttctttttttgtggaggggggacggagaggaacaaggatggggaggtaggaatgaggtatagaaaagagatagcatcttctttggcacaagamtagtggcttaccgcttaccttagagttttgttttttttttttcaaacccatcaaaatctacttatttatgaatccaaggggtggcagcatcactctgttctagcattctttgtggagatggtctggtgcctagctgggagtgagcagcagcccatcccctgttcactttctctagcccatcattacctgtgaactgcagtggggcagtcatggcaaatagaattgggctggggtttctccttcttttcagttcattgtttgccctgctaggaattagaagacagacaccatgtcccaggacagtgttacttcttctgcatgatgtgtggtagactccctttgctggcttgtgcagtgatactgagaaaatacatgaacagaaactgcccaggtggaacagcacgtaacctagtgagtgactgtactcctttctaggaatgctgattcagagtgcacctctttgactaggtcccaggatccccttgtccctggagtagggactaactatagcacaaagtaatatgtgccaatgctatttgtgaaatgtttggtctttctaaacgactaaaggatttgttgggtttttgcttaagttttgaaccaaatcctagagccagctgataatatttaataatctggaggagagaataatgatgtaccaataagtggagattcctccttatgatgtatgctaggttatggaagatgtaaaatattcaactttttcctcctttttttggactttgtattttactgcatgttttcttcatttttaatcaataaagagtaaattgtcaaaaaaaaaaaaaaaaaa

SEQ ID NO: 516 - DNA, 600 bp, Homo sapiens
gctgaagagcgacctcacagccgtgctggctgactttggcttggctgttcgatttgagccagggaaacctccaggggacacccacggacaggtaggcacgagacggtacatggctcctgaggtgctcgagggagccatcaacttccagagagatgccttcctgcgcattgacatgtatgccatggggttggtgctgtgggagcttgtgtctcgctgcaaggctgcagacggacccgtggatgagtacatgctgccctttgaggaagagattggccagcacccttcgttggaggagctgcaggaggtggtggtgcacaagaagatgaggcccaccattaaagatcactggttgaaacacccgggcctggcccagctttgtgtgaccatcgaggattgctgggaccatgatgcagaggctcgcttgtccgcgggctgtgtggaggagcgggtgtccctgattcggaggtcggtcaatggcactacctcggactgtctcgtttccctggtgacctctgtcaccaatgtggacctgccccctaaagagtcaagcatctaagcccaggacatgagtgtctgtccagactcagtggatctgaagaa

SEQ ID NO: 517 - DNA, 600 bp, Homo sapiens
catatcctcacactcggatgggctctctgacaaggagtgtgccgtgcgccgtgtgaagactcagatgtctctgggcaagctgtgtgtggaggaacgtggctatgagaaccccatgcagtttgaagaatcggactgtgactcttcagatggggagtgttctgatgccacagttaggaccaataaacactacagctctgctacctggtaatgaaggaatacacatcctgaagatctcgtgactatactggcatttcagatccaccccacccccagactcatcccactctctcccagcattttgtctgggaagagagactaccccatctttaccaccccctagaaatgagctgcaataacaggaacatgagacttcgcaaatctctggaaaataatatccaaatgaaattaagtctcactgaacatttcaatcaagaatggcagggatctattttattgaatattctagctactgtaacattgatatttatttttgtttgacattttaacactttgtactgcaaagagtgaactatatatgagatagagagacaataatttcttgcaaaaaaaaaaagagataaaagaaagaacagaaaaaaa

SEQ ID NO: 518 - DNA, 600 bp, Homo sapiens
atgatcatagccccaggaacccttgaggttcttcttcacaaggctgagagtgcttccttcttgaagacgagtgacattcatcacttcagtgatccatgcatagaatatgaaaataaattcttccaactcatgggataaaggggactcccttgaagaatttcatgtttttgggctgtatagctctttacagaaaatgcacctttataaatcacatgaatgttagtattctggaaatgtcttttgttaatataatcttcccatgttatttaacaaattgtttttgcacatatctgattatattgaaagcagttttttgcattcgagttttaaacactgttataaaatgtagccaaagctcacctttgaacagatcccggtgacattctatttccaggaaaatccggaacctgattttagttctgtgattttacactttttacatgtgagattggacagtttcagaggccttattttgtcatactaagtgtctcctgtaattttcaggaagatgatttgttctttccagaagaggagacaaaagcaagatagccaaatgtgacatcaagctccattgtttcggaaatccaggattttgaattc

SEQ ID NO: 519 - DNA, 600 bp, Homo sapiens; identical to SEQ ID NO: 518

SEQ ID NO: 520 - DNA, 1400 bp, Homo sapiens
ctggagcaaaacctgaagtgtcttcatgtgcattctctggcaggccacagtcctgagcttgtaagatggtgcagcatgcagaccagacttgtccccaaggtctcagcgctgcggtctcactcctcccctcatttaagaagactatccttaccttttagtttcagcagtcctcaccaccaccatatccccagtgctgggatggcacacaggtgtccattcagatgagagttgggtcgctgagcattggttactcctgcagagtgtaatcagcaccccatccaactggcccgaaagcccagacctgcagcagaactctccaactctctatcagctttcagggttttctctcctgggaagggtgtaaaatcagcttgtcagattcttcttacagagagtatccaatcggtattggtggagcggctccctatttatacaataggaagcatgggtgcttagaaagtttatttcaggaggaaaatgggttcacacaaaaagcaaactacattctgrtctgctcagggagaagcttgcctttgaactggaagatgttgggatgagcagggaaagcttagactttggagtcaggtttgtgttcagaatccagccctgctggctactaactaactgggagaccttaggcaaagcatgcaatcgctctgaatggcagtttcctcatttttaaacagggataataaaactaatattgcaggggagttacagggttaaataagatcctgtgtgtaaccccaagcattggatgactcatagaatggccttttttgtcagcataatcgtcatcattatttagatactttcttccttcactcacccagcaggtcagttttctgtgcaaacaaacctgtttaggattcttccaaatgttcttcctggggtctttgatatttgtttgttacatcctgctgaagttcgactgtgtttttattttttcatccaacttccatttttcactttttacatgattactcaatccttggggctgtccatgtcatctcttagatttcttaaaagacattttaatgtatggttaggttttatatttttattttttaaaaaagaaatagtcagtgttttcctcctttcaaccgagactatttctggattgtgtgctcctcgtcagttgacttgttttgcacacttttctttacttcatgtccccatcaacaaccgtcctgctccccacctcccccaggaaataaggggcctgctcctctccctactgtgaccctggaggctcttaagatgatgatggttttttttattgggctgagttcacgaattaggggcaggagctggaagtcgccctaggaacaccagatttcctggttctgttcaagttggcatttcttgtttggaataaactatttcttggacattccttc

SEQ ID NO: 521 - DNA, 600 bp, Homo sapiens
gctgaccttggcgacctcagctccggcctccaaggctcaccagctggatyccctcctgggggcttcattcccaaaacggccaccacgcccaaaggcagcagctcctggcagacaagtcggccgccagcccagggcgcctcatggccccctcaggccaagccgccccccaaagcctgcacacagccaaggcctaactatgcctcgaacttcagtgtgatcggggcgcgggaggagcggggggtccgcgcacccagctttgctcaaaagccaaaagtctctgagaacgactttgaagatctgttgtccaatcaaggcttctcctccaggtctgacaagaaagggccaaagaccattgcagagatgaggaagcaggacctggctaaagacacggacccactcaagctgaagctcctggactggattgagggcaaggagcggaacatccgggccctgctgtccacgctgcacacagtgctgtgggacggggagagccgctggacgcccgtgggcatggccgacctggtggctccggagcaagtgaagaagcactatcgccgcgcggtgctggctgtgcaccccgacaaggtgagcagagctgcc

SEQ ID NO: 522 - DNA, 600 bp, Homo sapiens; identical to SEQ ID NO: 521

SEQ ID NO: 523 - DNA, 1400 bp, Homo sapiens
accagaacaatctgtcaacaaaattgcgatgagagaaataaagtttctaaagcaatttcatcacgaaaacctggtcaatctgattgaagtttttagacagaaaaagaaaattcatttggtatttgaatttattgaccacacagtattagatgagttacaacattattgtcatggactagagagtaagcgacttagaaaatacctcttccagatccttcgagcaattgactatcttcacagtaataatatcattcatcgagatataaaacctgagaatattttagtatcccagtcaggaattactaagctctgtgattttggttttgcacgaacactagcagctcctggggacatttatacggactatgtggccacacgctggtatagagctcccgaattagtattaaaagatacttcttatggaaaacctgtggatatctgggctttgggctgtwtgatcattgagatggccactggaaatccctatcttcctagwagtyctgatttggatttactccataaaattgttttgaaagtgggcaatttgtcacctcacttgcagaatatcttttccaagagccccatttttgctggggtagttcttcctcaagttcaacaccccaaaaatgcaagaaaaaaatatccaaagcttaatggattgttggcagatatagttcatgcttgtttacaaattgatcctgctgacaggatatcatctagtgatcttttgcatcatgagtattttactagagatggatttattgaaaaattcatgccagaactgaaagctaaattactgcaggaagcaaaagtcaattcattaataaagccaaaagagagttctaaagaaaatgaactcaggaaagatgaaagaaaaacagtttataccaatacactgctaagtagttcagttttgggaraggaaatagaaaaagagaaaaagcccaaggagatcaaagtcagagttattaaagtcaaaggaggaagaggagatatctcagaaccaaaaaagaaagagtatgaaggtggacttggtcaacaggatgcaaatgaaaatgttcatcctatgtctccagatacaaaacttgtaaccattgaaccaccaaaccctatcaatcccagcactaactgtaatggcttgaaagaaaatccacattgcggaggttctgtracaatgccacccatcaatctaactaacagtaatttgatggctgcaaatctcagttcaaatctctttcaccccagtgtgaggtgagctgtaacagagaagaaacctaaataatacaacattcctgtataatggtatttcaaagaatcgtgttcatagtgtctgtatgtaaactgaacttgaagaaaatatattgaaattaaagctgtataatgggccaaaaaaaaaaaaa

SEQ ID NO: 524 - DNA, 600 bp, Homo sapiens
agcaataatgatccatacatactataaggcacttttaacagattgtttatagagtgattttactagaaagaatttaataaactcgaagtttaggtttatgagtatataaacaaatgaggcacttcatctgaagaatgttggtgaaggcaagtctctgaaagcagaactatccagtgttatctaaaaattaatctgagcacatcaagattttttcattctcgtgacattaggaaatttaggataaatagttgacatatattttatatcctcttctgttgaatgcagtccaaacatgaaaggaaataattgttttatattataactctgaagcatgataaaggggcagttcacaattttcaccatttaaacacaaatttgctgcacagaatatcaccattgcagttcaaaacaaaacaaaacaaaaagtcttttgtttgtgaacactgatgcaagaaacttgttaaatgaaaggactctttaccctagaaggaagaggtgaaggatctggcttgtttttaaagctttatttattaaaccatattatttgattactgtgttagaatttcataagcaataattaaatgtgtctttatggaattc

SEQ ID NO: 525 - DNA, 600 bp, Homo sapiens
tgttggacacttggcagaaggaccgtgcccggcggcctcattttgaccagctggtggctgcatttgacaagatgwtccgcaagccagataccctgcaggctggcggggacccaggggaaaggccttcccaggcccttctgacccctgtggccctggactttccttgtctggactcaccccaggcctggctttcagccattggactggagtgctaccaggacaacttctccaagtttggcctctgtaccttcagtgatgtggctcagctcagcctagaagacctgcctgccctgggcatcaccctggctggccaccagaagaagctgctgcaccacatccagctccttcagcaacacctgaggcagcagggctcagtggaggtctgagaatgacgatacccgtgactcagccctggacactggtccgagaagggacatgtgggacgtgagccgggctccaacagcctctgtgagagatgccccacaccaaacccaaccctcccgatggctgcattccctggtcctccgcytytccaccagccccctcctcattaaagggaaagaagggaatttgcaaaaaaaaaaaaaaaaaaaaaaaaaa

SEQ ID NO: 526 - DNA, 600 bp, Homo sapiens
gttaagctctacatagattaaattggagaaacgtgttaattgtgtggaatgaaaaaatacatatatttttggaaaagcatgatcatgcttgtctagaacacaaggtatggtatatacaatttgcagtgcagtgggcagaatacttctcacagctcaaagataacagtgatcacattcattccataggtagctttacgtgtggctacaacaaattttactagctttttcattgtctttccatgaaacgaagttgagaaaatgattttccctttgcaggttgcacacagttttgtttatgcatttccttaaaattaattgtagactccaggatacaaaccatagtaggcaatacaattttagaatgtaatatatagaggtatatttagcctcttttagaagtcagtggattgaatgtctttttattttaaattttacattcattaaggtgcctcgtttttgactttgtccattaacatttatccatatgcctttgcaataactagattgtgaaaagctaacaagtgttgtaacaataatccattgtttgaggtgcttgcagttgtcttaaaaattaaagtgttttggtttttttttttccag

SEQ ID NO: 527 - DNA, 600 bp, Homo sapiens; identical to SEQ ID NO: 526

SEQ ID NO: 528 - DNA, 600 bp, Homo sapiens
cagtggtcgtcacgctgtggtacagagcacccgaagtcttgctccagtccagctacgccacccccgtggatctctggagtgttggctgcatatttgcagawmtktttcktwkaragcctctttttcgtggaagttcagatgttgatcaactaggaaaaatcttggacgtgattggactcccaggagaagaagactggcctagagatgttgcccttcccaggcaggcttttcattcaaaatctgcccaaccaattgagaagtttgtaacagatatcgatgaactaggcaaagacctacttctgaagtgtttgacatttaacccagccaaaagaatatctgcctacagtgccctgtctcacccatacttccaggacctggaaaggtgcaaagaaaacctggattcccacctgccgcccagccagaacacctcggagctgaatacagcctgaggcctcagcagccgccttaagctgatcctgcggagaacacccttggtggcttatgggtccccctcagcaagccctacagagctgtggaggattgctatctggaggccttccagctgctgtcttctggacaggctctgcttctccaaggaaa

SEQ ID NO: 529 - DNA, 600 bp, Homo sapiens
ctgctggatgcccagggattcctgaagatcgcagactttggactctgcaaggaagggatcggcttcggggaccggactagcaccttctgtggcaccccggagttcctggctcccgaggtgctgacccaggaggcatacacacrggcygtsgactggtgggsgctgggtgtgctgctctacgagatgctggtgggtgagtgcccgttcccaggggacacagaggaagaggtgtttgactgcatcgtcaacatggacgccccctaccccggctttctgtcggtgcaagggcttgagttcattcagaagctcctccagaagtgcccggagaagcgcctcggggcaggtgagcaggatgccgaggagatcaaggtccagccattcttcaggaccaccaactggcaagccctgctcgcccgcaccatccagccccccttcgtgcctaccctgtgtggccctgcggacctgcgctactttgagggcgagttcacagggctgccgcctgccctgaccccacctgcaccccacagcctcctcactgcccgccaacaggccgccttccgggacttcgactttgtgtcagagcgattcctggaaccctga

SEQ ID NO: 530 - DNA, 1400 bp, Homo sapiens
cctgactacctaccacgcactgaggactttggcctggatgtgcctgctttccgaactctggtgggggatgactgcccactgcctttcttgctcctggccatccactgctgcaacctggaacccagcacccgtgcccccttcaccgaaattacccagcacctggaatggatcctggagcagctgcctgagccagccccactcaccaggaccgccctgacacacaatcagggctctgttgcaagagggggtccctctgccacgcttcccaggccagatccccggctttcccgaagccggtcagacctcttcctgcccccatcaccagaatcaccccccaactggggggacaatctgactcgagtcaaccccttctcactacgggaagacctcaggggtggcaagatcaagctcttagacacacccagcaagccagtcctgcctcttgtgccaccatcaccattcccatccactcagctgcccttggtgaccactccggagaccctggtccagcctgggacacctgcccgccgctgccgctcactaccctcatcccccgagctcccccgccgtatggagacagcactgccaggtcctggccctcccgctgtgggcccctcggctgaagagaagatggagtgcgagggcagcagccctgagccggaacctccagggccagcgccccagctgcctctggctgtggccacagacaacttcatcagcacctgttcctcggcctcccaaccctggtcccctagatcaggacccgtcctcaataacaatcccccagctgtggtggtgaactccccacaaggctgggctggggagccctggaaccgggcccagcatagcctgccccgggcggcagccctggagcggacagaaccctcgccacccccttcagctccccgggagcccgatgaggggctgccctgtcctggctgctgcctcggccccttcagctttggcttcctgtccatgtgcccccgccccacaccagctgttgcccgctaccgcaacctgaactgtgaggcgggcagtctcctctgccaccgagggcaccacgccaagccacccacacccagcctgcagctgcctggggcacgctcttagcagtggagcccgtggtctcaggcctccaactttggccttcaggacaccctgtaagaacagagcacacttgctggacagtgccagttccagatgggctgaccggctcttctccccgtgtaggggagccccagcatggactcaagggacagagcacttccagtcgaccccccggctcgcgttcccgtggggatcactgaaccagacacagcattgctgacacatgagactaacacgtgcaattatttaaaaagatttcaataaaactgcctggctggctccgggccgcccct

SEQ ID NO: 531 - DNA, 1400 bp, Homo sapiens
gatgatcacagggactttgcaggagaactggaagttctttgtaaacttggacaccatccaaacatcatcaatctcttaggagcatgtgaacatcgaggctacttgtacctggccattgagtacgcgccccatggaaaccttctggacttccttcgcaagagccgtgtgctggagacggacccascatttgccattgccaatagcaccgcgtccacactgtcctcccagcagctccttcacttcgctgccgacgtggcccggggcatggactacttgagccaaaaacagtttatccacagggatctggctgccagaaacattttagttggtgaaaactatgtggcaaaaatagcagattttggattgtcccgaggtcaagaggtgtaygtgaaaaagacaatgggaaggctcccagtgcgctggatggccatcgagtcactgaattacagtgtgtacacaaccaacagtgatgtatggtcctatggtgtgttactatgggagattgttagcttaggaggcacaccctactgcgggatgacttgtgcagaactctacgagaagctgccccagggctacagactggagaagcccctgaactgtgatgatgaggtgtatgatctaatgagacaatgctggcgggagaagccttatgagaggccatcatttgcccagatattggtgtccttaaacagaatgttagaggagcgaaagacctacgtgaataccacgctttatgagaagtttacttatgcaggaattgactgttctgctgaagaagcggcctaggacagaacatctgtataccctctgtttccctttcactggcatgggagacccttgacamctgctgagaaaacatgcctctgccaaaggatgtgatatataagtgtacatatstrywkgaattctaacaagtcataggttaatatttaagacactgaaaaatctaagtgatataaatcagattcttctctctcaattttatccctcacctgtagcagccagtcccgtttcatttagtcatgtgaccactctgtcttgtgtttccacagcctgcaagtcagtccaggatgctaacatctaaaaatagacttaaatctcattgcttacaagcctaagaatctttagagaagtatacataagtttaggataaaataatgggattttcttttcttttctctggtaatattgacttgtatattttaagaaataacagaaagcctgggtgacatttgggagacatgtgacatttatatattgaattaatatccctacatgtattgcacattgtaaaaagttttagttttgatgagttgtgagtttaccttgtatactgtaggcacactttgcactgatatatcatgagtgaataaatgtcttgcctactcaaaaaaaaaaaa

SEQ ID NO: 532 - DNA, 600 bp, Homo sapiens
agtgtaataaagtcaattaaaaacttcccaggatttmtttggacccassaaacagccatgtgggtcctttctgtgcactatsaacgcttctttcccaggacagaaaatgtgtagtctacctttattttttattaacaaaacttgttttttaaaaagatgattgctggtcttaactttaggtaactctgctgtgctggagatcatctttaagggcaaaggagttggattgctgaattacaatgaaacatgtcttattactaaagaaagtgatttactcctggttagtacattctcagaggattctgaaccactagastttccttgattcagactttgaatgtactgttctatagtttttcaggatcttaaaactaacacttataaaactcttatcttgagtctaaaaatgacctcatatagtagtgaggaacataattcatscaattgtattttgtatactattattgttctttcacttattcagaacattacatgccttcaaaatgggattgtactataccagtaagtgccacttctgtgtctttctaatssaaatgagtagaattgctgaaagtctctatgttaaaacctatagtgttt

SEQ ID NO: 533 - DNA, 600 bp, Homo sapiens; identical to SEQ ID NO: 532

SEQ ID NO: 534 - DNA, 1400 bp, Homo sapiens
caatgacgaggtggcccgagaatttgtgaaactcaaatcagagtctcgttccacggaggaggggagctgaasassttcgactcctgtgccaatcaggcagcagcaatttcacaaatcagggccagtgggagttagctgtgtaaccggcttagggtctttgcagtcaagaggctgaccccttcagttaaagatatttaaggaaaaatttggggtggtgataatatggcttttcacagaaagggtcatgaagccctggcccaacaggactgtggtactaggggctgggatgtggggttaccacatggagagattttccattaagagagaaggacaaacatttctgagagtgtcagccattcttggtagacacctctccactcctcatcccacctctacccatctccatgccacaccttatccagttagacacatacataccaatcattagaagaacaagtttagaaggtgtggaacttgtgcctggctggctgggtagtcagctgagcctgttgctgagcccggtggtctggattggagtatggccagggcaggagtacacagaatagaatttagactgtcccttgagtagaatccactgattttctgtggctccagtgagaacaaggctttgaaactgaacaagataacttctagaaatgaactgtactaatccctttccccagattgtatcatgagtagaatcaggttcacgtggtgcttcaaagccctgagaagaatatttctttggaccccaggcactaggggccacctgcctgggagtctccctgcctcactcctctaggcaggggagtgatgcttcaggacgtgacaggctgttctaacatgtgtctacctgagggctagttgaaggatccaggagtattttcttcttgggtgggccctgaacaaagccaaaaattgtagaaaccagtctagaaaaagtcctgctcatctgtggccactgccttctagccgtcctccaccttgcagaaagaatctagcctttggtctctctctctctcatcggggtcatttgctattcccctctgatattcaaccctatagaaggagcctggactctgatccctctgtacaggctggatggaaggggccctccacacttcctgggaggtcagagacaaactgtttcagagagtcagatggacttcccaagacttgttgagagatgtgacatggttcttggatttcctctgtagcagcctcctggacttcctgaggactcgacattgtccacagatgtactggccattacatgaaacaagaaaccaagcatctttgctgttgttaattattatatgtgccattgttacaggagattataggctagtctgtaataaattatcttatagcaaaaaaaaaaaaaaaaaaaaaaaaaaaaa

SEQ ID NO: 535 - DNA, 600 bp, Homo sapiens
gtgaagcacatcaaggtggtggagaaggacaactggatccacatcacagaggccaagaaattcgacagcctcctggagttggtggagtactaccagtgccactcactgaaggagagcttcaagcagctggacaccacactcaagtacccctacaagtcccgggaacgttcggcctccagggcctccagccggtccccagcttcctgtgcttcctacaacttttcttttctcagtcctcagggcctcagctttgcttctcagggcccctccgctcccttctggtcagtgttcacgccccgcgtcatcggcacagctgtggccaggtataactttgccgcccgagatatgagggagctttcgctgcgggagggtgacgtggtgaggatctacagccgcatcggcggagaccagggctggtggaagggcgagaccaacggacggattggctggtttccttcaacgtacgtagaagaggagggcatccagtgacggcaggaacgtggacaagactcgcagattttcttgggagagtcactccagccctgaagtctgtctctagctcctctgtgactcagaggggaaataccaacctcccagtct

SEQ ID NO: 536 - DNA, 600 bp, Homo sapiens
atgtcagctcgaactccaccggaagcagctagtttcggctctggcctccaagtccacagtggaaccagcccagacccttctccttagaagtggaagtagtggagcccctgctctggtggggctgccaggggagaccccgggagccggggaaggaggccgtccatcccgtcgacgtagaacctcgaggtttctcaaagaaatttccactcaggtctgttttccgaggcggccccggscggggtggattggatttgtctttggtgaacattgcaatagaaatccaattggatacgacaacttgcacgtattttaatagcgtcataactagaactgaattttgtctttatgatttttaaagaaaagttttgtaaatttctctactgtctcagtttacattttcggtatatttgtatttaaatgaaagtgagactttgagggtgtatattttctgtgcagccactgttaagccatgtgttccaaggcattttagcggggagggggttatcaaaaaaaaaaaaaatgtgactcaagacttccagagcctcaaatgagaaaatgtctttattaaatgtagaaagtgatccatacttcaaaaaaaaa

SEQ ID NO: 537 - DNA, 600 bp, Homo sapiens; identical to SEQ ID NO: 536

SEQ ID NO: 538 - DNA, 600 bp, Homo sapiens
ttgtagatggcgatgtgttatagacggtgctcactcccaagggacagcaagtgagcagagatgtactgcaaagtcgccagtcactgctgcaaggtggcctctgcctggggcctccagaagctgctcctttaccctcttggtcccatggctgaagctggagcagcggattgctctggagcagccaaggccgccagcgtgtggagcagagctctcccctcctgctgggcgtgtgtgacactgatgagtttcactgtactgcatgtgacttctcccctgcccttcctcctgatggagtgtgcagacagccatgcgtggccacgggggcagtgtgaggacctccctgtctcccggctcccctcccaggggagccagctgcttgacctagctctttgggcctctcctgccctctgctctgcctggagtgtcggatcctgtgagtaggctgggcctcccctgggcagggttctccaagggcccggtttcccggcccttacctttcctgatgccctgacatcatcattcttgtgggagacagcagcctgtatgtggtgtggggcgtggatcgagtgtagctgtgaaatccatatatatgaaatgtcc

SEQ ID NO: 539 - DNA, 600 bp, Homo sapiens; identical to SEQ ID NO: 538

SEQ ID NO: 540 - DNA, 1400 bp, Homo sapiens
gttccgagccatccagttggagcctgcagagccaggccaggcatggggccgccagtccccccgacgtctggaggactcaagcaatggagagcggcgagcatgctgggcttggggtccagttcccccaagctggggaagcccagaatgggaggagaaggtcccgcatggacgaagccacatggtacctggattcagatgactcatcccccttaggatctccttccacacccccagcactcaatggtraccccccgyggcctwgcctssagcccgaggagcccaagagatctggctgagctccttccgtgggcaccttggggaggccacaataggctacggggagtccccgacaacaccccccacgccaacgcccgcgccctgcccgaccgagccgccccttccccgctcatctgcttctcgctcaagacgcccgactccccgcccactcctgcacccctgttgctggacctgggtatccctgtgggccagcggtcagccaagagcccccgacgtgaggaggagccccgcggaggcactgtctcacccccaccggggacatcacgctctgctcctggcaccccaggcaccccacgttcaccacccctgggcctcatcagccgacctcggccctcgccccttcgcagccgcattgatccctggagctttgtgtcagctgggccacggccttctcccctgccatcaccacagcctgcaccccgccgagcaccctggaccttgttcccggactcagaccccttctgggactccccacctgccaaccccttccaggggggcccccaggactgcagggcacagaccaaagacatgggtgcccaggccccgtgggtgccggaagcggggccttgagtgggccaggccactcccccgagctccagctgccttaggaggagtcacagcatacactggaacaggagctgggtcagcctctgcagctgcctcagtttccccagggaccccacccccctttgggggtcaggaacactacactgcacaggaagccttcacactggaagggggacctgcgcccccacatctgaaacctgtaggtccccccagctcacctgccctactggggcccaacactgtacccagctggttgggaggaccagagcctgtctcagggaattgcctgctggggtgatgcagggaggaggggaggtgcagggaagaggggccggcctcagctgtcaccagcacttttgaccaagtcctgctactgcggcccctgccctagggcttagagcatggacctcctgccctgggggtcatctggggccagggctctctggatgccttcctgctgccccagccagggttggagtcttagcctcgggatccagtgaagccagaagccaaataaactcaaaagctgtctcccc

SEQ ID NO: 541 - DNA, 1400 bp, Homo sapiens; identical to SEQ ID NO: 540

SEQ ID NO: 542 - DNA, 600 bp, Homo sapiens
agtgtgctggccttctggagccatgggatgcaaggccgaagcctggataccaatgaggtgacccaggagatcacagatgaaacaaggatcttccgagtgcttggggcccacagagacatcatcctggagagcattcccactgacaacccagaggcgcacagcaacctctacatcctcacgggccaccagagcacctactaagagcagcgggcctgtccaggggctccccgccccaccccacgccttagctgcaggcccttttgggcaaaggggcccatcctagaccagaggagcccaggccctggccctgctggggctgaaggtcagaagtaatcctgagaaatgtttcaggcctggggagggaggggagcccccgacgcctctgcaataactggaccagggggagctgctgtcactcccccatccccgaggcagcccagtccctagtgcccaaggcagggaccctgggcctgggccatccattccattttgttccacatttcctttctactctttctgccaagagcctgcccctgcatttgtcctgggaaacacggtatttaagagagaactatattggtattaaagctggtttgtttt

SEQ ID NO: 543 - DNA, 1400 bp, Homo sapiens
ggttgcggccgcagagtcccggggtgcccatgcagacgccctgcttcacgctgcagtacgctgcccccgagctgctggcgcagcagggctacgacgagtcctgcgacctctggagcctgggcgtcattctgtacatgatgctgtcggggcaggtccccttccagggggcctctggccagggcgggcagagccaggcggccgagatcatgtgcaaaatccgcgaggggcgcttctcccttgacggggaggcctggcagggtgtatccgaggaagccaaggagctggtccgagggctcctgaccgtggaccccgccaagcggctgaagctcgagggactgcggggcagctcgtggctgcaggacggcagcgcgcgctcctcgcccccgctccggacgcccgacgtgctcgagtcctctgggcccgcagtgcgctcgggtctcaacgccaccttcatggcattcaaccggggcaagcgggagggcttcttcctgaagagcgtggagaatgcacccctsrccaagcggcggaagcagaagctgcggagcgccaccgcctcccgccggggctcccctgcaccagccaacccgggccgagcccccgtcgcctccaaaggggccccccgccgagccaacggccccctgcccccctcctaatccccaccactgtgacccccttccctcataggggctgtgacctgggagcccggctcactcccggaggcctctgcctgcggctgacctgatccccaagggactgtcctttcctctcctaccccaccccactcccagacagagcagaagtatttttataagcagagaattttttatgtcttaccagatagagttgcagggaagggggggcctgctggggagtggggtttggggggccctctcccaggacactgcctcttctgggcagaaggcccctccagggggactgctccaacaggaaagagcccctcccccacttctaagcactgagttaggagtgctaactcctaaactgggaccccctaccctgttctcccctgaggccccgttcctgggaggggcacccctcaactgtcactttatggactgtctgtgcaattacgtccaccaaagacccgtgttgggggtactgaaggagaggccctgggggaccctctgaagcatttctgcctcactttatgtcatctgcttctcccctgttggggctaaggaaggagataggtggctcctaaaagaggaggccatcttctcacccaccccttcctctttggcacagctactcctggctgggggtggggccttgggggtctgggctgggcatccatggtcactgcctcagcccagccaggctgtgcctttgactttaaaataaaagtccacccagtgctgtgtgtggcaaaaaaaaaaaaa

SEQ ID NO: 544 - DNA, 1400 bp, Homo sapiens
tatatcaagtgcaaacatccttttggatgatcagtttcaacccaaactaactgattttgccatggcacacttccggtcccacctagaacatcagagttgtaccataaatatgaccagcagcagcagtaaacatctgtggtacatgccagaagagtacatcagacaggggaaactttccattaaaacagatgtctacagctttggaattgtaataatggaagttctaacaggatgtagagtagtgttagatgatccaaaacatatccagctgcgggatctccttagagaattgatggagaagagaggcctggattcatgtctctcatttctagataagaaagtgcctccctgccctcggaatttctctgccaagctcttctgtttggcaggccggtgtgctgcaacgcgggcaaagttaagaccatcaatggatgaagttttaaatactcttgaaagtactcaagccagcttgtattttgctgaagatcctcccacatcactaaagtccttcaggtgtccttctcctctattcctggagaatgtaccaagtattccagtggaagatgatgaaagccagaataacaatttactaccttctgatgaaggcctgaggatagacagaatgactcagaaaactccttttgaatgcagccagtctgaggttatgtttctgagcttggacaaaaagccagagagcaagagaaatgaggaagcttgcaacatgcccagttcttcttgtgaagaaagttggttcccaaagtatatagttccatcccaggacttaaggccctataaggtaaatatagatccttcttcagaagctccagggcattcttgcaggagcaggccagtggagagcagctgttcctccaaattttcctgggatgaatatgaacagtacaaaaaagaataaattctaccagaagataaagaaaaaagcaagtattgcataggcacctgagcataggtatgaccttgggaagacattggctccataagcaatgccaagagaatgatcaatagtgagtttgggtgatgcagataaacaatctggataattccatttcttttttcccaaaccctcaaacagagtgccttaaaaaattgttttatcaggataattgtctcatgaccaaatccacgctcaattagagccattcaaaattccttaagatcatgggttctgacttcagccaaacaaaacaatcaaaacctaccaaaaagggactggattgtaatgtcctctccatcatcctcagtgtgagtcctcagagcctccatctgccaagaacattcagttggattccatcgtttggtttagcttgcttgcacgggttgtaggaaatgtctaatttgtaaatgttaatagatacctttggaaagaaaaaaaaaaawaaaaa

SEQ ID NO: 545 - DNA, 600 bp, Homo sapiens
tggccagcggaccaggattccctctactatggggacctcatcctgcagatgctctcagagtccgtcctgcctgagtggaccatccgggagtttaagatatgcggtgaggaacagcttgatgcacacagactcatccgccactttcactatacggtgtggccagaccatggagtcccagaaaccacccagtctctgatccagtttgtgagaactgtcagggactacatcaacagaagcccgggtgctgggcccactgtggtgcactgcagtgctggtgtgggtaggactggaacctttattgcattggaccgaatcctccagcagttagactccaaagactctgtggacatttatggagcagtgcacgacctaagacttcacagggttcacatggtccagactgagtgtcagtatgtctacctacatcagtgtgtaagagatgtcctcagagcaagaaagctacggagtgaacaagaaaaccccttgtttccaatctatgaaaatgtgaatccagagtatcacagagatccagtctattcaaggcattgagaatgtacctgaagagctcctggataaaaattattcactgtgtgatttgtt

SEQ ID NO: 546 - DNA, 600 bp, Homo sapiens
cgtaagtcaggctcgagggagactgatcccctgaccaattcacctgataaactctagggacactggcagctgtggaaatgaatgaggcacagccgtagagctgtggctaagggcaagccccttcctgccccaccccattccttatattcagcaagcaacaaggcaatagaaaagccagggttgtctttatattctttatccccaaataatagggggtggggggaggggcggtgggaggggcaggagagaaaaccacttagactgcacttttctgttccgtttactctgtttacacattttgcacttgggaggagggaggctaaggctgggtcctcccctctgaggtttctcaggtggcaatgtaactcatttttttgtcccaccatttatcttctctgcccaagccctgtcttaaggcccagggggaggttaggagactgatagcatgtgatggctcaggctgaagaaccggggtkctgtttaagtccctgcttttatcctggtgcctgattggggtggggactgtcctactgtaacccctgtgaaaaaccttgaaawataacactccatgcaggaaaaaaaaaaaaaaaaaaaaaaaaa

SEQ ID NO: 547 - DNA, 1400 bp, Homo sapiens
  misc_feature (1397)..(1397): n is a, c, g, or t
acccagggratcaagacagcagtcacacacagggacccccgttgaagaaagtgagagttgttcctcctaccactacctcaggtggacttatcatgacctcagactatcagcgttccaatccacatgctgcctatcccaaccctggaccaagcacatcacagccgcagagcagcatgggatactcagctacctcccagcagcctccacagtactcacatcagacacatcggtactgagctgcatcggaatcttgtccatgcactgttgcgaatgctgcagggctgactgtgcagctctctgcgggaacctggtatgggccatgagaatgtactgtacaaccacatcttcaaaatgtccagtagccaagttccaccacttttcacagattggggtagtggcttccaagttgtacctattttggagttagacttgaaaagaaagtgctagcacagtttgtgttgtggatttgctacttccatagtttacttgacatggttcagactgaccaatgcatttttttcagtgacagtctgtagcagttgaagctgtgaatgtgctaggggcaagcatttgtctttgtatgtggtgaattttttcagtgtaacaacattatctgaccaatagtacacacacagacacaaagtttaactggtacttgaaacatacagtatatgttaacgaaataaccaagactcgaaatgagattattttggtacacctttctttttagtgtcttatcagtgggctgattcattttctacattaatcagtgttttctgaccaagaatattgcttggatttttttgaaagtacaaaaagccacatagtttttccagaaaggtttcaaaactcccaaagattaacttccaacttataagtttgtttttattttcaatctatgacttgactggtattaaagctgctatttgatagtaattaaatatgttgtcattgatataaacctgtttggttcagcaaacaaactaaaatgattgtcatagacagtgttttatttttcctgttggtgttgctgatttgtgagcatgctttaagatgaaaaaagcatgaatgataacttccttaaaaaggtgcggcatccaattcaaatattttcgtcctgattttaaagctggttggtgtagtgctattaaaatttcgttcagttaattttccttttgaaaacttgttcgcacgttgtttagggtgcccttacttcagcaaaggagaaggagtaggagagccttagaatttttgaggaaaaaaaaacctataacatacaatgtactgtatcaaactattttacatgaatgacacaagtattctgaataaaaaataattgaacattgttaaaaacaaggtgttatgtaataaatttatttttcataaatcaaaaaaanaaa

SEQ ID NO: 548 - DNA, 1400 bp, Homo sapiens; identical to SEQ ID NO: 547
  misc_feature (1397)..(1397): n is a, c, g, or t

SEQ ID NO: 549 - DNA, 1400 bp, Homo sapiens
actgtgacctcaaaccagaaaatgtgttgctagcctcagctgatccttttcctcaggtgaaactttgtgattttggttttgcccggatcattggagagaagtctttccggaggtcagtggtgggtacccccgcttacctggctcctgaggtcctaaggaacaagggctacaatcgctctctagacatgtggtctgttggggtcatcatctatgtaagcctaagcggcacattcccatttaatgaagatgaagacatacacgaccaaattcagaatgcagctttcatgtatccaccaaatccctggaaggaaatatctcatgaagccattgatcttatcaacaatttgctgcaagtaaaaatgagaaagcgctacagtgtggataagaccttgagccacccttggctacaggactatcagacctggttagatttgcgagagctggaatgcaaaatcggggagcgctacatcacccatgaaagtgatgacctgaggtgggagaagtatgcaggcgagcagsggctgcagtaccccacacacctgatcaatccaagtgctagccacagtgacactcctgagactgaagaaacagaaatgaaagccctcggtgagcgtgtcagcatcctctgagttccatctcctataatctgtcaaaacactgtggaactaataaatacatacggtcaggtttaacatttgccttgcagaactgccattattttctgtcagatgagaacaaagctgttaaactgttagcactgttgatgtatctgagttgccaagacaaatcaacagaagcatttgtattttgtgtgaccaactgtgttgtattaacaaaagttccctgaaacacgaaacttgttattgtgaatgattcatgttatatttaatgcattaaacctgtctccactgtgcctttgcaaatcagtgtttttcttactggagcttcattttggtaagagacagaatgtatctgtgaagtagttctgtttggtgtgtcccattggtgttgtcattgtaaacaaactcttgaagagtcgattatttccagtgttctatgaacaactccaaaacccatgtgggaaaaaaatgaatraggagggtagggaataaaatcctaagacacmaatgcatgaacaagttttaatgtatagttttgaatcctttgcctgcctggtgtgcctcagtatatttaaactcaagacaatgcacctagctgtgcaagacctagtgctcttaagcctaaatgccttagaaatgtaaactgccatatataacagatacatttccctctttcttataatactctgttgtactatggaaaatcagctgctcagcaacctttcacctttgtgtatttttcaataataaaaaatattcttgtcaaaaaaaaaaaaaaaa

SEQ ID NO: 550 - DNA, 600 bp, Homo sapiens
tttacattagggataatgcataaggaattaatcttcatatatattatcatccctaatgtagcagggggaagtatttaattgcccatgatatgtattttacttatactatgccagagaggaaactataaagtaattacacatgtaatcttgggtttttcacatatgtaggtattcattttgagtaggttgaagaagaaaaaaaatatttaaatgaattgaattcctgatgggatagtatcaataagtatttaaaagccagtattctaaaaataataaagggtagggtcatttttgagtttgtttttcttttgctattgttaatattcaaaattaaagtgttacattggtacctgttgtcttaatgcatttattgagaacagcattgagatgatgaacaaggggttagcaatagcaaactctataattattttgactaattacttaagaggaaaacagtataagtatctcattcagtatttagcaattctgtaaaataagtattatctctatttttcagatgaggaagtaagggtttagcaaggttaagagatctatccaatttacacagcaagttagtagttgagcctgaccatgagtctt

SEQ ID NO: 551 - DNA, 600 bp, Homo sapiens; identical to SEQ ID NO: 550

SEQ ID NO: 552 - DNA, 1400 bp, Homo sapiens
gcagtgatgcaccttgtgttgtaaaagtggaacccagtgacaatggacctctttttactgaattaaagttctaccaacgagctgcaaaaccagagcaaattcagaaatggattcgtacccgtaagctgaagtacctgggtgttcctaagtattgggggtctggtctacatgacaaaaatggaaaaagttacaggtttatgataatggatcgctttgggagtgaccttcagaaaatatatgaagcaaatgccaaaaggttttctcggaaaactgtcttgcagctaagcttaagaattctggatattctggaatatattcacgagcatgagtatgtgcatggagatatcaaggcctcaaatcttcttctgaactacaagaatcctgaccaggtgtacttggtagattatggccttgcttatcggtactgcccagaaggagttcataaagaatacaaagaagaccccaaaagatgtcacgatggcactattgaattcacgagcatcgatgcacacaatggygtggccccatcaagacgtggtgatttggaaatacttggttattgcatgatccaatggcttactggccatcttccttgggaggataatttgaaagatcctaaatatgttagagattccaaaattagatacagagaaaatattgcaagtttgatggacaaatgttttcctgagaaaaacaaaccaggtgaaattgccaaatacatggaaacagtgaaattactagactacactgaaaaacctctttatgaaaatttacgtgacattcttttgcaaggactaaaagctataggaagtaaggatgatggcaaattggacctcagtgttgtggagaatggaggtttgaaagcaaaaacaataacaaagaagcgaaagaaagaaattgaagaaagcaaggaacctggtgttgaagatacggaatggtcaaacacacagacagaggaggccatacagacccgttcaagaaccagaaagagagtccagaagtaattcagatgctgtgaaccagatttccttttctttgttttcttttgacttttttctccttttctrttwgaactgttttattttcctgtgagtcttgcgaggtggaaktaatgattaaatactcatgtgttcagaaaacataaactttttttataaaaatattttgtacaattcattaaaggctaatttatgaaatttgaaaatcttcaggttatactccttaagttatcccaaagccgtgtgtttgtgatgttttggagtacatatatatgaaaattattatgacacgcacttttctaatcattgtacatttctcagagtggataaaaatgtttgacaaagtcctcacttttaaggaaatgcaaagcttaaaataaaactctcttttgtttgatgcag

SEQ ID NO: 553 - DNA, 600 bp, Homo sapiens
tgctctatgagatgctctgtggtcacgcgccttttgaggcagagaaygaagatgacctctttgaggccatactgaatgatgaggtggtctaccctacctggctccatgaagatgccacagggatcctaaaatctttcatgaccaagaaccccaccatgcgcttgggcagcctgactcagggaggcgagcacgccatcttgagacatcctttttttaaggaaatcgactgggcccagctgaaccatcgccaaatagaaccgcctttcagacccagaatcaaatcccgagaagatgtcagtaattttgaccctgacttcataaaggaagagccagttttaactccaattgatgagggacatcttccaatgattaaccaggatgagtttagaaacttttcctatgtgtctccagaattgcaaccatagccttatggggagtgagagagagggcacgagaacccaaagggaatagagattctccaggaatttcctctatsggaccttcccagcatcagccttagaacaagaaccttaccttcaaggagcaagtgaagaactctgtcgaaggatggaactttcagatatcaactatttagagtcc

SEQ ID NO: 554 - DNA, 600 bp, Homo sapiens
ccctccgttgttggtccactgcagtgctggggtaggaaggacwkscktkstgatytysycggrgawcatkatckcytrcctkkmwcwcaaykaggtgctggacatcccgagagtgctggacatgctgaggcaacagagaatgatgctggtgcagactctctgccagtacacatttgtgtacagagtcctcatccagtycctgaaaagctccaggctcatctaagctcccacaatttcttacggggccagtcatgtgaagcgtttacagcttaaaaaaaaagcgcttgcctaactcatactttcccgttgacacttgatccacgcagcgtggcactgggacgtaagtggcgcagtctgaatggcggcacgctgaaggaaacgtgcgaagcacaggctgaagaggggtttctaacctgggaaaggtgctcaaggaggacttggtttcaagggccttgccctgccccggtctgtccggtttgcagtacttgcacacattttggagattgtattttctagacaattctctattttactgaagctatgctgggcaattctggcaatcattaaagtgcatagatttctatcttaaaaaaaaaaaaa

SEQ ID NO: 555 - DNA, 600 bp, Homo sapiens; identical to SEQ ID NO: 554

SEQ ID NO: 556 - DNA, 1400 bp, Homo sapiens
gattaccaactggttcgaaaacttggtcggggaaaatatagtgaagtatttgaggccattaatatcaccaacaatgagagagtggttgtaaaaatcctgaagccagtgaagaaaaagaagataaaacgagaggttaagattctggagaaccttcgtggtggaacaaatatcattaagctgattgacactgtaaaggaccccgtgtcaaagacaccagctttggtatttgaatatatcaataatacagattttaagcaactctaccagatcctgacagactttgatatccggttttatatgtatgaactacttaaagctctggattactgccacagcaagggaatcatgcacagggatgtgaaacctcacaatgtcatgatagatcaccaacagaaaaagctgcgactgatagattggggtctggcagaattctatcatcctgctcaggagtacaatgttcgtgtagcctcaaggtacttcaagggaccagagctcctcgtggactatcagatgtatgattatagcttggacatgtggagtttgggctgtatgttagcaagcatgatctttcgaagggaaccattcttccatggacaggacaactatgaccagcttgttcgcattgccaaggttctgggtacagaagaactgtatgggtatctgaagaagtatcacatagacctagatccacacttcaacgatatcctgggacaacattcacggaaacgctgggaaaactttatccatagtgagaacagacaccttgtcagccctgaggccctagatcttctggacaaacttctgcgatacgaccatcaacagagactgactgccaaagaggccatggagcacccatacttctaccctgtggtgaaggagcagtcccagccttgtgcagacaatgctgtgctttccagtggtctcacggcagcacgatgaagactggaaagcgacgggtmwgttgcggywytsmyrcttkycmataagcagamcaasaaccaaawcaaacgtcttaacgcgtatagagagatcacgttccgtgagcagacacaaaacggtggcaggtttggcgagcacgaactagaccaagcgaagggcagcccaccaccgtatatcaaacctcacttccgaatgtaaaaggctcacttgcctttggcttcctgttgacttcttcccgacccagaaagcatggggaatgtgaagggtatgcagaatgttgttggttactgttgctccccgagcccctcaactcgtcccgtggccgcctgtttttccagcaaaccacgctaactagctgaccacagactccacagtggggggacgggcgcagtatgtggcatggcggcagttacatattattattttaaaagtatatattattgaataaaaggttttaaaag

SEQ ID NO: 557 - DNA, 1400 bp, Homo sapiens
ctggatttggagatggagggggtcccaagcactgccatcagggagatctcgctgctcaaggaactgaagcaccccaacatcgtcmgactgctggacgtggtgcacaacgagaggaagctctatctggtgtttgagttcctcagccaggacctgaagaagtacatggactccaccccaggctcagagctccccctgcacctcatcaagagctacctcttccagctgctgcagggggtgagtttctgccactcacatcgggtcatccaccgagacctgaagccccagaacctgctcatcaatgagttgggtgccatcaagctggctgacttcggcctggctcgcgccttcggggtgcccctgcgcacctacacccatgaggtggtgacactgtggtatcgcgcccccgagattctcttggsmascargttctataccacagctgtggatatctggagcattggttgcatctttgcagagatggtgactcgaaaagccctgtttcctggtgactctgagattgaccagctctttcgtatctttcgtatgctggggacacccagcgaagacacatggcccggggtcacccagctgcctgactataagggcagcttccctaagtggaccaggaagggactggaagagattgtgcccaatctggagccagagggcagggacctgctcatgcaactcctgcagtatgaccccagccagcggatcacagccaagactgccctggcccacccgtacttctcatcccctgagccctccccagctgcccgccagtatgtgctgcagcgattccgccattgagaatgtcaaggccacactcagatcctttctcgagcagcagctgctgccccagctgcctcctacccattgccaagagaggatgcatctggggagagcaaagcactaaggaattcagcatcagcctgcagagggctgagtctgggttagtcctgcccgcaggttagcgagatcctgtgttgttttttgggttggacggtgccgtttcaaaatagaggcacagatgctccatgcacgaggggtccccgggcactggaacaagtgccaagttgaaggcagggggcctgccagagctgggtgtgggtattcaggccctcacctgccctgcctgcagggccagaccctgaggaaagggcgccccctgctggtctttttggatttaaaatgtttgggggaagagttgagttccagttcagtcccaagttaaacaggagggagtgagggagaggagagagggcgttccccggatcccaggagagctgggctatgactgcaataaggagttgttccttcacctgagatgtgcttcttttggttcatttctggcttgacaacaagaaataaacgtggtatgttcctgaaaaaaaaaaaaa

SEQ ID NO: 558 - DNA, 600 bp, Homo sapiens
tacaaatgtttgtycttttttcagcaaaatacttcaaatgaatagtattaacttacaaaaagtcacgaaaaacttacatgagagtgaaaatttgttatgactgttttgagagtgggactcactctgaagtatgtgctgtctcatgtcttatttttgaaccatgcatatgatggacacacaatggatggacacattatatctccaacaaggtgtgggtggaaagatcaaattaacctgcttttttgaaaggaaatgattactgtcaaaccagcatggttaattgtgagcatcctcctgcagcatgccccttaagattttctacaacccaaaccaagtgtatgtattgatttctaggaacccccaaaaggagaatagtaaaaaaagatcatacttaaaatttgtattacaatttttattttaggaacttattcagacacgtaaatgttgtttaattctgtaggtaaccatttgagctgcaattcaggatcttttttataacaccagtgtagccaaaagagaaacagataagtgaattggtaagaaataagattcagagcacttgggattgtaagttataggttctgagctgaactgtttatc

SEQ ID NO: 559 - DNA, 600 bp, Homo sapiens; identical to SEQ ID NO: 558

SEQ ID NO: 560 - DNA, 1400 bp, Homo sapiens
agtgggaaccagggcctcgcagcagcaaggtgggggcaagcagaatgcctcccaggatttcacacctgagccctgccccaccctgctgaraaaacactccgccacgtgaagagacagaaggaggatggcaggagttacctsgggaaacaaacaggatcttytctgccctgctccagtcgagttggcctgacccgcttggatcagtgaccatttgytggcagacaggggagagcagcttccagcctgggtcagaaggggtgggcgagcccytcggcccctcaccctccaggctgctgtgagagtgtcaagtgtgtaagggcccaaactcaggttcagtgcagaaccaggtcagcaggtatgcccgcccgtaggttaagggggccctctaaaccccttgcctggcctcacctggccagctcaccccttttgggtgtaggggaaaagaatgcctgaccctgggaaggctccctggtagaatacaccacacttttcaggttgttgcaacacaggtcctgagttgacctctggttcagccaaggaccaaagaaggtgtgtaagtgaagtggttctcagtccccagacatgtgcccctttgctgctggctaccactcttccccagagcagcaggccccgagccccttcaggcccagcactgccccagactcgctggcactcagttccctcatctgtaaaggtgaagggtgatgcaggatatgcctgacaggaacagtctgtggatggacatgatcagtgctaaggaaagcagcagagagagacgctccggcgccccagccccactatcagtgtccagcgtgctggttccccagagcacagctcagcatcacactgacactcaccctgccctgcccctggccagagggtactgccgacggcactttgcactctgatgacctcaaagcactttcatggctgccctctggcagggcagggcagggcagtgacactgtaggagcatagcaagccaggagatggggtgaagggacacagtcttgagctgtccacatgcatgtgactcctcaaacctcttccagatttctctaagaatagcacccccttccccattgccccagcttagcctcttctcccaggggagctactcaggactcacgtagcattaaatcagctgtgaatcgtcagggggtgtctgctagcctcaacctcctggggcaggggacgccgagactccgtgggagaagctcattcccacatcttgccaagacagcctttgtccagctgtccacattgagtcagactgctcccggggagagagccccggcccccagcacataaagaactgcagccttggtactgcagagtctgggttgtagagaactctttgtaagcaataaagtttggggtgatgacaaatgttaaaaaaa

SEQ ID NO: 561 - DNA, 1400 bp, Homo sapiens
cagattttctcagtaatgtttttgttagcttttggttccattttttattgtgcatgcagaatgtacattgatgcctgtgaccttaggtttattaaaggctaggtttatttgggcagtattagaaacaaaatcatggatcaagagatactcttgataatttgaatagggccaaaacaaagttggtgacctaaaggcttgttagtgatgtggagttcctacatgcagtgagtggaaaatgaagttcgttttctcttaggaaaatgggcagctgtcttctgcctaatgtgtatttttcatgttaattctgacagttcaccaaatagctagtcatggagaatgcaggcagttaacttaatatccctccaggaatggttcctacgttgtgtattacttggtttcttttacttacctgcttgaatacttgaataaaccattcaccaattttaatccttttattttaatccttttacataaaataatctgaactctttgacaaattgcacagagctctttggcattaatctaattttaatgtactgataaaaacaaacatggttttcctttactttgacaaagtaatgtaatttttaccttatttatctgtatgaaattccagtagttaatttgaacatttatttatatgacgtttgtatttttaggtctttaatacagtgtttctacctctcatttgtaactgcatgcattattcttgaaactaggtaaaactcactgaattgttgtgtaatagcctttttattattgcctgtacaaatgtatattaaggtaaaataaaactgacaaagtgtttctagggtgtagctgggtacatattaagtggcttgttgagccaggtacttccttagtgagtttagagacttggccatgaatatcctttgtcctgccccaggatttagatcttggctactgtcatgcaggcttccaggaacatagactgttttacctccacaaccctatttgttattagtgatactttattttatataatattttttattcacagtgaaatttcattcatgttctttcagttatcacctgtgttatctcagttgtaggtttattctatcctctcctcttcctctcccatttcttttttaagacaggatgaaacaggttcagagaggggaagtgattggcctaaagtcaggaactaggcaagtggtcaagccatgctttgtgactttcaagttaattcttcttgttcttgtatattaaaggtcttggggtagatggtgtgtgtgaaacagtgaagtctcaacagcagaaaagaacaaaatgtaaattcatgaataatggttctggttatacttccattatcaaggctaattaagagattttgccttgagtatagcaataataaacaaatgctttatgtttccctg

SEQ ID NO: 562 - DNA, 1400 bp, Homo sapiens; identical to SEQ ID NO: 561

SEQ ID NO: 563 - DNA, 600 bp, Homo sapiens
tcaaaagtgattatctctttgatctacttgcctcatttccctatcttctcccccacggtatcctaaactttagacttcccactgttctgaaaggagacattgctctatgtctgccttcgaccacagcaagccatcatcctccattgctcccggggactcaagaggaatctgtttctctgctgtcaacttcccatctggctcagcatagggtcactttgccattatgcaaatggagataaaagcaattctgrctgtccaggagctaatctgaccgttctattgtgtggatgaccacataagaaggcaattttagtgtattaatcatagattattataaactataaacttaagggcaaggagtttattacaatgtatctttattaaaacaaaagggtgtatagtgttcacaaactgtgaaaatagtgtaagaactgtacattgtgagctctggttatttttctcttgtaccatagaaaaatgtataaaaattatcaaaaagctaatgtgcagggatattgccttatttgtctgtaaaaaatggagctcagtaacataactgcttcttggagctttggaatattttatcctgtattcttgttt

SEQ ID NO: 564 - DNA, 600 bp, Homo sapiens; identical to SEQ ID NO: 563

SEQ ID NO: 565 - DNA, 1400 bp, Homo sapiens
actccagttttcaaatcatgtttgaatctacattcacttttttttgttttcttttttgagacggagtctcgctctgycgcccaggctggagtgcagtggcgcgatctcggctcactgcaagctctgcctcccaggttcacaccattctcctgcctcagcctcccgagtagctgggactacaggtgcccaccaccacgcctggctagttttttgtatttttagtagagacgcagtttcaccgtgttagccaggatggtctcgatctcctgaccttgtgatcygcccgcctcggcctcccaaagtgctgggattacaggygtgagccaccgcgcccagcctacattcacttctaaagtctatgtaatggtggtcattttttcccttttagaatacattaaatggttgatttggggaggaaaacttattctgaatattaacggtggtgaaaaggggacagtttttaccctaaagtgcaaaagtgaaacatacaaaataagactaatttttaagagtaactcagtaatttcaaaatacagatttgaatagcagcattagtggtttgagtgtctagcaaaggaaaaattgatgaataaaatgaaggtctggtgtatatgttttaaaatactctcatatagtcacactttaaattaagccttatattaggcccctctattttcaggatataattcttaactatcattatttacctgattttaatcatcagattcgaaattctgtgccatggcrtatatgttcaaattcaaaccatttttaaaatgtgaagatggacttcatgcaagttggcagtggttctggtactaaaaattgtggttgttttttctgtttacgtaacctgcttagtattgacactctctaccaagagggtcttcctaagaagagtgctgtcattatttcctcttatcaacaacttgtgacatgagattttttaagggctttatgtgaactatgatattgtaatttttctaagcatattcaaaagggtgacaaaattacgtttatgtactaaatctaatcaggaaagtaaggcaggaaaagttgatggtattcattaggttttaactgaatggagcagttccttatataataacaattgtatagtagggataaaacactaacaatgtgtattcattttaaattgttctgtatttttaaattgccaagaaaaacaactttgtaaatttggagatattttccaacagcttttcgtcttcagtgtcttaatgtggaagttaacccttaccaaaaaaggaagttggcaaaaacagccttctagcacacttttttaaatgaataatggtagcctaaacttaatatttttataaagtattgtaatattgttttgtggataattgaaataaaaagttctcattgaatgcacc

SEQ ID NO: 566 - DNA, 1400 bp, Homo sapiens; identical to SEQ ID NO: 565

SEQ ID NO: 567 - DNA, 1400 bp, Homo sapiens
cattaccattcgatgttcttttattcagagcaatgtttcttgtattctgaaactggaaactgaaccagtttgtttctcctagtcaccaagcatactttcctggctccccaagtacttaaatgttctcatctgtcgcacccctgtatttgcctcacccctgcatggtcggaaatcttcgtttcaggtcagaacagcctggggtctgtgggtaaaatcagcccttctcccaggcctgtgcacacaccccctcagcactccctatgcactttcctgacacgcaaagacacagccctctttccccactgggcgtcctaccccagtgaggttgaaggcaccaattccaagaatccctccaacctccctgccagcactcccccttcaccccacacccggcccccccacctaaccacagcgcctctccagacctacctcgggacctaatgttctctacatgaactgctcatttggaggacagcagtgaggtcctgccatagagcaaatgtgttaggagagaaggtttcacatgggacccaacatccttcatcaatactttcctgagtttgatcatccatttagccttgacaaacagcagaccctacagagatgtgttggagagcacgtcgtgaccttgggggcaaggaatccagaaaggtaggaagatatgaaaagagaggtgtcaacagcaagggctcttaggggtcaggcaccagcatggagacctcatgacaaaggaagggactcaaagcagcaatgcccctcatagtgtaggctaaggtgagtttggtgcatgcaaacctgtgtgctcacccacagagcatggggtaatggtgtgtagacacaggccctctgcagaagcgtggggtggggasacygasagccyctmymwrgwmmsswggaacattctaccatttctgccactggtgttcagctccttctcttcccccaacactcccaaagatacccacaggaagtccagccagtttccaggtagaggattccaccagttggtcttgggctgcgttcaccctcacatcacagcaccttaaatctaatcagcaaactataatttgtacgttgaaacctgcaacacattagaaacttatatttaaaaacagaattaatcacactgaccaacttttaaatggaaaatatgtaaataggaagtgtttgggttttgttttttctttaagaaaaagaaatgtacaccactcctcatgtgccattttgtcctcagagggcggctttacttttttggtaaaggaacaagctgctggccttgaccaggagttcatatataactgttattacagaggaattgttataactactaatgtttttaaaaaatttattaaacattattaaacttgatcaggtcaggccaaataaagttttattggaac

SEQ ID NO: 568 - DNA, 1400 bp, Homo sapiens
tttgacacaaatatcacaggcttcagggttaagattgctgtttttctgtccttgctttggcacaacacactgagggttttttttattgcgggtttgcctacaggtagattagattaattattactatgtaatgcaagtacagttgggggaaagcttaggtagatatattttttttaaaaggtgctgcctttttggatttataagaaaatgcctgtcagtcgtgatagaacagagttttcctcatatgagtaagaggaagggactttcactttcaagtggaacagccatcactatcaagatcagctcatggaaggagtaaagaaaatatctcaaaatgagacaaactgaagttttgttttttttttaatgacttaagtttttgtgctcttgcaagactatacaaaactattttaagaaagcagtgatatcacttgaacttcagtgccctcactgtagaatttaaaagccttactgttgattgcccatgttggacttgatggagaaattaaatatctttcattatgctttacaaaatactgtatatgtttcagcaagtttggggaatgggagaggacaaaaaaaagttacatttaatctatgcatttttgccaagccatattgagttattttactactagagacattaggaaactaactgtacaaaagaaccaagtttaaaagcattttgtggggtacatcatttctataattgtataatgtatttctttgtggttttaaatgataaagacattaagttaacaaacatataagaaatgtatgcactgtttgaaatgtaaattattcttagaacactttcaatgggggttgcattgtccttttagtgccttaatttgagataattattttactgccatgagtaagtatagaaatttcaaaaaatgtattttcaaaaaattatgtgtgtcagtgagtttttcattgataattggtttaatttaaaatatttagaggtttgttggactttcataaattgagtacaatctttgcatcaaactacctgctacaataatgactttataaaactgcaaaaaatgtagaaggttgcaccaacataaaaaggaaatatggcaatacatccatgatgttttccagttaacataggaattaccagataaatactgttaaactcttgtccagtaacaagagttgattcatatggacagtatgatttattgtttatttttttaaccaaatacctcctcagtaatttataatggctttgcagtaatgtgtatcagataagaagcactggaaaaccgatcgtctctaggatgatatgcatgtttcaagtggtattgaaagccgcactgatggatatgtaataataaacatatctgttattaatataaaaaaaaaaaaaaaaaaaaaaaaaaaaaaaa

SEQ ID NO: 569 - DNA, 1400 bp, Homo sapiens; identical to SEQ ID NO: 568

SEQ ID NO: 570 - DNA, 1400 bp, Homo sapiens
tcagaagaccaggcagagccctcagacgctgaagcggagccgagtgaccacctcacttgaagctttgcccacagggacagtgctgacagacragagtgggcgacagtggaagctgaagtccttccagaccagggacaaccagggcattctctatgaagctgcacccacctccaccctcacctgtractcaggaccacagaagcaaaagttctcactcaaactggatgccaaggatgggcgcttgttcaatgagcagaacttcttccagcgggccgccaagcctctgcaagtcaacaagtggaagaagctgtactcgaccccactgctggccatccctacctgcatgggtttcggtgttcaccaggacaaatacaggttcttggtgttacccagcctggggaggagccttcagtcggccctggatgtcagcccaaagcatgtgctgtcagagaggtctgtgctgcaggtggcctgccggctgctggatgccctggagttcctccatgagaatgagtatgttcatggaaatgtgacagctgaaaatatctttgtggatccagaggaccagagtcaggtgactttggcaggctatggcttcgccttccgctattgcccaagtggcaaacacgtggcctacgtggaaggcagcaggagccctcacgagggggaccttgagttcattagcatggacctgcacaagggatgcgggccctcccgccgcrgcgacctccagagcctgggctactgcatgctgaagtggctctacgggtttctgccatggacaaattgccttcccaamamtgaggacatcatgaagcaaaaacagaagtttgttgataagccggggcccttcgtgggaccctgcggtcactggatcaggccctcagagaccctgcagaagtacctgaaggtggtgatggccctcacgtatgaggagaagccgccctacgccatgctgaggaacaacctagaagctttgctgcaggatctgcgtgtgtctccatatgaccccattggcctcccgatggtgccctaggtggaatccagaactttccatttgcagtgtgcaacagaaaaaaaaaaatgaagyaatgtgactcaaggcctgctgtttaatcacagataagcttctagaacaagccctggaatgtgcattcctgccactggtttcaggatactcatcagtcctgattagcctcccggagggccccagtttccctcccgtgaatgtgaagttccccatcttggtggcctgcccttcagccagtgtcctagcaaagctggatggggttgggccggcccacaggggggacccctcctacccttgacwcctctgtgctttggtaataaattgttttaccrgaraaaaaaaaaaaacatgtcggccgcctcggcctatg

SEQ ID NO: 571 - DNA, 1400 bp, Homo sapiens
gctggtccggtgtgccagtgggcccccaccaaacagcccccgtcctgggcctcccccatccaccagcagcccccacctcaccgcccattcagaaccctcactctggaacccaccctcccgggagcttgacaagcccccacttctgccccccaagaaggaaaagatgaagagaaagggatgtgcccttctcgtaaagttgttcaatggctgccccctccggatccacagcacggccgcctggacacatccctccaccaaggaccagcacctgctcctgggggcagaggaaggcatcttcatcctgaaccggaatgaccaggaggccacgctggaaatgctctttcctagccggactacgtgggtgtactccatcaacaacgttctcatgtctctctcaggaaagaccccccacctgtattctcatagcatccttggcctgctggaacggaaagagaccagagcaggaaaccccatcgctcacattagcccccaccgcctactggcaaggaagaacatggtttccaccaagatccaggacaccaaaggctgccgggcgtgctgtgtggcggagggtgcgagctctgggggcccgttcctgtgcggtgcattggagacgtccgttgtcctgcttcagtggtaccagcccatgaacaaattcctgcttgtccggcaggtgctgttcccactgccgacgcctctgtccgtgttcgcgctgctgaccgggccaggctctgagctgcccgctgtgtgcatcggcgtgagccccgggcggccggggaagtcggtgctcttccacacggtgcgctttggcgcgctctcttgctggctgggcgagatgagcaccgagcacaggggacccgtgcaggtgacccaggtagaggaagatatggtgatggtgttgatggatggctctgtgaagctggtgaccccggaggggtccccagtccggggacttcgcacacctgagatccccatgaccgaagcggtggaggccgtggctatggttggaggtcagcttcaggccttctggaagcatggagtgcaggtgtgggctctaggctcggatcagctgctacaggagctgagagaccctaccctcactttccgtctgcttggctcccccaggctggagtgcagtggcacgatctcgcctcactgcaacctcctcctcccaggttcaagcaattctcctgcctcagcctcccgagtagctgggattacaggyytgtagtggtggagacacgcccagtggatgatcctactgctcccagcaacctctacatccaggaatgagtccctaggggggtgtcaggaactagtccttgcaccccctcccccatagacacactagtggtcatggcatgtcctcatctcccaataaacatgactttagcctctgc

SEQ ID NO: 572 - DNA, 600 bp, Homo sapiens
gccaccatgaaaaccttctgtgggaccccggagtacctggcgcctgaggtgctggaggacaatgactatggccgggccgtggactggtgggggctgggtgtggtcatgtacgagatgatgtgcggccgcctgcccttctacaaccaggaccacgagcgcctcttcgagctcatcctcatggaagagatccgcttcccgcgcacgctcagccccgaggccaagtccctgcttgctgggctgcttaagaaggaccccaagcagaggcttggtggggggcccagcgatgccaaggaggtcatggagcacaggttcttcctcagcatcaactggcaggacgtggtccagaagaagctcctgccacccttcaaacctcaggtcacgtccgaggtcgacacaaggtacttcgatgatgaatttaccgcccagtccatcacaatcacaccccctgaccgctatgacagcctgggcttactggagctggaccagcggacccacttcccccagttctcctactcggccagcatccgcgagtgagcagtctgcccacgcagaggacgcacgctcgctgccatcaccgctgggtggttttttmcccctgcc

SEQ ID NO: 573 - DNA, 1400 bp, Homo sapiens
tatccgctcgctgaagaccctcttggtacagctgcctgactctaactacaacaccctgcggcacctggtggcccatctgttcagggtggctgcacgatttatggaaaacaagatgtctgccaacaacctgggcattgtgtttgggccgacactgctgcggccgccggacggcccgcgggcagccagcgccatccctgtcacctgcctgctggactctgggcatcaggcccagcttgtggagttcctcatcgtgcactacgagcagatctttgggatggatgagctcccccaggccactgagcccccgccccaagactccagcccagcccctgggcccctcacaaccagctcccaaccgccacccccgcaccttgacccagactcccagcccccagtcctagcctcagaccccggcccagacccccagcaccacagtaccctggagcagcatcccacggccacacctaccgagattccaactccacagagtgaccagagagaggacgtggctgaagacaccaaagatgggggaggggaagtgtccagccaaggcccagaggactcactcctggggacacagtctcgtggccacttcagccgccagccagtgaagtatccccggggcggtgtgaggcctgtaacccaccagctgtccagtctggccctggtggcttccaagctgtgcgaggagacccccatcacatcagtgcccagagggagtttgcgggggcgggggcccagccctgcagctgcctcccctgagggcagccccctgcgccgcaccccgctgcccaagcattttgagattacccaggagacagcccggctactctcgaaattggacagcgaggctgtgcccagggccacctgctgcccggacgtccagcctgaggaagccgaggaccatctctgaccaccctggcaccttaaataaggaagaggcccagattgtgaagacggacccatatatccctacctcccaccacctagtggccaaacaccccgccaggagttcaatgctgggagaggtccagagggttcctataaggaaaaactatttaatacatgacctaggggaggcctaaaacccttttggggataatgtcccagagtccccccactagacacaggtcactgccaagcatcagggccactcgggctcagaggtcactcagggtcaatactcagggtcagtgcaggttatgagatccttggggtccaccctagtctctgacacctgggacaggggtgcttttgctactttggttgtggtcactcccccacacctgcctgcctccttcacggactcgaagtgaccttcctggaggaggtgggcagctcagactccacatgctggtggtgcctgaggtctgatggcctctaataaactgtgtcctata

SEQ ID NO: 574 - DNA, 1400 bp, Homo sapiens
aacttgcagattttggggtagcaggtcaacttacagataccatggccaagcggaatacagtgataggaacaccattttggatggctccagaagtgattcaggaaattggatacaactgtgtagcagacatctggtccctgggaataactgccatagaaatggctgaaggaaagcccccttatgctgatatccatccaatgagggcaatcttcatgattcctacaaatcctcctcccacattccgaaaaccagagctatggtcagataactttacagattttgtgaaacagtgtcttgtaaagagccctgagcagagggccacagccactcagctcctgcagcacccatttgtcaggagtgccaaaggagtgtcaatactgcgagacttaattaatgaagccatggatgtgaaactgaaacgccaggaatcccagcagcgggaagtggaccaggacgatgaagaaaactcagaagaggatgaaatggattctggcacgatggttcgagcagtgggtgatgagatgggcactgtccgagtagccagcaccatgactgatggagccaatactatgattgagcacgatgacacgttgccatcacaactgggcaccatggtgatcaatgcagaggatgaggaagaggaaggaactatgaaaagaagggatgagaccatgcagcctgcgaaaccatcctttcttgaatattttgaacaaaaagaaaaggaaaaccagatcaacagctttggcaagagtgtacctggtccactgaaaaattcttcagattggaaaataccacaggatggagactacgagtttcttaagagttggacagtggaggaccttcagaagaggctcttggccctggaccccatgatggagcaggagattgaagagatccggcagaagtaccagtccaagcggcagcccatcctggatgccatagaggctaagaagagacggcaacaaaacttctgagcaaggccaggctgtgagggccccagctccacccaggctttgggtgaattctggatggcttgcctcatgtttgttagccagcacttctgctctgtcgtctctccacagcacctttgtgaactcaggaatgtgcgccagtgggaagggctctcttgacagtcagcgtgccatcttgatgtgtgtatgtacattggtcaggtatattatctcaaaggatttatattggcgcttttaactcagagttttaaaccccaggaacagagactcctagttgagtgatagctgggaaagttttacattgtctgtttttcttctcccaatagctttcaattgttctttctggaagacttttaaaaaaatataaatatgcatatatatatataaattataaatagattccccacgcagtgtggtggcatctctgta

SEQ ID NO: 575 - DNA, 1400 bp, Homo sapiens
atttgtgacctgaractgttgaagaaatagagaggagggggcccgttgattacagagagcatttgggattttgtttggtttggagatgatgcctaggttactgggtttggggggattgttttcttttgggggccttccccttttactccttttcttccagagatcaagagcttctcttgcatcttcttccactgggctctggattaatcaattacccaaaggctgcacctgccgtgttgtctgggcttgcatcccagatgtgttggagtatgcatggatgtagtgctttttagaggagccactgggcaaggccaccaagaacaaatgcatgacattttatagccaaggacgcctcgctaaagtcttatgggcgtcccctggggttgggggggcacaaggttttggaggaagaagacaacttccctcattccatcatcaccatctctttctcactaggttctttctagttttcaagcaatagttctagcctgccttggacaagggggccccagttaaacaaactacccatccatgagctgccaggcagtcaaaaacagaagcttccccgacttgtgagtccctgagatgtgctcttgttgtttggcatttggggtgacagggagtgacccagaggccaccactgcttttcatgcaggagttacagacactggtttcttggaaaatggagagaagcgcactttgcacagacgtcgtcaattaagtcccaatttgccacttggtattgagtacactggaccctgaccactggctcttgggcaaacgtccttcctcacggggcgcctccgccaagccggcccagctgcacccctcccttcctggagggatggccagggaaggagaaaacagagaactgacacctttgaaaccacagaatgtgttacatgcagactcgctcaagggcataagttattgtgaacgtttttgccaatcactgctcaacagccctgctagattttgtatgatgctgaattattatgcagactaattccacccagttgagacacaccatgcttgttcacttgtatttattgaaactgtggattcttgcccgtgctgtcccttgtatttactttaagcactgatcacttatcattcattcggtatggttttccctgtcccttgtacacattctggtatgaatttgtaaaaataacctgctacaaattggttgaatgtttctgtctgtggtgcgaaccagcattaacggatggggcacgtgcccaactgaggaacaggagaagaaatcaccaatttgggctctcagagctaagacacacttattgattctgttgcacattttgcactggtttatggcgattgttttcttggacggatagtgtaaaataaacttctctgttctctawmaaaaaaaaaaaaaa

SEQ ID NO: 576 - DNA, 600 bp, Homo sapiens
gggaagaggttctttgagacacagtaccctgggaggcataggagaagggtcgggccagcccagcccagggcctgagttagactatttcccacatgttctctgccttcagtggggagggggtgccaccagggctgtcggccaggattgccactcctgtttcagaggaagcaggccgagagacttgcaccttggccaagccacacaatcagtggggcagccagagctcagacctgagccattttgtcagtatccaggaccccccggattctccacgccctccccatctcccagtctccctgccccccatgccccagaccggcccaccagggactagccgctgtcgcacagcctctggggtgcttggtctctgcgaagtcaaaggcctgacagctctgtggcctgggaatccattttcctgcggcagagcagggcctggtgtggaaccagggagctgtgggaagccacagcagaaatggaagaaaaacaggtctcagcccagggtcctcgctcactccctcactccccactttgaagccatctctgttctgcaggtgagaggatttaaagtcagtcacaaaggcttgggaacaaaaggaattc

SEQ ID NO: 577 - DNA, 600 bp, Homo sapiens; identical to SEQ ID NO: 576

SEQ ID NO: 578 - DNA, 1400 bp, Homo sapiens
ccgaccactggagccagaacctgtcgcggttctttccggaggccattgagttcattgatgaggccttgtcccagaactgcggggtgctcgtccactgcttggcgggggtcagccgttctgtcaccgtcactgtggcctacctcatgcagaagctccacctctctctcaacgatgcctatgacctggtcaagaggaagaagtctaacatctcccccaacttcaacttcatggggcagttgctggactttgagcgcagcttgcggctggaggagcgccactcgcaggagcagggcagtggggggcaggcatctgcggcctccaacccgccctccttcttcaccacccccaccagtgatggcgccttcgagctggcccccacctagggccccgtggccggcaggccggcccctgccccacccccacccacgggtgtccctgcccactcgtgtggcaagggaggggagggcaggagggctcggcctgagcagggtgctggggggagagcgcaatacctcacgcgggctgccgtcctaatcaacgtgcctatggcgggaccacgctcggagcctgcctcttctgcgactgttactttttctttgcgggatgggggtgggggttccctctccaggtggttgtccaggcccatgtcccggccctgggtgctcagccagctcggctaggccctgcgcctccctgcgcttcccccttcaggaagggtgtgtgccacctcgttgcactggatcccagtggctgcttgggggagaggcgtttgccatcactggtgttgtcacctccctgtttctccaccaagggcttgggcctctcggggctggggcctcccaggggatggggacccagaggtgcagtggccgcccacatccatggcctaggagctactgggcaggttcccggccacacatctggtgggctgttttgttttttttttttcctcttcccccagatgtcttgacgggatcactggggctctttgtgagtgagggtggccaaactaccgccggaggagatggggtctcagagcgagagctgcggagggggaggggaagaagaaggcctcacttttgctgctgcggggcccacacagccgctgctactttggggggtggggaaggggccaagctgcagacacacacagtcattcatttctgtccacacccctgtgggtggcgggtgtgcgtgtgtgtgcttgtgtgtgcgcacgtgtcggcgctcacacacacatgctagcccactgatgcacccagcccagggctggcagtctttgcagcgtggggccgtctcaccctggagcctggagaggatctatgcttgtttgtttttgtaatccatatcatagttgctttctttaattgttccttctgaataaacagtttatttaagat

SEQ ID NO: 579 - DNA, 1400 bp, Homo sapiens
tgacatcaaggatgagaacatcctgatagacctacgccgtggctgtgccaaactcattgattttggttctggtgccctgcttcatgatgaaccctacactgactttgatgggacaagggtgtacagccccccagagtggatctctcgacaccagtaccatgcactcccggccactgtctggtcactgggcatcctcctctatgacatggtgtgtggggacattccctttgagagggaccaggagattctggaagctgagctccacttcccagcccatgtctccccagactgctgtgccctaatccgccggtgcctggcccccaaaccttcttcccgaccctcactggaagagatcctgctggacccctggatgcaaacaccagccgaggatgtacccctcaacccctccaaaggaggccctgcccctttggcctggtccttgctaccctaagcctggcctggcctggcctggcccccaatggtcagaagagccatcccatggccatgtcacagggatagatggacatttgttgacttggttttacaggtcattaccagtcattaaagtccagtattactaaggtaagggattgaggatcaggggttagaagacataaaccaagtctgcccagttcccttcccaatcctacaaaggagccttcctcccagaacctgtggtccctgattctggagggggaacttcttgcttctcattttgctaaggaagtttattttggtgaagttgttcccattctgagccccgggactcttattctgatgatgtgtcaccccacattggcacctcctactaccaccacacaaacttagttcatatgctcttacttgggcaagggtgctttccttccaataccccagtagcttttattttagtaaagggaccctttcccctagcctagggtcccatattgggtcaagctgcttacctgcctcagcccaggattctttattctgggggaggtaatgccctgttgttaccccaaggcttcttttttttttttttttttttgggtgaggggaccctactctgttatcccaagtgctcttattctggtgagaagaaccttacttccataatttgggaaggaatggaagatggacaccaccggacaccaccagacactaggatgggatggatggttttttgggggatgggctaggggaaataaggcttgctgtttgttctcctggggcgctccctccaacttttgcagattcttgcaacctcctcctgagccgggattgtccaattactaaaatgtaaataatcacgtattgtggggaggggagttccaagtgtgccctcctctcttctcctgcctggattatttaaaaagccatgtgtggaaacccactatttaataaaagtaatagaatcagaa

SEQ ID NO: 580 - DNA, 1400 bp, Homo sapiens; identical to SEQ ID NO: 579

SEQ ID NO: 581 - DNA, 1400 bp, Homo sapiens
tgctcatcagctcttcaaaggattcagctttgttgcaacttctattgcagaagaatataaaatcactcctatcacaagtgcaaatgtattaccaattgttcagataaatggaaatgctgcacaatttggtgaagtatatgaattgaaggaggatattggtgttggctcctactctgtttgcaagcgatgcatacatgcaactaccaacatggaatttgcagtgaagatcattgacaaaagtaagcgagacccttcagaagagattgaaatattgatgcgctatggacaacatcccaacattattactttgaaggatgtctttgatgatggtagatatgtttaccttgttacggatttaatgaaaggaggagagttacttgaccgtattctcaaacaaaaatgtttctcggaacgggaggctagtgatatactatatgtaataagtaagacagttgactatcttcattgtcaaggagttgttcatcgtgatcttaaacctagtaatattttatacatggatgaatcagccagtgcagattcaatcaggatatgtgattttgggtttgcaaaacaacttcgaggagaaaatggacttctcttaactccatgctacactgcaaactttgttgcacctgaggttcttatgcaacagggatatgatgctgcttgtgatatctggagtttaggagtccttttttacacaatgttggctggctacactccatttgctaatggccccaatgatactcctgaagagatactgctgcgtataggcaatggaaaattctctttgagtggtggaaactgggacaatatttcagacggagcaaaggatttgctttcccatatgcttcatatggacccacatcagcggtatactgctgaacaaatattaaagcactcatggataactcacagagaccagttgccaaatgatcagccaaagagaaatgatgtgtcacatgttgttaagggagcaatggttgcaacatactctgccctgactcacaagacctttcaaccagtcctagagcctgtagctgcttcaagcttagcccagcgacggagcatgaaaaagcgaacatcaactggcctgtaagatttgtggtgttcctaggccaaactggatgaagatgaaattaaatgtgtggcttttttcctattcttatcaaaggcatcgttgtctgctaaattacttgaatattaagtaatattaaatccccatttttaggggaagtgagatttaaaaaaccattcacaggtccacaatattcatactatgtgtttgcagtagtgttcaagtgtttatttaagcatataattggtgtccaccaggtcctcacaacttctctgcacacaagcttctaaaattcctttcaaataaagttactttaatattt

SEQ ID NO: 582 - DNA, 600 bp, Homo sapiens
gtaaattaagtgggggcaaggcagtagtggacagggttggaaactgcactggaaaatagggaacatgtgtatgtcataaggaaggcaatgcagcccatccctacctggaatgctgggaagtgctaggcagggctgctctcagcaagactgcagcagctgcacccagacctggggctctggtaggtactaatggtgattatgctccaatttacctaatgaatttggtgggacagcagaaaagaaagcctgggaatgtaccaagagaaatttttgttcagggctgttggaagtagctgttagccttgcttccacaaggccattgctgctgtaataagaactgcaaatcagagtgctacaacataaaactgggaaatatggccctatctgaatgcctctgtcctattttccgctggtgtatcagttagtgcaggaagtaaagaatgctggaaagttgaatcagaaattgaaaaccttctaaaatcttacacagattagcagaagtcacttctcccagtctggtatattatttcataatggaccaggatcggcttcctgcctcttggtggctatctgtaaaccataagtacaggggtctcccta

SEQ ID NO: 583 - DNA, 600 bp, Homo sapiens; identical to SEQ ID NO: 582

SEQ ID NO: 584 - DNA, 1400 bp, Homo sapiens
ttatgtgcttacctaacttgaacattagagggaaagactgaaagagaaagataggaggaaccacaatgtttcttcatttctctgcatgggttggtcaggagaatgaaacagctagagaaggaccagaaaatgtaaggcaatgctgcctactatcaaactagctgtcactttttttctttttctttttctttctttgtttctttcttcctcttctttttttttttttttttaaagcagatggttgaaacacccatgctatctgttcctatctgcaggaactgatgtgtgcatatttagcatccctggaaatcataataaagtttccattagaacaaaagaataacattttctataacatatgatrgtgtctgaaattgagaatccagtttctttccccagcagtttctgtcctagcaagtaagaatsgccaactcaactttcataatttaaaaatctccattaaagttataactagtaattatgttttcaacactttttggtttttttcattttgttttgctctgaccgattcctttatatttgctcccctatttttggctttaatttctaattgcaaagatgtttacatcaaagcttcttcacagaatttaagcaagaaatattttaatatagtgaaatggccactactttaagtatacaatctttaaaataagaaagggaggctaatatttttcatgctatcaaattatcttcaccctcatcctttacatttttcaacatttttttttctccataaatgacactacttgataggccgttggttgtctgaagagtagaagggaaactaagagacagttctctgtggttcaggaaaactactgatactttcaggggtggcccaatgagggaatccattgaactggaagaaacacactggattgggtatgtctacctggcagatactcagaaatgtagtttgcacttaagctgtaattttatttgttctttttctgaactccattttggattttgaatcaagcaatatggaagcaaccagcaaattaactaatttaagtacatttttaaaaaaagagctaagataaagactgtggaaatgccaaaccaagcaaattaggaaccttgcaacggtatccagggactatgatgagaggccagcacattatcttcatatgtcacctttgctacgcaaggaaatttgttcagttcgtatacttcgtaagaaggaatgcgagtaaggattggcttgaattccatggaatttctagtatgagactatttatatgaagtagaaggtaactctttgcacataaattggtataataaaaagaaaaacacaaacattcaaagcttagggataggtccttgggtcaaaagttgtaaataaatgtgaaacatcttctcaaaaaaaaaaaaaaaaa

SEQ ID NO: 585 - DNA, 1400 bp, Homo sapiens
accagcagaccccgcccaccccgacgccgcggccgccgctgccagtcaagagcccggcggtgctgcacctccagcactccaagggccgcgactaccgcgacaacaccgagctcccgcatcacggcaagcaccggccggaggaggggccaccagggcctctaggcaggactgccatgcagtgaagccctcagtgagctgccactgagtcgggagcccagaggaacggcgtgaagccactggaccctctcccgggacctcctgctggctcctcctgcccagcttcctatgcaaggctttgtgttttcaggaaagggcctagcttctgtgtggcccacagagttcactgcctgtgagrcttagcaccaagtgctgaggctggaagaaaaacgcacaccagacgggcaacaaacagtctgggtccccagctcgctcttggtacttgggaccccagtgcctcgttgagggcgccattctgaagaaaggaactgcagcgccgatttgagggtggagatatagataataataatattaataataataatggccacatggatcgaacactcatgatgtgccaartgctgtgctaagtgctttacgaacattcgtcatatcaggatgacctcgagagctgaggctctagccacctaaaaccacgtgcccaaacccaccagtttaaaacggtgtgtgttcggaggggtgaaagcattaagaagcccagtgccctcctggagtgagacaagggctcggccttaaggagctgaagagtctgggtagcttgtttagggtacaagaagcctgttctgtccagcttcagtgacacaagctgctttagctaaagtcccgcgggttccggcatggctaggctgagagcagggatctacctggcttctcagttctttggttggaaggagcaggaaatcagctcctattctccagtggagagatctggcctcagcttgggctagagatgccaaggcctgtgccaggttccctgtgccctcctcgaggtgggcagccatcaccagccacagttaagccaagccccccaacatgtattccatcgtgctggtagaagagtctttgctgttgctcccgaaagccgtgctctccakcctggctgccagggagggtgggcctcttggttccaggctcttgaaatagtgcagccttttcttcctatctctgtggctttcarctctgcttccttggttattargagaatagatgggtgatgtctttccttatgttgctttttcaacatagcagaattaatgtwgggagctaaatccastggtgtgtgtgaatgcagaagggaatgcaccccacmttcccatgawkgaagtctgcgtaccaataaattgtgcctttcyymmwmaaaammmaaaaaaaaataaaaaaaa

SEQ ID NO: 586 - DNA, 1400 bp, Homo sapiens
aactacaactcctcaaattccaataaaaatggaaaactttaataatttctatatacttacatctaaagagctagggagaggwaaatttgctgtggttagacaatgtatatcaaaatctactggccaagaatatgctgcaaaatttctaaaaaagagaagaagaggacaggattgtcgrgcagaaattttacacgagattgctgtgcttgaattggcaaagtcttgtccccgtgttattaatcttcatgaggtctatgaaaatacaagtgaaatcattttgatattggaatatgctgcaggtggagaaattttcagcctgtgtttacctgagttggctgaaatggtttctgaaaatgatgttatcagactcattaaacaaatacttgaaggagtttattatctacatcagaataacattgtacaccttgatttaaagccacagaatatattactgagcagcatataccctctcggggacattaaaatagtagattttggaatgtctcgaaaaatagggcatgcgtgtgaacttcgggaaatcatgggaacaccagaatatttagywmcakamatyytgaastatsatcccatyaccwyagywwcagatatswggaatattggtataatagcatatatgttgttaactcacacatcaccatttgtgggagaagataatcaagaaacatacctcaatatytctcaagttaatgtagattattcggaagraactttttcatcagtttcacagctggccacagactttattcagagccttttagtaaaaaatccagagraaagrccmacagcagagatatgcctttctcattcttggctacagcagtgggactttgaaaacttgtttcaccctgaagaaacttccagttcctctcaaactcaggatcattctgtaaggtcctctgaagacaagacttctaaatcctcctgtaatggaacctgtggtgatagagaagacaaagagaatatcccagaggatagcagcatggtttccaaaagatttcgtttcgatgactcattacccaatccccatgaacttgtttcagatttgctctgttagcacttttttctttgactcatttggactgaatttgaaattttatatccactccagtgagattatgatttgtagcttcatatatgacatgtttatattgtaaatgcacttttccatggaataatttagggaagtgttttaatgttaaattactagttgctagcatgttatgatttcatatcctgagatagctctgcagataagaaaatatttaaatatatgacaaaaagtaaaattgtacatgtgarwkwamawrwwaawraaawaawwmaamwwmaaawraacttaccagaatgttttgcatatcaacaaaaaaaaaaaaaaaaaa

SEQ ID NO: 587 - DNA, 1400 bp, Homo sapiens; identical to SEQ ID NO: 586

SEQ ID NO: 588 - DNA, 600 bp, Homo sapiens
ggtcactgcaagctggctgacttcgggatgtgcaaggaagggattctgaatggtgtgacgaccaccacgttctgtgggactcctgactacatagctcctgagatcctgcaggagttggagtatggcccctccgtggactggtgggccctgggggtgctgatgtacgagatgatggctggacagcctccctttgaggccgacaatgaggacgacctatttgagtccatcctccatgacgacgtgctgtacccagtctggctcagcaaggaggctgtcagcatcttgaaagctttcatgacgaagaatccccacaagcgcctgggctgtgtggcatcgcagaatggcgaggacgccatcaagcagcacccattcttcaaagagattgactgggtgctcctggagcagaagaagatcaagccacccttcaaaccacgcattaaaaccaaaagagacgtcaataattttgaccaagactttacccgggaagagccggtactcacccttgtggacgaagcaattgtaaagcagatcaaccaggaggaattcaaaggtttctcctactttggtgaagacctgatgccctgagagcccactgcagtt

SEQ ID NO: 589 - DNA, 1400 bp, Homo sapiens
gttttgttttgttttgttttgttcttcttggtgtgctttttggatgggaccagaacttaacattttcctgaggactaggaagctcatcagacactggaatgcagtgattcttctaatgatggtcaactgcaaggagaaactgtttacatccttcccactacacagttgctatgatatgtaacaagtcacacatgtatatatcacacaagtcttaccaattctgcgtcactaggaagctatagcatggtcgtgaaagctctcctaatacttacttaaatagccatggaagaaaattatgcttgtcccttctgactgggttaagccatctttcttaagattcctgaagtagaaatagcaattaagaaattaattcaagttttgacggttaacatttagcagaaaaacaaaccattgaataagctactaggtgaaatgcaaaacaaccatcaatttttttaaactcaataattttgtgaaaaaaaaaaccaccaccaaacttttggttgtaaaagagaacccttgttcccttcctaagaaactgccttccacaattaaagaatactcatagaaagaaaataatcataaatcatatttgattaacatttcatttaagcttttaaaatatcaattttttaaatagctcccatttacccaaaataactagttatgggtctatttcttccatgattagaggagagagaacttgattcaagatactgaaaaatagagctgggactgagcctgtgaatgacaggaatgatctattaccaggtgactagtcggaaactacacagacgtgcactggtctgcatttgggggctaaagtgtatatattccatttaaaatggaatttgtttgtatttggggcagtcttcagtaaagcctttctcctttcttttctccattgaggacagttctgctcagcaaaattgttgagtacctgttctgggcaggtcccacgctatatgcacaaagttaagaaaaacttggtcttagcccttgggagctgacagcccatgggcattaaggcaaagtagttccagtgatttaaaatacggttccaaatacgctaaaaccaacttgtgccaaccagatttacagattggaaatactgcagatgatgtgaagttatcagttggaggagctgtgattaagctggataataagagaacgtgccatctgtaaagcactcagaaggcagccatccctagatgttggtttcatgtatattacactatctactactatccataaatgcaataatatgcatgttaacaacattaaaaacagcaaacagcaatctaagtacagaaaagctttttgtgtgtttaaaaaaattgaagaaaattcaggaagaaacgtgttaataaacattgtactgttcttttgcttctcaaagg

SEQ ID NO: 590 - DNA, 600 bp, Homo sapiens
aaattccctcaaattaaggcacatccttggactaaggtcttccgaccccgaactccaccggaggcaattgcactgtgtagccgtctgctggagtatacaccaactgcccgactaacaccactggaagcttgtgcacattcattttttgatgaattacgggacccaaatgtcaaacwwccaaatgggcgagacacacctgcactcttcaacttcaccactcaagaactgtcaagtaatccacctctggctaccatccttattcctcctcatgctcggattcaagcagctgcttcaacccccacaaatgccacagcagcgtcagatgctaatactggagaccgtggacagaccaataatgctgcttctgcatcagcttccaactccacctgaacagtcccgassagccagctgcacaggaaaaaccaccagttacttgagtgtcactcagcaacactggtcacgtttggaaagaatattaaaaagagaaaaaaatcctgttcattttagtgttcaatttttttattattattgttgttcttatttaaccttgtaaaatatctataaatacaaaccaatttcattgtattctcactttgaggg

SEQ ID NO: 591 - DNA, 600 bp, Homo sapiens; identical to SEQ ID NO: 590

SEQ ID NO: 592 - DNA, 1400 bp, Homo sapiens
gtgtaagttaacacactggagtgtgctccagtttgcagggtagcccagtgcaaggttcagatccatgtagctaagtattatcctgcttccagacctatgtcaccagtaccaatcagtcagtgtcatcacatttcaggccccaagcaatctctgtgcaaagcatcagaaagacctgcttcccagcccccagcattccagtgctctccaggcttcctctctttgtgattgtgctgtccagagtgtccagcttgttctttctttctcttcagtcctctgagtacatctggtggtgtgcattagatgtgagggctatgttgacatggcatcacctccaaagacctgacctgcctaaagactgatgacaggccatccttcctgctgttctaggtactggcctgggtgacagagcaggacatgagacatagatacagtggggaggagaagtggggaaaggtggagcagagagttcttacttattgaagattatacagccctttcggttatgaagtccctgcttgaaggcaatggacctggggaagagactatcacaaaaagtctccattttcattttacatcctctctattggaggcagcacttttccctcatgctgtcctataggactccactttgaaggttgtgcctacgttgcagggaactaggaacatggaggggaaccaacaacagcatcttagaagaaatgtagccaaattggagtccattcttctttagggcagtatatgaaatcctagcagatgtaaaatggaaaagaatcctaatgcttcttccttcagaaagtagaggaactaggggcccaattagcatcatctaggggaatctctattactctgtacttatactaatgtttacaagaatgcaatatactgtgatgccttcctactcaagcctcctagcattcaaacttccatcctattagtcattaacrtggttaaacttcaattcacaatcaccttggaatcaatgtcagtttgatttattttgttacagagcaataaaatcattagaacaatggtttttaaaagacttaagtggatgcatcctatgcatgtaagcattatttcccaaaccaaagcatcattcatctccatttatttcttttgttcccgctcagtgtgaagttgggaactgagaggggatggctgctggtttcacagaagtttggatgccttactcttatcttaaagccagcatccagaatttcctccctctctgatgccacatgcaaaaccaggtgtacgatgtcaagatggattctttgagagccagggtagatcatatgactgcctttctgtaaaattggatgcctagtacaaatgctctttgcctctaattcagtattccatttaataaaaacaatacagtggctggaaaggagcatcag

SEQ ID NO: 593 - DNA, 1400 bp, Homo sapiens
ggaatgagttgggagagaaaggccctcagcttttagagacacaaaaatccatgaagtctcttcctttctgggctttgttagtcagagcaggggatcagaggagactgaagcagaaaccctgcacacgggcccaggatgtggctgattttgtggttccggggagtatgtgatgataatcacccccagcagattccattacctcagcagctcttgttcccccgccactggcagttctgcaatgccatagcattttccagagctaagatctctgggttgtatttgctgacagcctgcaagcttgcatgctctgaaagatttttttagtttttaatttttttgtaaaaatggggtctcgctttgttggcgcaatcctcccacctcagactcccaaagtgctggaattacattgggaaccactgtgcctggcctggaaaacttccaacttgtgttctcagtgcagttctgactcacctctctgggcctcaggttctacaaatgccagacacctagcgaagagctctgcaggctttccactgcctgtattggaaatcttgcaattcacataattattcagtcactgcctggtacctttatcttcccatcccattaatgttagtgttttttaatggagcttttattctgagaatatgtgttcgtctgtttgtttgttttttgagacagagtctcactttgtcacccaggctggagtgcagtggcacgatctcagctcactgcaagctgtgcctctcaggtttcaagtgattctcctgcctcagcctcctgagtagatgggactgtaggcacctgccactatgcctggctaatttttgtgtttttagtagagacagggtttcaccatattggccaggctggtctcgaactactgacctcgtgatctgcccgccttggcctatcaaagtgttgggattacaggcttgagccaccgcacccggccgagaatatgtgttgttatttatgactggattatgaagaatcaggagaatgcatttcatgtctgattctgctgctaattaagtcaatcatttaatttttgggacctcagtttctttgtaagtaaaataacacctgcttgttcttcatccctgggctgttgggaggaacagatgagacagtggctatagaagcacttggaaaatgcacttgtcctgttttgtaaaataaaaaggtattaaatgtgtatttctgccatgtacctaatgattattcagtgcgtatatatctgaaaagtcatgttgcaaatctttctgtgaaacagatgctattttaaattcactgggagaaatatcctatttaaagtaatctatagtaatttctttttatataataaaaatatatttgtaaagtcgaaaaaaaaaaaaaaaaaaaaaaaaaaaaaaaaa

SEQ ID NO: 594 - DNA, 1400 bp, Homo sapiens; identical to SEQ ID NO: 593

SEQ ID NO: 595 - DNA, 415 bp, Homo sapiens
tgattctcttaggataacagcagtatcggccttgtgtagaatcactcgccattctcctactgccttccagaatgttattgaaaaggtgggactgaactcagtaataaactccctggcctctgccatctgcaaagttcagcagtacatgttgaccttattcgctgccatgttgtcctgtgggattcatcttcaaagactaatccaagaaaaggtttgacttagattttacctgttactctacattaaaaattgttttcttctgcattttagtggttccacaagtaatgtcatgtttgtagaattcattttttatcccaagaggcctttttgaactttgccaaacctttgtaccacagaatgttcatctgaacatgttccaagagccttttagtgattaaaatagaaattctttaaa

SEQ ID NO: 596 - DNA, 415 bp, Homo sapiens; identical to SEQ ID NO: 595

SEQ ID NO: 597 - DNA, 1400 bp, Homo sapiens
cttctccgatagtgaagatgaatcctgtgtgccactgctgcggaaagagtccatccagctaagggacctggactctgcgctcttggctgaggtcaaggatgtgctgattccccatgagcgggtggtcacccacagtgaccgagtcattggcaaaggccactttggagttgtctaccacggagaatacatagaccaggcccagaatcgaatccaatgtgccatcaagtcactaagtcgcatcacagagatgcagcaggtggaggccttcctgcgagaggggctgctcatgcgtggcctgaaccacccgaatgtgctggctctcattggtatcatgttgccacctgagggcctgccccatgtgctgctgccctatatgtgccacggtgacctgctccagttcatccgctcacctcagcggaaccccaccgtgaaggacctcatcagctttggcctgcaggtagcccgcggcatggagtacctggcagagcagaagtttgtgcacagggacctggctgcgcggaactgcatgctggacgagtcattcacagtcaaggtggctgactttggtttggcccgcgacatcctggacagggagtactatagtgttcaacagcatcgccacgctcgcctacctgtgaagtggatggcgctggagagcctgcagacctatagatttaccaccaagtctgatgtgtggtcatttggtgtgctgctgtgggaactgctgacacggggtgccccaccataccgccacattgacccttttgaccttacccacttcctggcccagggtcggcgcctgccccagcctgagtattgccctgattctctgtaccaagtgatgcagcaatgctgggaggcagacccagcagtgcgacccaccttcrgagtactagtgggggaggtggagcagatagtgtctgcactgcttggggaccattatgtgcagctgccagcaacctacatgaacttgggccccagcacctcgcatgagatgaatgtgcgtccagaacagccgcagttctcacccatgccagggaatgtacgccggccccggccactctcagagcctcctcggcccacttgacttagttcttgggctggacctgcttagctgccttgagctaaccccaaggctgcctctgggccatgccaggccagagggcagtggccctccaccttgttcctgccctttaactttcagaggcaataggtaaatggggcccattaggtccctcactccacagagtgagccagtgagggcagtcctgcaacatgtatttatggagtgcctgctgtggaccctgtcttctgggcacagtggactcagcagtgaccacaccaacactgacccttgaaccaataaaggaacaaatgactattaaagcacaaaaaaaaaa

SEQ ID NO: 598 - DNA, 600 bp, Homo sapiens
gttcaatctcagccacctcgtgtgcgtgaacaacgacctagagaacgacctggttttcctcctagaggaccaagaccaggcagaggagatatggaacagaatgactctgacaaccgtagaataattcgctatccagatagtcatcaactttttgttggtaacttgccacatgatattgatgaaaatgagctaaaggaattcttcatgagttttggaaacgttgtggaacttcgcatcaataccaagggtgttgggggaaagcttccaaattttggttttgtggtttttgatgactctgaaccagttcagagaatcttaattgcaaaaccgattatgtttcgaggggaagtacgtttaaatgtggaagagaaaaaaacaagagctgcaagagagcgagaaaccagaggtggtggtgatgatcgcagggatattaggcgcaatgatcgaggtcccggtggtccacgtggaattgtgggtggtggaatgatgcgtgatcgtgatggaagaggacctcctccaaggggtggcatggcacagaaacttggctctggaagaggaaccgggcaaatggagggccgcttcacaggacagcgtcgctga

SEQ ID NO: 599 - DNA, 600 bp, Homo sapiens; identical to SEQ ID NO: 598

SEQ ID NO: 600 - DNA, 600 bp, Homo sapiens
caagggtgtgtacgtgcgggtggggctgcagaagatcagtcactctcggagcctgcacaagcagatccggctgcaggtggagcggcaggaggtggagctgcccagtattgaaggcctcatcttcatcaacatccccagctggggctcgggggccgacctgtggggctccgacagcgacaccaggtttgagaagccacgcatggacgacgggctgctggaggttgtgggcgtgacgggcgtcgtgcacatgggccaggtccagggtgggctgcgctccggaatccggattgcccagggttcctacttccgagtcacgctcctcaaggccaccccggtgcaggtggacggggagccctgggtccaggccccggggcacatgatcatctcagctgctggccctaaggtgcacatgctgaggaaggccaagcagaagccgaggagggccgggaccaccagggatgcccgggcggatgctgcgcctgcccctgagagcgatcctaggtaggggtggctggggcagcccaagggctcgagccatctctgctcccgccagccttgttttcaggtggtctggaggcagctccacgtccacacagtggc

SEQ ID NO: 601 - DNA, 600 bp, Homo sapiens
tttcagcctgcttcttccccagggttctgtattgcagctaagctcaaatgtatatttaacttctagttgctcttgctttggtcttcttccaatgatgcttactacagaaagcaaatcagacacaattagagaagccttttccataaagtgtaattttaatggctgcaaaaccggcaacctgtaactgcccttttaaatggcatgacaaggtgtgcagtggccccatccagcatgtgtgtgtctctatcttgcatctacctgctccttggcctagtcagatggatgtagatacagatccgcatgtgtctgtattcatacagcactacttacttagagatgctactstcagtgtcctcagggctctaccaagacataatgcactggggtaccacatggtccatttcatgtgatctattactctgacataaacccatctgtaatatattgccagtatataagctgtttagtttgttaattgattaaactgtatgtcttataagaaaacatgtaaagggggaatatatkgggggagtgagctctctcagacccttgaagatgtagcttccaaatttgaatggattaaatggcacctgtatacca

SEQ ID NO: 602 - DNA, 600 bp, Homo sapiens; identical to SEQ ID NO: 601

SEQ ID NO: 603 - DNA, 600 bp, Homo sapiens
ttctttatatacttcaaatttagaacttaactttaaaagtttttcttctgtaattgttgaacgggtgattattattaactctagataagcaggtactagaaaccmaaactcagaaaatgtttactgttagaattctattaaattttaagtgttgtattctttttcattgggtgatgtcagggtgataaccagacattcatggaaaggcatgcagtttgtccattgtgacagtttgtttaataaaaccacatacacmctttawwwaarawwaaaawmwaamwrraaagtcagcttggaaaatggacatttccaagtatgtttggtgagtcacagatataaaaatagaaattctgatgagaggtttcagtttttaataccaagtccttaggagtcttaacattggccagcatctgtttatcaaatgacataaatacgtaaacctataagaattaagtttattaattaggcaatttatgtctgtgataattcttacgggagaaagaggatttgattggaaagcagtttgggaagaaagtgctgctgaaatttccagaatttaattgatkggttacataaactttttgacttcaawaaaaaaaa

SEQ ID NO: 604 - DNA, 600 bp, Homo sapiens
ttttcaaattgttttgtttctgtgtccctaccagacacaaagatgaagtgtgccagctggttcccccaagccagctcatgctgctgaccactgactcagctctgaccttcacatttgctctgaagcaagtgcgttcagctgctggggcagtgatatcacatagtacatatattatttccttagtttatttccaaactggtattttaaatagacacttcgaactttgggctactctgtttaaatctgccactttctggactggaccttagtactgtaaattctttttaaagaataataatgttaccaactgctgagatttttatgtattttgtgactttgtaacaactgctattgtaataagtgtcatcttgtgggcattatacaaaggcatattataaaataataatgatatttttgtatagaagagtcaactgttcagatgtaagatgttgaaaaatgttaaaatctaaagagtaatttatcctagtggtaatggttatatgtatttgtacagtttaaattaatgtctcaaagctgtgcagtcttttgttactgggacacttttaaactctgaataggcattaaaaaaaatatggctaa

SEQ ID NO: 605 - DNA, 600 bp, Homo sapiens; identical to SEQ ID NO: 604

SEQ ID NO: 606 - DNA, 600 bp, Homo sapiens
tttgttgaatgataatagaaagcaccctaattgacttggaaaaaaaaaacagcaaaagcaaaagtagcaacatatgtcaacatatgtcactgaaataggaaacagtcattggaatgttgcacagaggctaatarctatrgactgttggatacaggatacagtggtgagaggagccccattttaggtctttcttttaggtttttggttttcattactccaagtaryccttgacccaagaacaaaggcttgttgtatgagttccactgccagatttatgggatgcctggatcattcagaaggatgcttcaactattatttgtcaggtccaaaggtcgtacttgataaccccattttctatgtatggggtagtctaatatattattttatctactttatttttcccttttcagaaagtccttagtgcaaaccaccattggaatctagycagaaatgtctgtcagatagttagaattgtaacatctaaacctgccacggatcgaatggtacttacaggtacctctcttagggactctgtgatccctaaaatatcagaagaaaatgtctgtctttctgtccaaatatctacttgacttgggggta

SEQ ID NO: 607 - DNA, 600 bp, Homo sapiens; identical to SEQ ID NO: 606

SEQ ID NO: 608 - DNA, 1400 bp, Homo sapiens
agacagtcwgaamwmgagaaaatggagcaaaaggccatttccaaacgatttaaatttgaggaacctttgctacaagaaattccaggagaatttatctactgagcaatatttccctttagaacttcaagatttctacaytgaaaatgttaatattatttatggacctctggccaaatggtacatgtactggaagtggataaccagtatcacttacacaaacaaaaataactttgtcaaatttgtggagttaggtggaagccagattttaaaagttgccaaccaggakatttaacaggtacagttacccgtttcaatgttatttttaagaagggagatgttggcacctttgaattctacatcctgtttctccagaatgagaatttgtgtacaaagatatttgtattcactttctttaaaaaatccaagtaaaagtgccaaaactacahwwmwrwaaawmwmwwrmattattcatatgtgtatctatatctgcataatgtttgttaatgtctactaaaattgctactttttcactttggatttgtttttggcaaaattttagtctaaacagacatctaaattttcgagacttagaataacattcactaaagtttgataatgtcttttttaaatattttcttactgctttatagtgacttgatttggtttctgttgtgtttttgcctaaatactagtaacatatcagtgaaaaaccctaattttttttctcttcaatgtcactagtaagagaggtggtaatttttcacctctgaaattattctgggtttaggtgtcagctyttgagctgcttccctcatcacaccacactcacatgcatctgttctctctcacactctatacccctgccacttcctggcacctccccccatgcttgtcatttaattttggccacttgtaggtatcagtgtgatctgatcaacactctggttaccttggtcagtgaaaagatgctactatattgcttttgtcccaaagtgagtaaaatcccctagagcagagagagagagagagagagagtgtcttcatgccaaccacagcctgtttctgctgagtttcttatcagccctcaagctatgctaggaaaagttataaaatgccaaaatatttataaacatttactttgtccataaaaaatttacattggatactctgtaagtaggaggtactttgtcccaaaaagatgtataagaatgtactaatagttttatttgattaggattgaacagttcagttgtatctatgccccacagtgaccagtaaagtccaattaaaatatggaaatgtaaaagtgtatgccgaataccttaaagtaactaattatccttacacacaaaaggctcagtgcattaaatatttgcctatcaaaaaaaaaaaaaaaaaaa

SEQ ID NO: 609 - DNA, 1400 bp, Homo sapiens; identical to SEQ ID NO: 608

SEQ ID NO: 610 - DNA, 1400 bp, Homo sapiens
ttttgctgaaggcatcctctgtgttcaaaatcaacctggatggcaatggccaggaggcctatgcctcgagctgcaacagcggcacctcttacaattccattagctctgttgtatcccggtgagggcagcctctggcttggrcagggtctgtttggactgcagaascaagggggtgatgtagcccatccttccctttggagatgctgagggtgtttcttcctgcacccacagccagggggatgccactcctccctccggcttgacctgtttctctgccgctacctccctccccgtctcattccgttgtctgtggatggtcattgcagtttaagagcagaacagatcttttactttggccgcttgaaaagctagtgtacctcctctcagtgttttggactccatctctcatcctccagtaccttgcttcttactgataattttgctggaattcctaacttttcaatgacattttttttaactayyatattgattgtcctttaaaaaagaaaagtgcatatttatccaaaatgtgtatttcttatacgcttttctktgttataccatttcctcagcttatctcttttatatttgtaggagaaactcccatgtatggaatcccactgtatgatttataaacagacaatatgtgagtgccttttgcagaagagggtgtgtttgaaatcatcggagtcagccaggagctgtcaccaaggaaacgctacctctctgtcccttgctgtatgctgatcatcgccagaggtgcttcaccctgagttttgttttgtattgttttctgacagtttttctgttttgtttggcaaggaaaggggagaagggaatcctcctccagggtgattttatgatcagtgttgttgctctaggaagacatttttccgtttgcttttgttccaatgtcaatgtgaacgtccacatgaaacctacacactgtcatgcttcatcattccctctcatctcaggtagaaggttgacacagttgtagggttacagagacctatgtaagaattcagaagacccctgactcatcatttgtggcagtcccttataattggtgcatagcagatggtttccacatttagatcctggtttcataacttcyygtacttgaagtctaaaagcagaaaataaaggaagcaagttttcttccatgattttaaattgtgatcgagttttaaattgataggagggaacatgtcctaattcttctgtcctgagaagcatgtaatgttaatgttatatcatatgtatatatatatatgcactatgtatatacatatatattaatactggtatttttacttaatctataaaatgtcgttaaaaagttgtttgtttttttctttttttataaataaactgttgctcgttaaaaaaaaaaaaaa

SEQ ID NO: 611 - DNA, 600 bp, Homo sapiens
ccgtgtgcagcctcagtcacagtgacttgtctatgagggctcaggtctccagccctgggcccccacccctctcctgtgctgagcagctttgcattgccaggcaggtggcagctggcatggcttacctctcagaacgtaagtttgttcaccgagatttagccaccaggaactgcctggtgggcgagaacatggtggtgaaaattgccgactttggcctctccaggaacatctactcagcagactactacaaagctaatgaaaacgacgctatccctatccgttggatgccaccagagtccattttttataaccgctacactacagagtctgatgtgtgggcctatggcgtggtcctctgggagatcttctcctatggcctgcagccctactatgggatggcccatgaggaggtcatttactacgtgcgagatggcaacatcctctcctgccctgagaactgccccgtggagctgtacaatctcatgcgtctatgttggagcaagctgcctgcagacagacccagtttcaccagtattcaccgaattctggaacgcatgtgtgagagggcagagggaactgtgagtgtctaaggttgaagac

SEQ ID NO: 612 - DNA, 600 bp, Homo sapiens; identical to SEQ ID NO: 611

SEQ ID NO: 613 - DNA, 600 bp, Homo sapiens
gaagcatgtggtttggcaattttttcaaaacagatatcaaagttatctgaagaatatttcattctgcagaaaaaattgaatgaaatgattttgtcacagcaactgaagtcactttatctgggtgtctcgcaccataagccaattaatagacgagtttcttctcagcagtgcctctcaggtgtctgtaaaggagaggagccaaaaatattgagacccccaagacgaccccggaaacccaaaacattaaataaccctgaagactccacatactattatctacttcataagtcaatccaagaagaaaaacgaagaccaaggaaagacagtcagggaaaattattagatttggaagatttctattataaggaatttttgcccagtcgttctggaccaaaggaacatagccctagtttaagagaacgaagaccacagcaagaactccagaatcaatgtattaaggctaatgaaaggtgctgggcggcggagagccccgagaaggaggaggagagagagccagcagccaacccctacgacttcaggaggctcctgcgcaaaacctcccagcgccggcgcctcgtccagcagtcctaaccgttcaac

SEQ ID NO: 614 - DNA, 600 bp, Homo sapiens
ttcgagcagcctcagtttggccagccaaaaagactgtgcgtatgtagcaaaaccagaatccctcagctgacactgaagacgagcctggggtggagaggagggagccggcatctgccgagcacctcctgtttgccaggcgctttctatacttaatcccatgtcatgcgaccctaggactttttttaacatgtaatcactgggcygggtgcagtggctcacgcctgtaatcccaacactttgggaggctgaggcaggaggactgtttgagttcaggagttttaagaccagcctgaccaacatggtgaaaccccatctctactaaaatataaaaattagccgggtgtggtggcgagcacctgtaatgtcagctacttgggaggctgaggcaggagaatcrcttgarcccaggaagcggaggttgcaatgagctgagatcacaccactgcactycagcctgggtgacagattgagactccctctcaaaaaaaaaarrraaawmawwraacactcgtggaaccctaggtattgcatattccatttacggtttgggaatccagggctcaagtcctcgcaggggtaccgagctcgagatcgtaatca

SEQ ID NO: 615 - DNA, 600 bp, Homo sapiens
  misc_feature (200)..(200): n is a, c, g, or t
ggaccaggcggcggcagcgacctgcggcggcgggaggcagcgagggctgagccccgggacgcgcggaccggctggcccgaggagccggccccggagacgcagttcaagcgccgcagctgccagatggagttcgaggagggcatggtggaggggcgcgcgcgcggcgaggagctggccgccctgggcaagcaggcactttnctcgggcagcgtgggaggtcatcgaggtgtcctgacccctccgctgtcctcggccccgccgcccgcagccaggcccgttataaatgtatattatatataatgcaaagaaaggtaaatggttttactgggatttttatcgagaagtaaatatttcgattttttatttatttaagctgttcattctggcaatgatttggcaacagtgcgggtggtcctcgagctctatttttactgtctggtatttaaactgaaacatacgtttctaagcaatacgaggccaccttcagtcgcaagctgggtgccaggcctggggcccctcccagttcccccgccccaggaaacactgctgacctttgcaaaggctgccgagctttcgtgcactttttacataacaaaaagg

SEQ ID NO: 616 - DNA, 600 bp, Homo sapiens; identical to SEQ ID NO: 615
  misc_feature (200)..(200): n is a, c, g, or t

SEQ ID NO: 617 - DNA, 600 bp, Homo sapiens
caaaggtaggcagaaaatgggcttgggagccagacactccagggatcagtagttcctacccatagtctttgtgtgcttgctaaatggtgtacatttcttgttaaccacgttattaaaacttgatcagcacataarmwwwmwwmwrttagatcttttggcagcaaacaaccttccccccaaacctctgaattttgtgggtgtgtggtggtgtgtgtctgtgtgtgcatgtacacacacactttgtctagctcactttaaaagattcatcaaatggaattttaaaaataatctgaaaagaaatagatatttcaggccgggcctggtggttcatgcctgtaatcccagcactttgggaggccgaggtgggtggatcacgaggtcgggagttcgagatcagtctggtcaacatggtgaaacgccatctctactaaaaatataaaaattagcctggcgtggtggcgtgtgcctctagtcccagctacccgggaggctgaggcaggagaatttctggaacccaggaggcggaggttgcagtgagccgagatggcaccactgcaatccagcctaggcaacagaatgagactctgtctcagaaaaaaa

SEQ ID NO: 618 - DNA, 600 bp, Homo sapiens; identical to SEQ ID NO: 617

SEQ ID NO: 619 - DNA, 600 bp, Homo sapiens
gyggaaccagaacaaggycccgacaggggtagacgttccacytgkggagatcccacctgccgctaggcacgtggaggaggagcccagagttgggcactggcaaatgtctcctccctcccatgctccttggcttctgaaggctgaagcccctttggctgggccaagaaggatctagtctgcccactacattctcaaacaagaggacttggaggaaaagagctrctatacatcatatgcagaggaagcttctacgcgctagagaggatcaaggggccacactggaccatgtgaacagccatcckgaactgccatcagctaccacactggactctgcagggcagccatcctggatgatggaagccaccatattgacytggggtataggcccaaactgccttcgtttggtccagggccatcgtgggtgatgacgattgctctcttgcactcawggacatttgatgctggtagtatggattatgagatggactagcccctgcyccagcccagytctcacattcccctttgttttttcccataccaactgcttctaccctcccctattacatacatctttcaatgtccaaaaaaaaaaaaaaaaaa

SEQ ID NO: 620 - DNA, 1400 bp, Homo sapiens
taaacagccttcagcttttatagtcacccagcatcctttgccaaacacagtgaaagacttttggagactggtcctggattatcactgcacatccgtagttatgctaaatgatgtggatcctgcccagttgtgtccacagtactggccagaaaacggagtacacagacacggccccatccaggtggaatttgtctctgctgacctggaagaggacatcatcagcaggatattccgcatttacaatgccgccagaccccaagatggatatcggatggtgcagcaattccagttcctgggctggccgatgtacagggacacaccagtgtctaagcgctccttcttgaagctcattcgccaggtggacaagtggcaagaggartacaatggcggggaaggccgcacsgttgtgcactgcttgaacgggggaggccgcagtgggacgttctgcgccatcagcatcgtatgtgagatgctccggcaccagagaaccgtggatgtctttcacgctgtgaagacactgaggaacaacaagcccaacatggtcgacctcctggatcagtacaagttctgctacgaggtggccctggaatacttgaattctggctgatggtgtaaacagctctgcaaacaatccctttcataccacaaagccaagacgttccatggtatttgtgcaaaagagatgaagacttctcaatatgcttattttgctttgcataattggctctttttaagagcccaagaaagtgtttctaaaattgcttgcactgcccaatcccagtaatgctgctgcctgacagaaacacacacacagccacagttgccaaatcccgtactccttgccaccggcttcctagagcagcgtagacagctggtaaactgaagagcacaactatattcttatgaaggaatttgtacctttggggtattattttgtggcccgtgaccctcgttattgttacagctgagtgtatgtttttgttctgtggagaatgctatctggcattatggtaatatattattttaggtaatatttgtactttaacatgttgcataatatatgcttatgtagctttccaggactaacagataaatgtgtaatgaacaaagatatgttgtatgagtcgtcgtttctgtcagatttgtattgtttccaagggaaaagcttgggggaggactcagttcacaaaatgcaaaactcaacgatcagattcacggacccagagcttttccatgtgtttatattgtaaatatttttgatttcatcgaaattatttattcattaaaagaaatttttgtgaagcacagtgagtgacaatcatttttcttaaggcctggaaacgattttctgtatgatgttactttatgtgaattctcatctcaataaatgatgacccgtg

SEQ ID NO: 621 - DNA, 1400 bp, Homo sapiens; identical to SEQ ID NO: 620

SEQ ID NO: 622 - DNA, 600 bp, Homo sapiens
ggccccagccgagaaggaagtcccgtatgaggatgtcgaaaacctcatctacgagaacgtggccgccatccaggcccacaagttggaggtctaagtgacgagggggctgggtcggcagcccaggcatcctcaagctctggacacccacttgagcccagattcctggaagagcagagggctgggctcccagactcctgggtgctgtgggaggagggggctggtatcccaaactctggtttccccaggagagagtggtctggtgggcttcagatgagtcctatgggagctggggatctggattcctggttccctgaaggaggagagggatgatagcttggattccctaggtctttccaggatgcagaaagaaacaggctggggcctggattctgaggcaggaaggaatttgggtctggagttctggctacttgaggaccaaaggcaggaaggatcctgccttgattttacttcagaaaccaaatcagtcttctataatctggggtcggagggagtccctgtgcccaaggtctctctgcaccccaccatccacatgtatttttccttctatcccataatttattaaatcactgttctccccag

SEQ ID NO: 623 - DNA, 600 bp, Homo sapiens
gcctcggtggaagtggtcaacgtattcttcgagggcattcagtacataaaggtgcctgttaccgatgctcgtgactcgcgtctctacgacttttttgaccccattgctgatcttatccacaccatcgatatgaggcagggccgtacgctgctgcactgcatggctggagtgagccgttccgcctcactgtgccttgcgtacctcatgaaataccactccatgtcgctgctggacgcccatacatggaccaagtcgcgccgccccatcatccggcccaacaacggcttttgggaacagctcatcaattacgaattcaagctgtttaataacaacaccgtgcgcatgatcaactcgccggtaggtaacatccctgacatctatgagaaggacctacgtatgatgatatcaatgtaagccatcccggccagcccctgacatctgccatcgatcttgcaccaagactgaacttgaacactgacattttgttagtaaagaaaaccggatggtgccttgttaaagggcaagaaaaaagggagggggttggagttttgaacgtagtaagccttaccttaatagaattaaawwmawraaamawaaaaa

SEQ ID NO: 624 - DNA, 600 bp, Homo sapiens; identical to SEQ ID NO: 623

SEQ ID NO: 625 - DNA, 1400 bp, Homo sapiens
gcccatcaaacaactgcamaatcacttgttactgaatttcycattcagcgttttgtttctttctgtccatacttaaagaccaaatyatttgtttgctttgaagaaaaagcaaaarcaagaacaaaaacaccaaatcatttgaaatcactryccattaaaaaaaatcaccagtggaactaaacagttgagtggtttgggatgtgttcgccatttctgtgtttgacctacatggyctctarttctttggacmattgtaactgtgaaactatggcttaayactgttaaagacyccaaggctccactctgtagccaggtgcamctcaggctgcacaaataccccaccagaatgtcacaatcattcattgctccagctrctgagtgaacagrgtgcaagacagcactggcttgggttktatttttgcagccagttaactttgcatcaggtctacacagtccttgcagcctttgatttctccagttgtasagatttgaaatggggtgcccgggttcctctcgtttttccttcaatctacctagcatgcattttacacacattggaggagtcgtatgcactgtttttctsttgctgatggaggcaagmasgccttctaattagtmtaacttaaayggaygggattcacttaacaaaagcaagaagaaaagcacaygaacaggtgtcttaatgcatttggatagtttctttgcggggtgtgtgystgtstgtgtgtgtgtgtgtgtgtgtgtgtgtgtgtgtgtcttggtgaaggtgaggggctgtattttcaccaagccttttcataatcaagtttgctttgcaaaccwtmtggccttgcmcccmgcagwacagtcccttcctaatarcrgggatgctctgtcatgkttytctgtaaattrtygtgtgttgggaagttctgttgaggcttagtttgatcttccatggtggacaygtctgttctgtatrtaaaargcattacawytgtgttttagcagrtgrgayttgaagcytttccacagtccttgtgctctgagatggctgttgagctctgctcarctgtcryagctgaattctttytttgygctgaacactgggcagcctcaccwtgttgccaacgtgcttctggggcccctgtsactgcygccggatgcygygcacacaggcagagtgccttggcaggtttgtgcaccccttggcgagccagaactgggaaccccgcggrgtgaccccttctcatggggggtcrgggaggggagtgcctatttttaatcctgtctgtttgttgcrcaatggaaatcactgtgatttgtacatatgccctaggaaaattttacygctgtctaatttatgtaataatactgwtgattcyaggtttgtttaataaaactttrtatcttttcagaag

SEQ ID NO: 626 - DNA, 1400 bp, Homo sapiens; identical to SEQ ID NO: 625

SEQ ID NO: 627 - DNA, 600 bp, Homo sapiens
aaaaagaaggtgctggatagatgcttctctgggtggaggggcccacgcttcggggcctcctgtccttcaagaacctccaggtctagcctgggtatgaagaagttcttcaccgtggccatccttgctggcagcgttctgtccacagctcacggcagcctgctcaacctgaaggccatggtggaggccgtcacagggaggagcgccatcctgtccttcgtgggctacggttgctactgtgggctggggggccgtggccagcccaaggatgaggtggactggtgctgccacgcccacgactgctgctaccaggaactctttgaccaaggctgtcacccctatgtggaccactatgatcacaccatcgagaacaacactgagatagtctgcagtgacctcaacaagacagagtgtgacaagcagacatgcatgtgtgacaagaacatggttctgtgcctcatgaaccagacgtaccgagaggagtaccgtggcttcctcaatgtctactgccagggccccacgcccaactgcagcatctatgaaccgccccctgaggaggtcacctgcagtcaccaatccccagcgccccccgcccctccctag

SEQ ID NO: 628 - DNA, 600 bp, Homo sapiens; identical to SEQ ID NO: 627

SEQ ID NO: 629 - DNA, 600 bp, Homo sapiens
aggatgaggcggacggagaccaggacggccgaagccgggayggcctcagcccccaggccaggcatgactttgacagactccaggctggcggcggggtcctggagcagcggccctacagacgggrgtcagagatctgagccaaccttggccgacatgcagcatccaccccyggcyggggagaggccccgcggtcgctcaggggcccygggtttgagcagaacgggcccagtgccctgggttgcagactcagtagcgttttagtcgttttatgtttctttgcaamggcctcagaagkttggccggagagggggcagccagagcggcagcccccggcctcagaggctatcacaggctcagggcaaagaagtggcctcctggggggccaggccacgrgggccagggcttctgcctgaagatggagctgcagcctgcggggaagcagcycagctcgatggtgggcccagcctctgctgtccaaggctggctagctgcggtgctccttgctggtttttaacttggggagaaacaccgggtttcagctttctygaccttagcttgggtgagactgtttacaaaaaaaaaaaaaaaaaaaaaaaaaaa

SEQ ID NO: 630 - DNA, 600 bp, Homo sapiens; identical to SEQ ID NO: 629

SEQ ID NO: 631 - DNA, 600 bp, Homo sapiens
ttgtattctacctttgtaaaacagcctatagatgatgatgtgtttgggatactgcttattttatgatagtttgtcctgtgtccttagtgatgtgtgtgtgtctccatgcacatgcacgccgggattcctctgctgccatttgaattagaagaaaataatttatatgcatgcacaggaagatattggtggccggtggttttgtgctttaaaaatgcaatatctgaccaagattcgccaatctcatacaasccatttactttgcaagtgagatagcttccccaccagctttattttttaacatgaaagctgatgccaaggccaaaagaagtttaaagcatctgtaaatttggactgttttccttcaaccaccattttttttgtggttattatttttgtcacggaaagcatcctctccaaagttggagcttctattgccatgaaccatgcttacaaagaaagcacttcttattgaagtgaattcctgcatttgatagcaatgtaagtgcctataaccatgttctatattctttattctcagtaacttttaaaagggaagttatttatattttgtgtataatgtgctttatttgcaaatcaccc

SEQ ID NO: 632 - DNA, 600 bp, Homo sapiens; identical to SEQ ID NO: 631

SEQ ID NO: 633 - DNA, 600 bp, Homo sapiens
cctactctccagaaccatctctaggcaactatcaaaaagaagcagaagttcaagtggacaaatttatgtgaaaattcatttaacatataagctgaactctattatggggaatggatacaaaagcagagctcccatcttgactttcaattcctcatcagaagtactggcttctttagagagtagtaagcatggctgcctatgcttggagtcataagtgttatttggactataccctgagataagcttatagatcaagtttggctcccttgaaaagcatttctctcatgtgcgccctcagggcttccagcaggattgagtcaccctgacgatgaccggggagaagccgtgtgctcttcattattttcagctggaggacagagctcagtgcctgactgcctagggtctcatggactgtaggcagcctgccagtgaaggtcactggactctagcctacaacatgctgagctacagcccagaagccagacatgcctgtcttagctgacctgtttttggtccacttttgcccttccatgactaataaggaagatatgtgtgtatttcatacacacacaaggacctggattaaaaatccaaaaagtg

SEQ ID NO: 634 - DNA, 600 bp, Homo sapiens; identical to SEQ ID NO: 633

SEQ ID NO: 635 - DNA, 600 bp, Homo sapiens
aatgagcaggaacctgtacagtggtgactattaccggatccagggccgggcagtgctccctatccgctggatgtcttgggagagtatcttgctgggcaagttcactacagcaagtgatgtgtgggcctttggggttactttgtgggaractttcaccttttgtcaagaamagccctattcccagctgtcagatgaacaggttattgagaatactggagagttcttccgagaccaagggaggcagacttacctccctcaaccagccatttgtcctgactctgtgtataagctgatgctcagctgctggagaagagatacgaagaaccgtccctcattccaagaaatccaccttctgctccttcaacaaggcgacgagygatgctgtcagtgcctggccatgttcctacggctcaggtcctccctacaagacctaccactcacccatgcctatgccactccatctggacatttaatgaaactgagagacagaggcttgtttgctttgccctcttttcctggtcacccccactccctacccctgactcatatatacttttttttttttacattaaagaactaaaaaaaaaaaaaaaaaaggcg

SEQ ID NO: 636 - DNA, 600 bp, Homo sapiens; identical to SEQ ID NO: 635

SEQ ID NO: 637 - DNA, 600 bp, Homo sapiens
cacactaatgtcaatgatgggrcagaatttggaggatcartttatcagaaagtttgtgaagatcttgayrcttyagtaaacctkgcttggacatcaggtaccarctgcactcgttttggcmttgcagctaaatwtcagttgrawcccaytgcttccatttctrcaaaagtcaacaactstagcttraytggrgtmrgctayactcmrmcyctgaggcctggtgtgaagctyacmctstctgctctggtagaygggaagagcatkratgctggaggccacamrsttggsctygccctggagttgsaggcttaatccagctgaaagaaacctttgggaatggatatcagaagatttggccttaatatatttccattgtgaccagcagcaggcttttttcccccaagaagatgatcaaaacaaaggatgatctcaacaagagctgtattttaagtatttagacagttctttgttagctggtttctagttgaattggttatctagttaccaatgctgcagtcctgcagtcacctatacattatttaaatgtatttaactgttaaatgcgctacccaccaataatgaaatagacctttatgaaaa

SEQ ID NO: 638 - DNA, 600 bp, Homo sapiens
ctaaattatatattcagttatattatatttggctttagatggttttaatacatttgatagtttttcaccccttggctttattttatataaacttttgtttttcagcagttctgaactttttagtattttataaatggtccaaaaaatgcctgtttcagaagtttttgaattcagtgcatttcctcttgatttgtctgggttaaaaccattccttttgtatgaaatgttttgacttaggaatcattttatgtacttgttctacctggattgtcaacaactgaaagtacatatttcatccaaatcaagctaaaatttatttaagttgattctgagagtacaggtcagtaagcctcattatttggaatttgagagaaggtataggtgatcggatctgtttcatttataaaaggtccagtttttaggactagtacattcctgttattttctgggttttatcattttgcctaaaataggatataaaagggacaaaaaataagtagactgtttttatgtgtgaattatatttctactaaatgtttttgtatgactgtgttatacttgataatatatatatatatatataaaaaaaaaaaaaaaaaa

SEQ ID NO: 639 - DNA, 600 bp, Homo sapiens
cccaaagaggaatggcagtaggcatgcagctgagattgcaaacatgtccttagatatcctgagctctgtgggcactttcaagatgcggcacatgccagaagtgccggtccgaattcgaattggccttcactcagggccggttgttgctggagtggtgggcctcaccatgcccagatactgcttgtttggagacactgtgaacacagcttctcggatggaatctacaggcttaccttatcgcattcatgtcagtctcagcactgttacaattcttcaaaatctgagtgagggctatgaagtggagcttcgaggaagaacagagctcaagggcaaaggcacagaggaaaccttctggctgattgggaaaaaaggcttcatgaagccccttcctgtgcccccaccagtggacaaagatgggcaagtgggccatggcctgcaaccagtggagattgcagccttccaaagaagaaaagcagaaaggcagttggtgagaaacaagccataaggggcaaagggctccaggatttgaatcttctcttggtgaggcaatgggaaagctcacttcagttcaagaaattgttctgcctgggcaagaaatta

SEQ ID NO: 640 - DNA, 1400 bp, Homo sapiens
gtgtggtactttaccatatgttgctccagaacttctgaagagaagagaatttcatgcagaaccagttgatgtttggtcctgtggaatagtacttactgcaatgctcgctggagaattgccatgggaccaacccagtgacagctgtcaggagtattctgactggaaagaaaaaaaaacatacctcaacccttggaaaaaaatcgattctgctcctctagctctgctgcataaaatcttagttgagaatccatcagcaagaattaccattccagacatcaaaaaagatagatggtacaacaaacccctcaagaaaggggcaaaaaggccccgagtcacttcaggtggtgtgtcagagtctcccagtggattttctaagcacattcaatccaatttggacttctctccagtaaacagtgcttctagtgaagaaaatgtgaagtactccagttctcagccagaaccccgcacaggtctttccttatgggataccagcccctcatacattgataaattggtacaagggatcagcttttcccagcccacatgtcctgatcatatgcttttgaatagtcagttacttggcaccccaggatcctcacagaacccctggcagcggttggtcaaaagaatgacacgattctttaccaaattggatgcagacaaatcttatcaatgcctgaaagagacttgtgagaagttgggctatcaatggaagaaaagttgtatgaatcaggttactatatcaacaactgataggagaaacaataaactcattttcaaagtgaatttgttagaaatggatgataaaatattggttgacttccggctttctaagggtgatggattggagttcaagagacacttcctgaagattaaagggaagctgattgatattgtgagcagccagaagrtttggcttcctgccacatgatcggaccatcggctctggggaatcctggtgaatatagtgctgctatgttgacattattcttcctagagaagattatcctgtcctgcaaactgcaaatagtagttcctgaagtgttcacttccctgtttatccaaacatcttccaatttattttgtttgttcggcatacaaataatacctatatcttaattgtaagcaaaactttggggaaaggatgaatagaattcatttgattatttcttcatgtgtgtttagtatctgaatttgaaactcatctggtggaaaccaagtttcaggggacatgagttttccagcttttatacacacgtatctcatttttatcaaaacattttgtttaattcaaaaagtacatattccatgttgatttaattctaagatgaaccaataaagacataattcttgtgacttttggacagtagatttatcagtctgtgaagcgaagccagctt

SEQ ID NO: 641 - DNA, 754 bp, Homo sapiens
  misc_feature (7)..(7): n is a, c, g, or t
  misc_feature (665)..(665): n is a, c, g, or t
  misc_feature (683)..(683): n is a, c, g, or t
  misc_feature (726)..(726): n is a, c, g, or t
aaatccngatcgttgggamtkcggtcrykagtckscgrcgagttgttgcctgggctggacgtggttttgtctgctgcgcccgctcttcgcgctctcgtttcattttctgcagcgcgccagcaggatggcccacaagcagatctactactcggacaagtacttcgacgaacactacgagtaccggcatgttatgttacccagagaactttccaaacaagtacctaaaactcatctgatgtctgaagaggagtggaggagacttggtgtccaacagagtctaggctgggttcattacatgattcatgagccagaaccacatattcttctctttagacgacctcttccaaaagatcaacaaaaatgaagtttatctggggatcgtcaaatctttttcaaatttaatgtatatgtgtatataaggtagtattcagtgaatacttgagaaatgtacaaatctttcatccatacctgtgcatgagctgtattcttcacagcaacagagctcagttaaatgcaactgcaagtaggttactgtaagatgtttaagataaaagttcttccagtcagtttttctcttaagtgcctgtttgagtttactgaaacagtttacttttgttcaataaagtttgtatgttgcatttaaaaaaaaaaaaaaaaarwmgrgncggccgccccaaaagggncccagcttacgtacccgggccatgcgacgtccaagcccctccnaaaggggcccccaaattccattccctgg

SEQ ID NO: 642 - DNA, 754 bp, Homo sapiens; identical to SEQ ID NO: 641
  misc_feature (7)..(7): n is a, c, g, or t
  misc_feature (665)..(665): n is a, c, g, or t
  misc_feature (683)..(683): n is a, c, g, or t
  misc_feature (726)..(726): n is a, c, g, or t

SEQ ID NO: 643 - DNA, 1400 bp, Homo sapiens
tttcagctgagatagctcgagagaatgtccaaggtgtagtcataccctcaaaagatccagaaccacttgaagaaaattgcgctaaagccctgactttaaggatacatgattctttgaataatagccttccaattggccttgtgcctactaattcaacaaacactgtcatggaccaaaaaaatttgaagatgtcaactcctggccaaatgaaagcccaagaaattgaaagaacccctccaacaaactttaaaaggacattagaagagtccaattctggccccctgatgaagaagcatagacgaaatggcttaagtcgaagtagtggtgctcagcctgcaagtctccccacaacctcacagcgaaagaactctgttaaactcaccatgcgacgcagacttaggggccagaagaaaattggaaatcctttacttcatcaacacaggaaaactgtttgtgtttgctgaaatgcatctgggaaatgaggtttttccaaacttaggatataagagggctttttaaatttggtgccgatgttgaactttttttaaggggagaaaattaaaagaaatatacagtttgactttttggaattcagcagttttatcctggccttgtacttgcttgtattgtaaatgtggattttgtagatgttagggtataagttgctgtaaaatttgtgtaaatttgtatccacacaaattcagtctctgaatacacagtattcagagtctctgatacacagtaattgtgacaatagggctaaatgtttaaagaaatcaaaagaatctattagattttagaaaaacatttaaactttttaaaatacttattaaaaaatttgtataagccacttgtcttgaaaactgtgcaactttttaaagtaaattattaagcagactggaaaagtgatgtattttcatagtgacctgtgtttcacttaatgtttcttagagccaagtgtcttttaaacattattttttatttctgatttcataattcagaactaaatttttcatagaagtgttgagccatgctacagttagtcttgtcccaattaaaatactatgcagtatctcttacatcagtagcatttttctaaaaccttagtcatcagatatgcttactaaatcttcagcatagaaggaagtgtgtttgcctaaaacaatctaaaacaattcccttctttttcatcccagaccaatggcattattaggtcttaaagtagttactcccttctcgtgtttgcttaaaatatgtgaagttttccttgctatttcaataacagatggtgctgctaattcccaacatttcttaaattattttatatcatacagttttcattgattatatgggtatatattcatctaataaatcagtgaactgttmmwmawrwwrmwraa

SEQ ID NO: 644 - DNA, 600 bp, Homo sapiens
accaatgcctcagcagggtggagtgcagttcagaggttataaatagctggcagggcatgaggagatgattttcttgcatgtgcaattctctaggggccatcaggaaacagagtttaaagtaccctttgattactgtcagaactgtcagcatttgccagttttccccgagcagtaattggcccggctcccttctatcagtagccagtgttaactagtttaccaaatgctgtacacgattgcccctgaatcagatagctgtcagtggagctctaagatctcctttagagggcacagtcaggtgggctgttgggatggccgtaggcaggggagaaggaagaaggccactgatgagactgctgacctcctcagaatgttgacctcttctagagagactgcctcccagtgtttaagtggctcattgctccttctgactctgtaaaatggctctggaggacagctcacaggaattctgattgctgaggtgggtgattgagagctgttcaccatgtgtgcagcctgtgctccccttctatggatatgtgtgcaatttttgtatgtattttttcacactgtagatggcagtgtttatgctgcagcttc

SEQ ID NO: 645 - DNA, 1400 bp, Homo sapiens
caartaacaaagcagryarctttggctctgcggcactgtcacttgttaaacattgcgcacagagacctcaagcctgaaaatctgctthtbaaggataactctttggatgccccagtgaagttgtgtgactttggatttgccaagattgaccaaggtgacttgatgacaccccagttcaccccttattatgtagcaccccaggtactggaggcgcaaagaaggcatcagaaggagaaatctggcatcatacctacctcaccgacgccctacacttacaacaagagctgtgacttgtggtccctaggggtgattatctatgtgatgctgtgcggataccctcctttttactccaaacaccacagccggactatcccaaaggatatgcgaagaaagatcatgacaggcagttttgagttcccagaggaagagtggagtcagatctcagagatggccaaagatgttgtgaggaagctcctgaaggtcaaaccggaggagagactcaccatcgagggagtgctggaccacccctggctcaattccaccgaggccctggataatgtgctgccttctgctcagctgatgatggacaaggcagtggttgcaggaatccagcaggctcacgcggaacagttggccaacatgagaatccaggatctgaaagtcagcctcaaacccctgcactcagtgaacaaccccattctgcggaagaggaagttacttggcaccaagccaaaggacagtgtctatatccacgaccatgagaatggagccgaggattccaatgttgccttggaaaaactccgagatgtgattgctcagtgtattctcccccaggctggmgwgratkmasatgakaaastrratsrastaawrcwggagrmttggaagyakaaccgggaatgcaaactcctaagagatactctgcagagcttcagctggaatggtcgtggattcacagataaagtagatcgactaaaactggcagaaattgtgaagcaggtgatagaagagcaaaccacgtcccacgaatcccaataatgacagcttcagactttgtttttttaacaatttgaaaaattattctttaatgtataaagtaattttatgtaaattaataaatcataatttcatttccacattgattaaagctgctgtatagatttagggtgcaggacttaataatagtatagttattgtttgtttttaagaaaagctcagttctagagacatactattactttaggactgtgtagttgtatatttgtaagatgacagatgatgctgtcaagcaatattgttttatttgtaataaaatatacaaaaatcacttgccagcagtagaaaaaggaccgactataccgacctttctgattagtaaacagttgaatcaaggactctgg

SEQ ID NO: 646 - DNA, 1400 bp, Homo sapiens; identical to SEQ ID NO: 645

SEQ ID NO: 647 - DNA, 1400 bp, Homo sapiens
ttatattttgaagcatacaggaaacttctcgtttccctcgtttagcccccacccagatccaggtgaaagggcagctttaatggtggtttttatggaccaccattatcagagagcactgtgcaagccaaatggttccaataatgaatgaaaatttctgggtgtaaagagtaaatatgcccctggctcttttctaccaatgtttgcttcctggttggaaagaaaccaaagatttaagacgggctgcttcttcccagactggctgtgccctgcctgtggcccagcaacctgtgcagccggcagtgtgcctggtgtcacgccaggaggctgtggctgctgtgggccctctggaattgtgctccctccacaaagtttaccccaaaaggttcttctaagcctttattgtcccctggtaaatgtttccctggctgggcgcggtggctccacgcctgtaatcccagcactttgggaggccgaggcgggtggatccacctaaggtcaggagtttgagatccagcctgcccaacatggtgaaacctygtytctactaaaaatacacaacttagccagtcttgttggcgmacgcctgtaatsttcagytactagggaygctgaggcaggagaatcgyttgaacccaagaaagaggtggaggttgvggtgagccaagattgcgccahtgcactccagcctgggcaaacagagggagaytccatcgcccccccccaacaaaaaaaaaagtttcccatacaytggcstgccccaaaacccactaacaattttagcaaaacagtccaggccaaagaggaagcatttyatgttcaataagaaacccagccattccgcatggctggttcctgagtggctytggtgatactctccagccacctgctgacattsagaatytcagacytcgggactgctgttgcggtaccgtgtgtytgacacctgccagcagccctttgctatytgcgcgcaggatgggggtgactgcccagacattcccgctagataggytytgatttccggggcagcctttcagatgcggcagacatacaacacctgtactttagagttttaagggaaaaaaaaatcagaagtgctggttagatagtaaaaacttaggataacttagaaaggctagttttagcttcctttgtggctcccctggtgcaaaacaattagcagttatgcaatggacctgattctagtttattctaattaagaagtgaggccgrgtttgracttcgttcctgaatacaatcttgagtaactgggaaagtctgagtgaaaggatggcctcattctctttctaatcttgctggtttcaagattagaaaatggcattatttgatctgaaatgtttgagaaracacgaataaagttacttgggcagaaaaaaaaa

SEQ ID NO: 648 - DNA, 1400 bp, Homo sapiens; identical to SEQ ID NO: 647

SEQ ID NO: 649 - DNA, 600 bp, Homo sapiens
cttcagatttcctgaaaatmmttgaaatatcttactttaaaaatattttcatctctgaaatatctcgttatttattggaggtattgtttaaccttagakagaccattaaattatttataaaatattttgtaattacctgtagytaatacattacatagaaaaaaactatgttaacagtgtctctgtttaagtataatcagatataaatatataacttaattttttaattttaaaaatagatacctgtttgactttgaggtagtccagaccttttcttttttttttttttttttaatgtgtgcaaaagcccaaaggttcctaagcctggctgcaaagaagaatcaacagggacactttttaaaaacactcttatcagcctgggcaacacagtgagactccatctcttaaaaaaaaaattagctgggtatagtggtatgtgcctgtagtcccaggtactcaggaggctgasgcaggaggattgcctgagcccaggaggtggaaactgcagagagtcatgatcatgtccttacactccagcctggataacagagcgagaccctgtctcaaaaaaawaaaawaaaaaawaaaaagtcgaccgag

SEQ ID NO: 650 - DNA, 600 bp, Homo sapiens; identical to SEQ ID NO: 649

SEQ ID NO: 651 - DNA, 600 bp, Homo sapiens
agatggaagggatggaaacagggccacttcagagggtctcctgccctgcagggcctttctacccgtgtccactggaggggctgtggccatcagctctggctgtgtaggggaggaaggggtgcatgcatgtcccccaccctccacagtcttccttgcctttagagtgaccctgcagagtcactcagccaaatctgtctgctgctccctctcctcagccagttgggtgtgcgcagagctgtcatagggtccctttgtcagccccgagttcagcttcccaaacaccagtgttggatattctgtgattgattttggtcctcctccgctgtcccccaacacccaggaatgggaatctggcttggttcgagataggagcttttctgtgtcctaagccctttcatgctagcaggaagactgaaagcaaggtggcccagtgtggggtcatagggcttgatagacctggcactgcctatctgcacttccaggtgccccacctatttatctgagcccacaggtggaaaggggaactgcctcagtgagaacggggggacggggatgttaggaaaaatacagtaaagttgcaatgaagaggttcatgaagta

SEQ ID NO: 652 - DNA, 600 bp, Homo sapiens; identical to SEQ ID NO: 651

SEQ ID NO: 653 - DNA, 600 bp, Homo sapiens
  misc_feature (558)..(558): n is a, c, g, or t
accggcgtgggatcctggaactggcaggaactgtgggttgtgttggtccccgaacycccatcgcctataygaaatatggttscttttgtrkswwgggaggsmatsgcmakyymygmgakgsyrtwgmctggtgctgccatggccacgactgttgttacactcgagctgaggaggccggctgcagccccaagacagagcgctactcctggcagtgcgtcaatcagagcgtcctgtgcggaccggcagagaacaaatgccaagaactgttgtgcaagtgtgaccaggagattgctaactgcttagcccaaactgagtacaacttaaagtacctcttctacccccagttcctatgtgagccggactcgcccaagtgtgactgactaccttgacttgaaatgctcttttgcacaaggaaataaagcgtcctctcagtaatgaacaacagcattcagttatttgcagaagggaaccgaagccaagtgataaagccacaaccttgtgtttgctttccctcccaatcccagaactcaggactggagcccatgtaggtttgcagtnacgggccaaaagtcctactacctcattttataaaactatgcg

SEQ ID NO: 654 - DNA, 600 bp, Homo sapiens; identical to SEQ ID NO: 653
  misc_feature (558)..(558): n is a, c, g, or t

SEQ ID NO: 655 - DNA, 1400 bp, Homo sapiens
gccgcaagtcctccagaggaacagcagcacaatggacctgacgctcttcgcagctgaggccatcgcccttaaccgccagctatctcagcacgaagagaacgaactagcagaggagccagaggcactagctgatggcctctgctccatgaagctttcccctccctgcaagtcacgcctggcccggagacgggccctggcccaggcaggccgtggtgaagacaggagcccgcccacagcactctgaaatgctccagtcacaccttataggccctaggcctggccaggcattgtcccctggaaacctgtgtggctaaagtctgctgagcaggcagcagcctctgctctgtggctccattcaggctttttcatctacgaaggccctgaggttcccatcaacccccatttccctagggtcctggaggaaaaagctttttccaaaggggttgtctttgaaaaggaaagcaatcacttctcactttgcataattgcctgcagcaggaacatctcttcactgggctccacctgctcacccgcctgcagatctgggatccagcctgctctcaccgctgtagctgtggcggctggggctgcagcctgcagggagaagcaagaagcatcagttgacagaggctgccgacacgtgcctcttccctctcttctctgtcaccctcctctggcggtccttccaccttcctctgtcctccggatgtcctctttgcccgtcttctcccttggctgagcaaagccatcccctcaattcagggaagggcaaggagccttcctcattcaggaaatcaaatcagtcttccggtctgcagcacggaaaagcacataatctttctttgctgtgactgaaatgtatccctcgtttatcatcccctttgtttgtgattgctgctaaagtcagtagtatcgtttttttaaaaaaaaagtttggtgtttttaaccatgctgttccagcaaagatgataccttaaactcccactgcaagcccatgaacttcccagagagtggaacggcttgctcttctttctagaatgtccatgcacttgggttttaatcagcagttccctattattctgattttaagctgttcctgtgatgaacttagagacagcatcggtgtctgctgctgtgtccccaggtcttgtgtgggtggcacagatctgggcagttagatagtgctctgtgcctaaggtgaagccacactagggtgaagcctcacttccctgtttgagcaatgcagtgcctgctgcccgtgtgcatgaaggtacagccattcagataagtggaactattgagttacataaagaaaatagatttgcatttgtcaggcagacgtttatacaacaccacggtgcttttatacattgtgcttattttaataaaactgaaattct

SEQ ID NO: 656 - DNA, 600 bp, Homo sapiens
tccatgcagggggctcstgggggtggggaggtgtcacatggtgcccctagctttatatatggacatggcaggccgatttgggaaccaagctattcctttcccttcctcttcksccctcagatgtcccttgatgcacagagaagctggggaggagctttgttttcgggggtcaggcagccagtgagatgagggatgggcctggcattcttgtacagtgtatattgaaatttatttaatgtgaggtttggtctggactgacagcatgtgccctcctgagggaggaccwggggcacagtccaggaacaagctaattgggagtccaggcacaggatgctgtgttgtcaacaaaccaagcatcagggggaagaagcagagagatgcggccaagataggaccttgggccaaatccgctctcttcctgcccctctttctctttcttcctttactttcccttgcttttccctcttttcttactcctcctctttctctccccmacccccattctcatctgcacccttcttttctcatgtgtttgcataaacattcttttaacttctttctatttgacttgtggttgaattaaaattgtcccatttgcwt

SEQ ID NO: 657 - DNA, 1400 bp, Homo sapiens
catccaaacattgttggttatcgtgcttttactgaagccartgatggcagtctgtgtcttgctatggaatatggaggtgaaaagtctctaaatgacttaatagaagaacgatataaagccagccaagatccttttccagcagccataattttaaaagttgctttgaatatggcaagagggttaaagtatctgcaccaagaaaagaamctgcttcatggrgacataragtcttcaaatgttgtaattaaaggcgattttgaaacaattaaaatctgtgatgtaggagtctctctaccactggatgaaaatwtgactgkgactgaccctgaggcttgttacattggcacagagccatggaaacccaaagaagctgtggaggagaatggtgttattactgacaaggcagacatatttgcctttggccttactttgtgggaaatgatgactttatcgattccacacattaatctttcaaatgatratgatgatgaagataaaacttttgatgaaagtgattttgatgatgaagcatactatgcagcsttgggaactaggccacctattaatatggaagaactggatgaatcataccagaaagtaattgaactcttctctgtatgcactaatgaagaccctaaagatcgtccttctgctgcacacattgttgaagctctggaaacagatgtctagtgatcatctcagctgaagtgtggcttgcgtaaataactgtttattccaaaatatttacatagttactatcagtagttattagactctaaaattggcatatttsaggaccatagtttcttgttaacatatggataactatttctaatatgaaatatgcttatattggctataagcacttggaattgtactgggttttctgtaaagttttagaaactagctacataagtactttgatactgctcatgctgacttaaaacactagcagtaaaacgctgtaaactgtaacattaaattgaatgaccattacttttattaatgatctttcttaaatattctatattttaatggatctactgacattagcactttgtacagtacaaaataaagtctacatttgtttaaaamamwraammwwwwgstgmkgbgyttatcaaatgataactggaagctgaggagaatatgcctcaaaaaragtagctycttggatacttcagactctggktacagattgkcttgatctcttggatctcctcagatctttggtttttgctttaatttattaaatgtattttccatactgagtttaaaatttattaatttgtaccttaagcatttcccagctgtgtaaaaacaataaaactcaaataggatgataaagaataaaggacmctttgggtammaraarrwrwmwmarmawwawwwwawacttc

SEQ ID NO: 658 - DNA, 1400 bp, Homo sapiens; identical to SEQ ID NO: 657

SEQ ID NO: 659 - DNA, 1400 bp, Homo sapiens
tcaaatgtaaactcaatttgcctccctacctcacacaagaagccagagatctgcttaaaaagctgctgaaaagaaatgctgcttctcgtctgggagctggtcctggggacgctggagaagttcaagctcatccattctttagacacattaactgggaagaacttctggctcgaaaggtggagcccccctttaaacctctgttgcaatctgaagaggatgtaagtcagtttgattccaagtttacacgtcagacacctgtcgacagcccagatgactcaactctcagtgaaagtgccaatcaggtctttctgggttttacatatgtggctccatctgtacttgaaagtgtgaaagaaaagttttcctttgaaccaaaaatccgatcacctcgaagatttattggcagcccacgaacacctgtcagcccagtcaaattttctcctggggatttctggggaagaggtgcttcggccagcacagcaaatcctcagacacctgtggaatacccaatggaaacaagtggcatagagcagatggatgtgacaatgagtggggaagcatcggcaccacttccaatacgacagccgaactctgggccatacaaaaaacaagcttttcccatgatctccaaacggccagagcacctgcgtatgaatctatgacagagcaatgcttttaatgaatttaaggcaaaaaaggtggagagggagatgtgtgagcatcctgcaaggtgaaacgactcaaaatgacagtttcagagagtcaatgtcattacatagaacacttcagacacaggaaaaataaacgtggattttaaaaaatcaatcaatggtgcaaaaaaaaacttaaagcaaaatagtattgctgaactcttaggcacatcaattaattgattcctcgcgacatcttctcaaccttatcaaggattttcatgttgatgactcgaaactgacagtattaagggtaggatgttgcttctgaatcactgttgagttctgattgtgttgaagaagggttatcctttcattaggcaaagtacaaaattgcctataatacttgcaactaaggacaaattagcatgcaagcttggtcaaactttttccagcaaaatggaagcaaagacaaaagaaacttaccaattgatgttttacgtgcaaacaacctgaatcttttttttatataaatatatatttttcaaatagatttttgattcagctcattatgaaaaacatcccaaactttaaaatgcgaaattattggttggtgtgaagaaagccagacaacttctgtttcttctcttggtgaaataataaaatgcaaatgaatcattgttaaccacagctgtggctcgtttgagggattggggtggacctggggtttattttcagtaacccagctgc

SEQ ID NO: 660 - DNA, 1264 bp, Homo sapiens
aaagactgcaaaactgcctgaaatgtgttttggcatcagctactgacacgtaaggtttcccaatcctcaactctgtcctgccagctgatgaggggaaggaaagggattacswaggrrwawgrgcracmratccwgrgwscaycamctgmccwskcccawmcccagccttgtgcctcacctacccccawccwmmcagagggagcagctatttaaggggagcaggagtgcagaacaaacragacggcctggggatacaactctggagtcctctgagagagccaccaaggaggagcaggggagcgacggccggggcagaagttgagaccacccagcagaggagctaggccagtccatctgcatttgtcacccaagaactcttaccatgaagaccctcctactgttggcagtgatcatgatctttggcctactgcaggcccatgggaatttggtgaatttccacagaatgatcaagttgacgacaggaaaggaagccgcactcagttatggcttctacggctgccactgtggcgtgggtggcagaggatcccccaaggatgcaacggatcgctgctgtgtcactcatgactgttgctacaaacgtctggagaaacgysgmyskggcasswamkykskgagctacaagtttagcaactcggggagcagaatcacctgtgcaaaacaggactcctgcagaagtcaactgtgtgagtgwgataaggctgctgccacctgttttgctagaaacaagacgacctacaataaaaagtaccwkkrcyrytcyartaaacactgcagagggagcacccctcgttgctgagtcccctcttccctggaaaccttccacccagtgctgaatttccctctctcataccctccctccctaccctaaccaagttccttggccatgcagaaagcatccctcacccatcctagaggccaggcaggagcccttctatacccacccagaatgagacatccagcagatttccagccttctactgctctcctccacctcaactccgtgcttaaccaaagaagctgtactccggggggtctcttctgaataaagcaattagcaaatcawrwaaaaaaaaaaaagaaaaaagrarwaaagttttggcctaaatgagtcgtattacagttgacgcggccggcgaatttagtagatggtgtaattcgacccgagaaattccggaaccggaactctgaggggtgacaagtttccccaagagcggcggattaaggcttgggcggacaaagggcg

SEQ ID NO: 661 - DNA, 1264 bp, Homo sapiens; identical to SEQ ID NO: 660

SEQ ID NO: 662 - DNA, 600 bp, Homo sapiens
gggtcagcacgttcagttacgggagtgggaaattacatgaggcctgggcctctgcgttcccaagctgtgcgttctggaccagctactgaattattaatctcacttagcgaaagtgacggatgagcagtaagtaagtaagtgtggggatttaaacttgagggtktccctcctgactagcctctcttacaggaattgtgaaatattaaatgcaaatttacaactgcarawramrwawrwrmmwwraamtgaakrkykgscyttaagaatgattcttcttatactctgaaggtgagaatattttgtgggcaggtatcaacattggggaagagatttcatgtctaactaactaactttatacatgatttttaggaagctattgcctaaatcagcgtcaacatgcagtaaaggttgtcttcaactgavmwrwwmwarwwwtctcttacccagcactgtcatctagattttccatttcagtgattcccacccctcggtctactagcaacaacaactttcttgtatcctttgaggagacgttagggagaaccatcatttcacagttaaaagaaagacagtccagtcctaggcaaaatttcatgaagc

SEQ ID NO: 663 - DNA, 600 bp, Homo sapiens; identical to SEQ ID NO: 662

SEQ ID NO: 664 - DNA, 1400 bp, Homo sapiens
catagtcgacgctacattgatgagtacagaaatgactacactcaaggatgtgaacctggacatcgccaaagagaccatgaaagccggtatcagaaccatagtagcaagtcttctggtagaagtggaagaagtagttataaaagcaaacacaggattcaccacagtacttcacatcgtcgttcacatgggrtatystytttwagawsaawttgtkgawaytttaggtgaagkmscwtktggaamagttgtggagwrcatygatcatawwkygggaggtagacatgtagcagtaaaaatagttaaaaatgtggatagatactgtgaagctgctcgctcagaaatacaagttctggaacatctgaatacaacagaccccaacagtactttccgctgtgtccagatgttggaatggtttgagcatcatggtcacatttgcattgtttttgaactattgggacttagtacttacgacttcattaaagaaaatggttttctaccatttcgactggatcatatcagaaagatggcatatcagatatgcaagtctgtgaattttttgcacagtaataagttgactcacacagacttaaagcctgaaaacatcttatttgtgcagtctgactacacagaggcgtataatcccaaaataaaacgtgatgaacgcaccttaataaatccagatattaaagttgtagactttggtagtgcaacatatgatgacgaacatcacagtacattggtatctacaagacattatagagcacctgaagttattttagccctagggtggtcccaaccatgtgatgtctggagcataggatgcattcttattgaatactatcttgggtttaccgtatttccaacacacgatagtaaggagcatttagcaatgatggaaaggattcttggacctctaccaaaacatatgatacagaaaaccaggaaacgtaaatattttcaccacgatcgattagactgggatgaacacagttctgccggcagatatgtttcaagacgctgtaaacctctgaaggaatttatgctttctcaagatgttgaacatgagcgtctctttgacctcattcagaaaatgttggagtatgatccagccaaaagaattactctcagagaagccttaaagcatcctttctttgaccttctgaagaaaagtatatagatctgtaattggacagctctctcgaagagatcttacagactgtatcagtctaatttttaaattttaagttattttgtacagctttgtaaattcttaacatttttatattgccatgtttattttgtttgggtaatttggttcattaagtacatagctaaggtaatgaacatctttttcagtaattgtaaagtgatttattcagaataaattttttgtgcttatg

SEQ ID NO: 665 - DNA, 1400 bp, Homo sapiens; identical to SEQ ID NO: 664

SEQ ID NO: 666 - DNA, 1400 bp, Homo sapiens
tggtgatggcctagtgaccctctctggcctktcccatctgcatagtttggttaagcatggacagaggcatagggctgtgtatgatttcccacagttcagcacatyagtgcagccrtggytgagtccagaactactgagacaggatttacatgggtataatgtgaagtcagatatttacagtgttgggatyacarcatgtgaattagccagtgggcaggtgcctttccaggacrtgcatagaactcagatgctgttacagaaactgaaaggtccyccttatagcccattggatatcagtattttccctcaatcagaatccaraatgaaaaattcccrgtcaggtgtagactctgggattggagmaagtgtgcttgtctccagtggaactcacacagtaaatagtgaccgattacacacaccatcctcaaaaacyttctctcctgccttctttagctkggtacagctstgtttgcaacaagatcckgagaaaaggccatcagcaagcagtttattgtcccatgttttcttcaaacagatgaaagaagaaagccaggattcrrtactttcactgttgcctcctgcttataacaagccatcaatatcaytgcctccrgtgttaccttggactgagccagaatgtgrttttcctgatgaaaaagaytcataytgggaattctagggctgccaaatcattttatgtcctatatacttgacactttctccttgctgctttttcttctgtatttctaggtacaaataccagaattatacttgaaaatacagttggtgcactggagaatctattatttaaaaccactctgttcaaaggggcaccagtttgtagtccctctgtttcgcacagagtactatgacaaggaaacatcagaattactaatctagctagtgtcatttattctggaatttttttctaagctgtgactaactctttttatctctcaatataatttttgagccagttaatttttttcagtattttgctgtcccttgggaatgggccctcagaggacagtgcttccaagtacatcttctcccagattctctggcctttttaatgagctattgttaaaccaacaggctagtttatcttacatcagacccttttctggtagagggaaaatgtttgtgctttccctttttcttctgttaatacttatggtaacacctaactgagcctcactcacattaaatgattcacttgaaatatatacagaaattgtaatttgcttttttttaaamaagggggctaaagtaacmctttcctacttatgtaaattatagatcctaaattcacgcaccccgtgggagctcaataaagatttactgaattgaaaaaaaaaaaaaaaaaactcgaggtcgacggtatcgataagcttgatatc

SEQ ID NO: 667 - DNA, 600 bp, Homo sapiens
aatcaggatcaggtgaaaagatcaagaaacgtgtgaaaactccctattctcttaagcggtggcgcccctccacctgggtcatctccactgaatcgctggactgtgaagtcaacaataatggcagtaacagggcagttcattccaaatccagcactgctgtttaccttgcagmagraggcactgctacaaccatggtgtctaaagatataggaatgaactgtctgtgaaatgttttcaagcctatggagtgaaattattttttgcatcatttaaacatgcagaagatgtttammrrdmrrrrwramakgmkwkagcgtcagcggcaagctgtggaggatggggctcagaatgcagacctgggctggccgcatggcctctccctgagccctgatttgtggtagggaagcagtatgggtgcagtcccctcctaggcctccctctggggtcccccggtcctatcccacctcttcagggtgagccagcctcacctctscctagtcctgagggtgagggcaggctgaggcaacgagtgggaggttcaaacaagagtgggctggagccaagggaaaatagagatgatgtaatttctttccggaattc

SEQ ID NO: 668 - DNA, 600 bp, Homo sapiens; identical to SEQ ID NO: 667

SEQ ID NO: 669 - DNA, 600 bp, Homo sapiens
caatgaccagatccagaacgccgccttcatgtacccggccagcccctggagccacatctcagctggagccattgacctcatcaacaacctgctgcaggtgaagatgcgcaaacgctacagcgtggacaaatctctcagccacccctggttacaggagtaccagacgtggctggacctccgagagctggaggggaagatgggagagcgatacatcacgcatgagagtgacgacgygcgctgggagcagtttgcagcagagcatccgctgcctgggtctgggctgcccacggacagggatctcggtggggcctgtccaccacaggaccacgacatgcaggggctggcggagcgcatcagtgttctctgaggtcctgtgccctcgtccagctgctgccctccacagcggttcttcacaggatcccagcaatgaactgttctagggaaagtggcttcctgcccaaactggatgggacacgtggggagtggggtggggggagctatttccaaggcccctccctgtttccccagcaattaaaacggactcatctctggccccatggccttgatctcarmawaaaaaaaaaaaaaaaaaaaaaaaaa

SEQ ID NO: 670 - DNA, 600 bp, Homo sapiens; identical to SEQ ID NO: 669

SEQ ID NO: 671 - DNA, 1400 bp, Homo sapiens
aaatacgagcggattaagttcctggtcatcgccctcaagagctccgtggaggtgtatgcctgggcccccaaaccctaccacaaattcatggccttcaagtcctttgccgacctcccccaccgccctctgctggtcgacctgacagtagaggaggggcagcggctcaaggtcatctatggctccagtgctggcttccatgctgtggatgtcgactcggggaacagctatgacatctacatccctgtgcacatccagagccagatcacgccccatgccatcatcttcctccccaacaccgacggcatggagatgctgctgtgctacgaggacgagggtgtctacgtcaacacgtacgggcgcatcattaaggatgtggtgctgcagtggggggagatgcctacttctgtggcctacatctgctccaaccagataatgggctggggtgagaaagccattgagatccgctctgtggagacgggccacctcgacggggtcttcatgcacaaacgagctcagaggctcrwgwkcskrwgtgagcggaatgacaaggtgttttttgcctcagtccgctctgggggcagcagccaagtttacttcatgactctgaaccgtaacygcatcatgaactggtgacggggccctgggctggggctgtcccacactggacccagctctccccctgcagccaggcttcccgggccgcccctctttcccctccctgggcttttgcttttactggtttgatttcactggagcctgctgggaacgtgacctctgacccctgatgctttcgtgatcacgtgaccatcctcttccccaacatgtcctcttcccaaaactgtgcctgtccccagcttctggggagggacacagcttccccttcccaggaattgagtgggcctagcccctccccccttttctccatttgagaggagagtgcttggggcttgaaccccttaccccactgctgctgactgggcagggccctggacccctttatttgcacgtcaggggagccggctccccccttgaatgtaccagaccctggggggggtcactgggccctagatttttggggggtcaccagccactccaggggcagggaccatttcttcattttctgaaagcactttaatgattccccttcccccaaactccagggaatggaggggggaccccgccagccaaaacattccccccattcccgacccccctctcctcttctagcccatgcccttccccggtggagggagggagcagggagccctcactctccacgccccttgcttgcatctgtatatagtgtgagcagcaagtaacccttctccctccccccccacccctcctcaatgtagtggccttggatatcctgtttgttaataaagacaattcaaccagct

SEQ ID NO: 672 - DNA, 600 bp, Homo sapiens
aagttccagatcctgacagagagaactgggaaggatccaggttcgcttccgttggtagcttgagtcccatgcctccaccctgccatctgaggaaggggtgacaagtggtcaaggagctgtggccacagacttttccagggtggtccttggcaggtgaggtgcgtctgtgccacccttgtcaggagycattgacgacgggccccccctggaccccccgggacctcagagtgggggcaggcagaagggagaaccagctcaagacattttggaggatctggccctggggttcttcagagaacaccctctaggggctttggggacatggcctgtccccacatccagcacttgcctccgccatggtcactcggcagcccttttcccaggagaagacacctctgggagcctgctcagtgcttgtcctgccatcctgtgtcctgggactgagggttactccagttgctctgtgttgcatactctcccccgcaagcctgtgtatgaagaattgtcccctggcttccagcaggccatggctggctgttttgtgactgttacattgtgcaggggtaattattagcgtggcttttacacttaaaaaaaaaa

SEQ ID NO: 673 - DNA, 600 bp, Homo sapiens
acaagactctggacctacaggattggggcatggccctccgacgagctgatatttactctttggctctgctcctgtgggagatactgagccgctgcccagatttgaggcctgacagcagtccaccacccttccaactggcctatgaggcagaactgggcaatacccctacctctgatgagctatgggccttggcagtgcaggagaggaggcgtccctacatcccatccacctggcgctgctttgccacagaccctgatgggctgagggagctcctagaagactgttgggatgcagacccagaagcacggctgacagctgagtgtgtacagcagcgcctggctgccttggcccatcctcaagagagccacccctttccagagagctgtccacgtggctgcccacctctctgcccagaagactgtacttcaattcctgcccctaccatcctcccctgtaggcctcagcggagtgcctgccacttcagcgttcagcaaggcccttgttccaggaatcctcagcctgcctgtaccctttctcctgtgtaaatatgcagtttatgtgtcatcaatgtacatgccaacataaatatggcgattgtat

SEQ ID NO: 674 - DNA, 600 bp, Homo sapiens
caagcaccagcttttcacacaaggagagatgtggggctgggagtcctctccccatcctattgcatctcctttcttattataagctgttccagttcacaggcagcaaacctcctgggtttgaaaaattccaacttatttttatctttaatcctgacattagctgacttgctagtgagcttgctttaaaaatctacactcttgcattcttaggcatacaggggaaatgttgaaaaggaaggtggaaaaccaagaatttagtttgccaatgattgcctctgattcttgtaagtttgagttccacaagggctaatttattccccttttacttgggttttggggtggtggaaagcgggaaatttgggtgatttgttgattggcaatgaggataaaatgttaatacttttttggggacttaacaactttatcctattctacaagtcagtaaaggaacaattggtactcacctcagtgctgcactcaactatggaaagaggcagagtttgcttgcccaattgccaaactaaagacatcagttcattggtcaaatatttgttacctggaatggaacttgaaagcaaatacatttggatttcaaatttc

SEQ ID NO: 675 - DNA, 600 bp, Homo sapiens; identical to SEQ ID NO: 674

SEQ ID NO: 676 - DNA, 600 bp, Homo sapiens
aagtcataaaaagcttattggttttggttttgactcacctgaaagtttttttggtttaaaagaagaataggcggggcacggtggctcrtgcctgtaatcccagcactttgggaggctgaggcaggtggatcacgaggtcaggagatcgacaccatcctggctaacacggtgaarccccgtctctactaaaaaatacaaaaaattagctgggtgtggtggtgggggtgggcgcctgtrgtcccagctacgtgggaggctgaggcagcagactggtgtgaacccgggaggtggagcttgcagtgagccgagrtcgcgccactgcactccagcctgggcgacagagcgagactccatctcaaaaaaaaaaaaaaaaaaaagaaagaaagaaaaataattttgggagtttctggaaaggtactaggatttctcaaaaggatttgtcttctgccttgtgaaagacagatgtcagactaatcaggcttatccgatgtgctacatgagatggaaagcgtgtgaaatagtaagtcacactaagtcttctggaggttctatttacgggtttggttttgatatgaatgttgcagaaactctataaaattc

SEQ ID NO: 677 - DNA, 600 bp, Homo sapiens; identical to SEQ ID NO: 676

SEQ ID NO: 678 - DNA, 1400 bp, Homo sapiens
gattctctggaaagggaagaacatcactcagctgagttaccagagccacatggccctgaagaccagtgaccacaagcctgtcagctcagtgtttgacatcggggtgagggtcgtaaatgacgagctttaccggaagacactggaggaaattgttcgctccctggataagatggaaaatgccaacattccttctgtgtccctgtccaagcgagagttctgttttcaraatgtgaagtacatgcaatacctgmawktwgaatcmtywacaakycatratgrasaagtwymctgtyaktttgaattcatcaacaagcctgatgaagagtcttactgtaagcagtggctgaatgccaacccccagcagaggcttcctcctgccagattctgatgttgagattgacttggagctcttcgtaaataagatgacagctacaaagctcaactcgggtgaagacaaaattgaggacattctggttctgcacttggacaggggaaaggattactttttgtctgtgtctgggaactacctgcccagctgttttgggtctcccattcatacactgtgttacatgagagagccaatcttggacctaccacttgaaaccattagtgagctgactctgatgccagtatggactggagatgatgggagccagttggatagccccatggaaatccccaaagagctctggatgatggttgattacctgtaccgaaatgctgtccagcaggaagatctgtttcagcaaccaggcctgaggtcagaatttgaacatatcagggactgcttggatactggaatgattgataacctctctgccagcaatcattctgtagccgaagccctgctgcttttcctggagagccttccagagcctgtcatctgttacagcacctaccataactgcttggagtgttctggcaactacacagcaagcaaacaggtcatttctactctccccatattccacaaaaatgtcttccactacttgatggcgtttttgcgagaactgctgaaaaattcagcaaaaaatcatttggatgagaatattctagctagcatatttggcagcttattgcttcgaaacccagctggtcaccaaaagcttgatatgacagagaagaagaaggctcaagaatttattcaccagttcctctgcaacccactctgagcctctctctcctcctattttacttgaggctgccaattaccagccccacctgtttcagctcaagagatgccttaagataattatgtgaggccacttggtagcaagaatggcagctatttcctgagcctagtaccccaattaagcccaccattggttagcacactcagcgctgtgagtcgtgaagacacgggagaaaatccaccataataaaactgacattcaattttc

SEQ ID NO: 679 - DNA, 1400 bp, Homo sapiens
cagtccctctctgctgccggtgatgggaggcctttctagacctggctctttctctcccgtctcagtggcttctctgaggtgctgtacacgcgcgttaacctgttcccttctctatccttccccgtggtactgagctcacgtggactcccagtgcgaaggggcccatgggttgggctgcaggcctggccgtgagcgggggctgcctgcacgctcccctagcctactcttgtgtttaggggatggtgggaacatatcccagtgcccttgcctcataatagatgtggtgactctcccggtagaccctagcaagggtcctccatggtggtgagggactcaggagaattgtagggattgggggaccctgcctgcctggcttgagaacagccctgctgcccttttgagccgagattttgaagtggatgcccgtcttgccagaaatgctgttctcaccagaatgccccctccccttgcccttactggacttggccctgcctgatgccaagcaaagacccttccccagaggcctaccccccatatgtcctcagagaggctgagtgtcccctccaggcagtcatgggccctgaggcccctcctgcctggccctgctccccagtggggaggtgactgtgtttcccagagtgtgagccgctctcctccccctaaaaagctgactcactgtgagtgaccttgggcaagttcccaaacctccttgtgcctcagtttccccatctggaaaaaatggggccacctcttgccagcagtagcagggctgcccacgcccctttctccccatgccccatccagcacttgggcgactcatgcctctgcctcagtgggcctgtgggagcctactggagcccagcacttactccccctgagcagcgagcctgcgtctgtctcagctgtccagcgctgagggccagggtcttgtgctgtggggctgggggatgccctcttttctatatttatttcatagaaagtctcctgcgggagcggaaatgcagtccggcctagggctcccagcccttgactgtcctcctgtgagggcctgaagctgggccagggcccgtcgcagcggagccccctctcagcagcccaccgggtccctccaggctgctgcccgtgcgtggtctttctcctccttttcaaagcaatagccgccgggtctgcaaagccctgtcagacagactgggcccttccaaggtcaagccatgtgtctgatgacattcctggtgaagcaaaggagaggaggatgggtcagccctcactgggtgtcacacactgagagaagtcctattgtaaagaaacggaaaaagtcacaaaaaagtttgtataaagacatatttttgtactacatggggactcttcctgcatgtcagcaataaaacttcctgatctgg

SEQ ID NO: 680 - DNA, 1400 bp, Homo sapiens
cagtaaaagaggaagtcttgtacctcaggcaggcccatctagagctattgctccttcccacagcaaaggtattgtggatgacccttagaatccattctctggtcttctgaaataccaagggcagatgtcacctccttcctcagcaggactgactctgggctctacaaccagctccttcacataaagggtttagagactccccttggctcccagtcaccatatccagtgttgtgtaaagagactggccaacaggaccaaccaagcaccttacctctcccatacaagatgaccctctgagcttttcatttattcaagctctgtggtacagcctttttttaaaataaattaatctatattggttgacaaacaagccaccaaccactgactgcaaaactgcctgatgcagttgggttcctcctggttttcttttgttacaaccacccttgcctgtttacattaattgcaaggagcataacgtacaggctgtatgtacaatcctgggcattgactctgtgacatttctagcatatccaaggcaccaccagtgatttctcctgtttcttggtgggggtgggggggaaggtacgtattctgcaatatggctaaaccctttcctgattgagagttaaagcaataggagtcaagttactggtgccacagatctggaggtatgataggtcaggggctaggtgttgaacttagttaatggaagactgagagcagaacaggtttgtcatctccgcaaggccagaaagtgatcacaaaaagaggcagatgatagacactggggtagggtcataccacagggaaatacctttcctgggcttgttttctagcatatcactgacctgggatctttgggtgatcaagggtgtggttagtggaggctctgtgctgcacgtatgcagtatcctatctctttctacatcagatcaaaacactaagttggtgtactgcctcgaccttttttcagctcatcctggaacatatacagagttgagagttttagacaatctctaggtagaggagacaagatgtagacccagacagaagaaatctgcttccctaccatggctattccagcaccccaacctgtaattgccaagtcctctaaggtactaatttgtagctgctctgaagtaaggatttcggattcagctggtagggaaagactctgcacctgctgtcttagggaagaaatggttcaaatccatgtggtgacattgcattagtctccctttcactgttttcttattctgtaattgtttgttatatttcccaaaaacgtcttgatcactaagcaaagctgctagtgggattctatatttcgtgtcatcttttttattataatttattgcaaatttttttctgaataaatatatgttgtgtgaaaaagcaaa

SEQ ID NO: 681 - DNA, 1400 bp, Homo sapiens; identical to SEQ ID NO: 680

SEQ ID NO: 682 - DNA, 1400 bp, Homo sapiens
gactattggtggggaggtgtaaataagtcataccttcttaaaacagaaaatttaagtaaagtcttttaaatgaaacctgtaaaagtattgactcttctaccaagttggtatgatattccaggcagctcaatgattatcacatttgagaccctgtgtttgaagcatttacaggcaatgtacagcaacagaggtacctcttggtgtatagtatttacattctcttttaggtagaagaggcaattttacccttatttcacatggttagaaatttaaagcaagatcatttacccaaggataggtgtttggtaatgttgaaggagttagtctggcttcatgttttacatcttcaactaaaatcccatactatctgcttggatttggagagccaaaaaataaagctgattgtcatgtgattaaatatctgatcaacaggtatgaatataacttaaatcagcatatttttgccatggtaataaattgtcctataaactatttatatatttttgttcttcataattatcactaataagcatcagtttgttgtttttaaaaggatatttaagtgagcattttctagttcatatgaaaataaccatagtacaggatgatttctgtccacacaaaggttaaattagattgcacagttaattttcacttatatttatggtactattatgtgggtgatgcctttttcttttaagcccagtacatatattatgcctgcctaagttctgaactggggctgtatttcagtagttgtagaattattgatatttagttttgatagctaatgtttaattgtttggatctgcacagtttggtttttgcacaaaagtcatttaaaaaaatctgagtaattgtcaaatattaaaagaaagatattcttcctgtaaggaatacagtttttagtcaaagtggccattacatcctctttttaatttacataatacagatacttgagaaagttgttgtggtgttgtatgccaagaaaattctttttattggtgcctatattgtaacaattatttttaatgcattgtattttgaagtaacggttcagttaaatttttcacctgctgtgtaactgaaacacaattacagtttataatcatctgtagaagtctggagataattttgcaactcatgttatgggttaaatgaatatttttgtaaaagtaaaagcaacaaatttataaattgattatttgaaactttacaacacaattgcatcccaaatacaaattgtattgcttattcattatagctattcgtcctgtaatctgtttctaggtgaagcatactccagtgttttaggggttttgaaaataaatatttaaatttcacagtcaaaaaaaaaaaaaaaaaaaaaaaaaaaaaaaaaaaaaaaaaaaaaaaaaaaa

SEQ ID NO: 683 - DNA, 1400 bp, Homo sapiens
atggaacgatcctgcgtggggcccygttgtggcttacctaaatgttaaccaagcagaggtgacatggtgccatcaggaggcggctgctgctgaccggagtgtcccctccaggtgaagctggctcaggtgcacatgcccgctccatcatcgatctaggcacctgctgtctgaagggaccgtgggtcagaatcatttcgttgtgctcctaatgggtcgctgaggctggtctctcagtgatgaagccccaggcgtggaagcatccactctctcctgaggcgagccaccttgggttgctggagctcaccagtcttgagggaggtgcaggggaaactgtgttttttatcttcatacatgacggtgggcagagaggcctgtcttaaagtttccatggaattgttttataaaatatcttaagagatgaataccttatcagctgttgcttgaaacctgttaaaaatgttcataacattggatagtctagtctctaaatgatgrctaagtagtggggttggctttgaaaacaatgttttatgcaacaaggaacgaatggtagcagccagctttgcggggcgtatgtgtggccagctcttaaccattccagtctattacttgggtgagtccttgtggacaaccacacacacgtgcccacatggtactagctgccgttcgtttctcgttgcctaagatgttttggcaactctagagccacaggcctaagagtcattaaaaaattctccctttgtaacctcagtgctggggactgaggcgagccccctcaggtcgctggagtgcaccagtcttggggaagaggtgcaggagaagctgtgttttttatctccacacgcagtatgaagataaaattacatagtattacctagacatagacagtattacctaggtagatgcactgctcacctgcrcccttcccagctctcatttttgttaggtgatttgggatagggatagtgttttggggtatggggggagtgtttctgacctgctttgcagacgtgcctccgcacctcagcagtttggggtgtggccccagggcggttcttggatgtaaaagatgtggccatctagcctcgtaacttcactgtcacctgtgtcccatagggtgccttctgaatactgttattagaataagtttgttgcagaacgtgaccctgcgtgcaaacatgtaccgtggcctggtatatgatagagattgatattaatgtaccatgtatgttaatgtgaatctgtgggcaggatacttttccatggcaggaaatatccaagctgttgaaactggctatgttttaatatgcctcattgtgcctttactgttgtgtggactgcgtgagggacaagaagttccatttgatgtcaataaagcaaagtacttgccyacttttttg

SEQ ID NO: 684 - DNA, 600 bp, Homo sapiens
ccgcgaactgggttctttggaagcagccccctgtggcggccttccgggtctcgcagcctgaagcctggattccagcagtgaatgctagacagaaaccaagccattaatgagatgttattactgttttgggcctccatgccccagctctggatgaaggcaaaaactgtactgtgtttcgcattaagcacacacatctggccctgacttctggagatggatccttccatcttgtggggccaggaccatggccgaagccccttggagagagaggctgcctcagccagtggcacaggagactccaaggagctactgacattcctaagagtggaggaggaggaggagccttgctgggccagggaaacaaagtttacattgtcctgtagctttaaaaccacagctgggcagggtgagaagctagatgcccctgcagtttggccctggagccagggcagaggaatgtagggcctgcatggagaagggttctgccctgcctgaggaggaggacacagcacaagggcacattgcccatggctgggaacatgacccagcctgaaagatacaggggatcatgttaaaaatagcagtattatttttcgtctc

SEQ ID NO: 685 - DNA, 600 bp, Homo sapiens; identical to SEQ ID NO: 684

SEQ ID NO: 686 - DNA, 1400 bp, Homo sapiens
ctcttgaacctgctggaaatgrtrctgtatgcaggactgcctgagctaagtggrattcaagacctgaaatatgtgtataataatcttcgtccacaagacacagacctggaagcaacaagtcattttaccaagaaaataaaggaaagtctggagtgtttccctgttaaattgaataacttgatccacacacttgcacaaatgtcagccataagccctgccaaatctacttcacagacttttcctcaggaatcctgtttgctgagtacaactaggtcgattgaaagagcaacaattttagggttcagcaagaaatccagtaatctgtatctgatccaggtgacacacagcaacaacgaaacaagcctgacagaaaaatcatttgagcagttttcaaaacytcacagccaacttcagaagcagtttgcatcactgactctcccagagkwtcctcattggtggcacctaccttttacaaattcagatcacagaagattcagagatctaaatcattacatggaacakatattaaatgtatcacatgaagytacaaacagtgattgtgtacttagctttttcctctctgaggctgkgcaacaaacagttgaagaatcatcacctgtgtacctaggtgagaagtttccagacaagaagcctaaggtgcagttagtcatatcctacgaggatgtgaagctgaccatactagtgaaacacatgaaaaacattcatctcccagatggctctgcgcccagtgcacatgttgaattttatcttttaccatatcccagtgaagttcgtaggaggaaaacaaaatctgttccaaaatgtacggaccccacttacaatgaaattgtagtatatgatgaagtcacagagctccaaggacatgtcttaatgcttattgtgaagagtaaaactgtatttgtgggagcaattaacatccgactctgtagtgtcccactcgataaagaaaaatggtatccattaggaaacagtataatttgaccattgctatgaacatatgcattattcattaactacttgtatttttttcacttcygggcctctgaatcacataagtaaggcatctttgttgtcaaagacagcacagggtattaaggacacagaaaaaaaatcagaattagtcttttgtgttgtttattttctacctgtgctttcattgttttttcataatcttttctccttcagtggagtactgattgcatgaaatttgatgtgtaaaataataaaagacctttattaaatcattttaatatattttaaattaaacataggtttacatttgttttaattgtgtgcctacagttaaaagcagtatttttaatgtattttataagaaagacaatcaaataaacctcatcaattaattcaaaaaaaaaaaa

SEQ ID NO: 687 - DNA, 1400 bp, Homo sapiens
  misc_feature (1398)..(1398): n is a, c, g, or t
aaaggagggtcatggattcaagaaataaatgttgctgaaaaaaattggtacccccgacagaaaatatgttacgctaagagaaagttagcaggtgccaatccagcagtcattacttgtgatgagctactcctgggtcatgagaaggcccctgccttcaragactatgtggctgtggcacgaggaagcaaagatcacaacattcgtgcccaagaaccagagagtgggctttcagaagagactcaagtgaagtgcctgatggaccaggcaacagaccccaacatccttggcagaacctgggaaggatgggagccctggatgtgaggtctgtgggagtctgcagatagaaagcattacattgtttaaagaatctactatactttggttggcagcattccatgagctgattttcctgaaacactaaagagaaatgtcttttgtgctacagtttcgtagcatgagtttaaatcaagattatgatgagtaaatgtgtatgggttaaatcaaagataaggttatagtaacatcaaagattaggtgaggtttatagaaagatagatatccaggcttaccaaagtattaagtcaagaatataatatgtgatcagctttcaaagcatttacaagtgctgcaagttagtgaaacagctgtctccgtaaatggaggaaatgtggggaagccttggaatgcccttctggttctggcacattggaaagcacactcagaaggcttcatcaccaagattttgggagagtaaagctaagtatagttgatgtaacattgtagaagcagcataggaacaataagaacaataggtaaagctataattatggcttatatttagaaatgactgcatttgatattttaggatatttttctaggttttttcctttcattttattctcttctagttttgacattttatgatagatttgctctctagaaggaaacgtctttatttaggagggcaaaaattttggtcatagcattcacttttgctattccaatctacaactggaagatacataaaagtgctttgcattgaatttgggataacttcaaaaatcccatggttgttgttagggatagtactaagcatttcagttccaggagaataaaagaaattcctatttgaaatgaattcctcatttggaggaaaaaaagcatgcattctagcacaacaagatgaaattatggaatacaaaagtggctccttcccatgtgcagtccctgtccccccccgccagtcctccacacccaaactgtttctgattggcttttagctttttgttgtttttttttttccttctaacacttgtatttggaggctcttctgtgattttgagaagtatactcttgagtgtttaataaagtttttttccaaaaaaaaaaaaaaaaaantt

SEQ ID NO: 688 - DNA, 1400 bp, Homo sapiens
gcctatccctcctacctgtacataatccacaagcaagcacctccactggaagacattgcagatgactgcagtccagggatgagagagctgatagaagcttccctggagagaaaccccaatcaccgcccaagagccgcagacctactaaaacatgaggccctgaacccgcccagagaggatcagccacgctgtmmgagtctggactctgccctcttggagcgcaagaggctgctgagtaggaaggagctggaacttcctgagaacattgctgattcttcgtgcacaggaagcaccgaggaatctgagatgctcaagaggcaacgctctctctacatcgacctcggcgctctggctggctacttcaatcttgttcggggaccaccaacgcttgaatatggctgaaggatgccatgtttgcctctaaattaagacagcattgatctcctggaggctggttctgctgcctctacacaggggccckktacagtgaatggtgccattttcgaaggagcagtgtgacctcctgtgacccrtgaatgtgcctccaagcggccctgtgtgtttgacatgtgaagctatttgatatgcaccaggtctcaaggttctcatttctcaggtgacgtgattctaaggcaggaatttgagagttcacagaaggatcgtgtctgctgactgtttcattcactgtgcactttgctcaaaattttaaaaataccaatcacaaggataatagagtagcctaaaattactattcttggttcttatttaagtatggaatattcattttactcagaatagcctgttttgtgtatattggtgtatattatataactctttgagcctttattggtaaattctggtatacattgaattcattataatttgggtgactagaacaacttgaagattgtagcaataagctggactagtgtcctaaaaatggctaactgatgaattagaagccatctgacagmmggccactagtgacagtttcttttgtgttcctatggaaacattttatactgtacatgctatgctgaagacattcaaaacgtgatgttttgaatgtggataaaactgtgtaaaccacataatttttgtacatcccaaaggatgagratgtgacctttaagaaaaatgaaaacttttgtaaattattgatgattttgtaattcttatgactaaattttcttttaagcatttgtatattaaaatagcatactgtgtatgttttatatcaaatgccttcatgaatctttcatacatatatatatttgtaacattgtaaagtatgtgagtagtcttatgtaaagtatgtttttacattatgcaaataaaacccaatacttttgtccaatgtggttggtcaaatcaactgaataaattcagtattttgcctt

SEQ ID NO: 689 - DNA, 1400 bp, Homo sapiens
actagcattttcttgaaccaataatgtattaaaattttttgatgtcagccttgcatcaagggctttatcaaaaagtacaataataaatcctcaggtagtactgggaatggaaggctttgccatgggcctgctgcgtcagaccagtactgggaaggaggacggttgtaagcagttgttatttagtgatattgtgggtaacgtgagaagatagaacaatgctataatatataatgaacacgtgggtatttaataagaaacatgatgtgagattactttgtcccgcttattctcctccctgttatctgctagatctagttctcaatcactgctcccccgtgtgtattagaatgcatgtaaggtcttcttgtgtcctgatgaaaaatatgtgcttgaaatgagaaactttgatctctgcttactaatgtgccccatgtccaagtccaacctgcctgtgcatgacctgatcattacatggctgtggttcctaagcctgttgctgaagtcattgtcgctcagcaatagggtgcagttttccaggaataggcatttgcctaattcctggcatgacactctagtgacttcctggtgaggcccagcctgtcctggtacagcagggtcttgctgtaactcagacattccaagggtatgggaagccatattcacacctcacgctctggacatgatttagggaagcagggacaccccccgccccccacctttgggatcagcctccgccattccaagtcaacactcttcttgagcagaccgtgatttggaagagaggcacctgctggaaaccacacttcttgaaacagcctgggtgacggtcctttaggcagcctgccgccgtctctgtcccggttcaccttgccgagagaggcgcgtctgccccaccctcaaaccctgtggggcctgatggtgctcacgactcttcctgcaaagggaactgaagacctccacattaagtggctttttaacatgaaaaacacggcagctgtagctcccgagctactctcttgccagcattttcacattttgcctttctcgtggtagaagccagtacagagaaattctgtggtgggaacattcgaggtgtcaccctgcagagctatggtgaggtgtggataaggcttaggtgccaggctgtaagcattctgagctgggcttgttgtttttaagtcctgtatatgtatgtagtagtttgggtgtgtatatatagtagcatttcaaaatggacgtactggtttaacctcctatccttggagagcagctggctctccaccttgttacacattatgttagagaggtagcgagctgctctgctatatgccttaagccaatatttactcatcaggtcattattttttacaatggccatggaataaaccatttttacaaaa

SEQ ID NO: 690 - DNA, 600 bp, Homo sapiens
cttaaatgaactactgctattttttttaaatsaaaaacttttcatttcagattttaaaaagggtaacttgtttttattgcatttgctgttgtttctataaatgactattgtaatgccaayatgacacagcttgtgaatgtktagtgtgctgctgttctgtgtacataaagtcatcaaagtggggtacagtaaagaggcttccaagcattactttaacctccctcaacaaggtatacctcagttccacggttgytaaattataaaattgaaaacactaacaraatttgaataaatcrrtccatgttttrtaacaaggttaattacaaattcactgtgttatttaagaaaaaatggtaagctatgcttagtgccaatagtaagtggctatttgtaaagcagtgttttagcttttcttctactggcttgtaatttagggaaaacaagtgctgtctttgaaatggaaaagaatatggtgtcaccctaccccccatacttatatcaaggtcccaaaatattcttttccatttcaaagacagcactttgaaaaccctaaatwacaagccagtagaagaaaagctaaaacacgctttacaaatagcc

SEQ ID NO: 691 - DNA, 600 bp, Homo sapiens; identical to SEQ ID NO: 690

SEQ ID NO: 692 - DNA, 1400 bp, Homo sapiens
tccatgatgctaccagagtctacctaattctggaatatgcaccacttggaacagtttatagagaacttcagaaactttcaaagtttgatgagcagagaactgctacttatataacagaattggcaaatgccctgtcttactgtcattcgaagagagttattcatagagacattaagccagagaacttacttcttggatcagctggagagcttaaaattgcagattttgggtggtcagtacatgctccatcttccaggaggaccactctctgtggcaccctggactacctgccccctgaaatgattgaaggtcggatgcatgatgagaaggtggatctctggagccttggagttctttgctatgaatttttagttgggaagcctccttttgaggcaaacacataccaagagacctacaaaagaatatcacgggttgaattcacattccctgactttgtaacagagggagccagggacctcatttcaagactgttgaagcataatcccagccagaggccaatgctcagagaagtacttgaacacccctggatcacagcaaattcatcaaaaccatcaaattgccaaaacaaagaatcagctagcaaacagtcttaggaatcgtgcagggggagaaatccttgagccagggctgccatataacctgacaggaacatgctactgaagtttattttaccattgactgctgccctcaatctagaacgctacacaagaaatatttgttttactcagcaggtgtgccttaacctccctattcagaaagctccacatcaataaacatgacactctgaagtgaaagtagccacgagaattgtgctacttatactggttcataatctggaggcaaggttcgactgcagccgcsccgtcagcctgtgctaggcatggtgtcttcacaggaggcaaatccagagcctggctgtggggaaagtgaccactctgccctgaccccgatcagttaaggagctgtgcaataaccttcctagtacctgagtgagtgtgtaacttattgggttggcgaagcctggtaaagctgttggaatgagtatgtgattctttttaagtatgaaaataaagatatatgtacagacttgtattttttctctggtggcattcctttaggaatgctgtgtgtctgtccggcaccccggtaggcctgattgggtttctagtcctccttaaccacttatctcccatatgagagtgtgaaaaataggaacacgtgctctacctccatttagggatttgcttgggatacagaagaggccatgtgtctcagagctgttaagggcttatttttttaaaacattggagtcatagcatgtgtgtaaactttaaatatgcaaataaataagtatctatgtcaaaaaaaaaaaaaaaaaa

SEQ ID NO: 693 - DNA, 1400 bp, Homo sapiens
gggacaccaaacgcgccacgcccatcgaggtgctctgcgagaacttcccagaggagatggccacgtacctgcgctatgtgcggcgcctggacttcttcgagaagcccgactatgactacctgcggaagctcttcaccgacctcttcgaccgcagtggcttcgtgttcgactatgagtacgactgggccgggaagcccctgccgacccccatcggcaccgtccacaccgacctgccctcccagcctcagctccgggacaaaacccagccgcacagcaaaaaccagccccctgaatcttctccgtgcagccccttggggcgcgaccttgtgcgaggccctcggggcccacccacagcggcccagggccagaccctggctggaagccagaacgcagactgcaggggccgcgcctggctcaggcggccccacccccgggacgtggggtcacttccttcatgtaagactttggccgaaatttctacacctgtgtctagtcctcccctccaagagcattaactatttaaaacaaggaaaagaggaaaaaaaaaacagaggcccgccctaccccactcctgcccctccgtttctttgctgaagtgagtagtgtgatcctggaggccccccggcctggccccgccccgccagccgcccccgttagcgtcataaagtccagcttgtctccctcgatccaaaggccgttttctcgaggggagggcaggcccggcctggaggggtgctgtggagctgtcttgcccaggccctcctgggagggggacaggcattgttgccaggggtgaggccgtgccccaggcctccccgaaaccaaaggggaaggcaggggtggggccgtggctgaagccggctccccaaccaaaatgctgcaccaaagctcgggcgccgcgggcacggctgctgcagtctcttcccagcctggccctggcaaggggcgggtgggcgctgccaggcgggtgcttctcgacgcacttgctcccggaggctgcgccccggcgcctggaacccgaggtgggaggaccggttggtgtcaccctgctcggccctcagccctgccgcgtggggcgcgtgggcacggagcttcctgcctctctgctccgacacccggcaagcagccggagacaaaacgccttaaagcccccggcccagccctgcaggtatattgcaggggcctgggggcggccctggactggcgggcggttccccagtggggtgccctggaggctgccgggcagagtggagcagcttggggccgtgcccagggcggtggctgtgagtctagtttttgctttaccaagtgtacagaaatggcatttacgtttctctgatgctcccttgaagccatagaatttaggggcttttttaaaaaaataaaagaaaaatgaaacc

SEQ ID NO: 694 - DNA, 600 bp, Homo sapiens
ggcctctgagtaagactcgtgcctccccctgctgccctgggctcaggctgctaccctctggggcccaaagctgtcccttctcagtgcttgtcagcgctgggtctggggcctctgtatgccctaggcctgtgccaaagtggccagagattgggctgcctgtgatacccatcagcccactgccccggccggcccagataggtctgcctctgccttccagctcccacagcctggtccctgatactgggctctgtcctgcagacacctctttcagaaacgcccaagcccagcccctaggagggggtggggcatccctggtcaaccctcaaacattccggactcccctcataacaatagacacatgtgcccagcaataatccgccccttcctgtgtgcgcctgtggggtgcgtgctctctgtgtgtacctgtgtgggtgaaggggatagggcgaggctgtgcctgtgccccaggtcccagccctggcccttcccagactgtgatggccatcctggtcccagtgttagggtagcatgggattacagggccctgttttttccatatttaaagccaatttttattactcgttttgtccaacgtaaaag

SEQ ID NO: 695 - DNA, 600 bp, Homo sapiens
gggccctgaaagttcatatggtgggtatgtcccgcagcagagtgaggagatgaagcttacgtgtcctgacgttttgttgcttatactgtgatatctcatcctagctaagctctataatgcccaagaccccaaacagtacttttactttgtttgtacaaaaacaaagacatatagccaatacaaatcaaatgccggaggtgtttgatgccatatttgcaaattgccatctattgaaattctcgtcacactacatagacataattgttatctccttttggcttatgtgattttctgtttacaagtagaatagccaattatttaaatgtttagttgccacagtgaaccaggagtcactgagccaatgactttaccagctgctgactaatcttcatcaccactgtagattttgctgcatgtgcaggtcctctatttttaattgctgttttcgttgctgcagtactttacaaacttctagttcgttgagacttagtgaccatttggcatcaagttaacatcacacaataggaaacaccacttccacaagtctcaagcctcagtgctaaagtactactgaaaaggaactaggaagtttggccaatt

SEQ ID NO: 696 - DNA, 600 bp, Homo sapiens
ccccctggagctgcaggaggagctgaccccccaacccagccagaccctaaggattcctgtagctgcctcactgcggctgaggtccatcctgctggacgctatgtcctctgcccttccacaacccctagccccgctcagcctgctgataggggctccccagcagccccagggcaggaggatggtgcctgagacaaccctccacctggtactccctctcaggatccaagctaagcactgccactggggraaactccaccttcccactttcccaccccacgccttatccccacttgcagccctgtcttcctacctatcccacctccatcccagacaggtccctssccttctctgtgcagtagcatcaccttgaaagcagtagcatcaccatctgtaaaaggaaggggttggattgcaatatctgaagccctcccaggtgttaacattccaagactctagagtccaaggtttaaagagtctagattcaaaggttctaggtttcaaagatgctgtgagtctttggttctaaggacctgaaattccaaagtctctaattctattaaagtgctaaggttctaarrmmwaaaaaaaaaaaaaaaaaaa

SEQ ID NO: 697 - DNA, 600 bp, Homo sapiens; identical to SEQ ID NO: 696

SEQ ID NO: 698 - DNA, 600 bp, Homo sapiens
tttggattactatttttcttaatggctatttaatccttccatcccacgaaaaacagctgctgagtccaagggagcagcagagcgtggtccggcagggcctgttgtggccctcgccacccccctcaccggaccgactgacctgtctttggaaccagaacatcccaagggaactccttcgcactggcgttgagtgggaccccgggatccaggctggcccagggcggcaccctcagggctgtgcccgctggagtgctaggtggaggcagcacagacgccacggtggcccaagagcccctttgcttcttgctgggggaccagggctgtggtgctggcccactttccctcggccaggaatccaggtccttggggcccaggggtcttgtcttgtttcatttttagcacttctcaccagagagatgacagcacaagagttgcttctgggatagaaatgtttaggagtaagaacaaagctgggatacggtgattgctagttgtgactgaagattcaacacagaaaagaaagtttatacggcttttttgctggtcagcagtttgtcccactgctttctctagtctctatcccatagcgtgttcccttta

SEQ ID NO: 699 - DNA, 1400 bp, Homo sapiens
agaaactgcaccggaaatgtgcctaccagattctggtacaggtcaaagaggtcctctccaagctgagcacgctcgtggaaaccacactcaaagagacagagaagattacagtatgtggggacacccatggccagttctatgacctcctcaacatattcgagctcaacggtttaccctcggagaccaacccctatatatttaatggtgactttgtggaccgaggctccttctctgtagaagtgatcctcacccttttcggcttcaagctcctgtacccagatcactttcacctccttcgaggcaaccacgaracmgasawcatgrwycagwtstackgtytcgwggktgaggtgaaggccaagtacacagcccagatgtacgagctctttagcgaggtgttcgagtggctcccgttggcccagtgcwtcaacggcawwgtgctgatcatgcacggagscctgttcagtgaagacggtgtcaccctggatgacatccggaaaattgagcggaatcgacaacccccagattcagggcccatgtgtgacctgctctggtcagatccacagscacagaacggscgctcgatcagcaagcgggscgtgagctgtcagtttgggcctgacgtcaccaaggccttcttggaagagaacaacctggactatatcatccgcagccacgaagtcaaggccgagggctacgaggtggctcacggaggccgctgtgtcaccgtcttctctgcccccaactactgcgaccagatggggaacaaagcctcctacatccacctccagggctctgacctacggcctcagttccaccagttcacagcagtgcctcatcccaacgtcaagcccatggcctatgccaacacgctgctgcagctaggaatgatgtgaggtgacgggcggggcggcctgcatcccagggcccctccaatcccaccggacccaggccctgggctaggggcagagcaggccccgccccagggcaatgttggacccccttttactttgtaaagtttgtatttattcccctttaggtttgcagagggggtaggggcagagtcaggggctggccagagggtctgctccctggacagagaggaaggaggtggagcagctggggctgggggcacagcctgggcattctgtggggaggccgtcctcggggtggggtggggccgagtggctgccctgcccccctcatttgcatggctcctcccccactcaagcaatagggccccgccataggaagacccccagagagagggtcagcaggggggccccgcctgcgcctcccctcctatagccccatggtggggctaggctggggctcacccccctccccagctattttatgtctgtaattaaatatgttaaaataaagtcattatcggaagt

SEQ ID NO: 700 - DNA, 1400 bp, Homo sapiens; identical to SEQ ID NO: 699

SEQ ID NO: 701 - DNA, 1400 bp, Homo sapiens
ctgatggccaaaacatggcagaagatgaatttgtttactggccaaataaagatgagcctataaattgtgagagctttaaggtcactcttatggctgaagaacacaaatgtctatctaatgaggaaaaacttataattcaggactttatcttagaagctacacaggatgattatgtacttgaagtgaggcactttcagtgtcctaaatggccaaatccagatagycccattwkkaaaayttttgaamtyaywrgtgttmtaaawkargamgmtsccaatrgggatgggcctatgattgttcatgatgagcatggaggagtgwcggcaggaactttctgtgctctgacaacccttatgcaccaactagaaaaagaaaattccgtggatgtttaccaggtagccaagatgatcaatctgatgaggccaggagtctttgctgacattgagcagtatcagtttctctacaaagtgatcctcagccttgtgagcacaaggcaggaagagaatccatccacctctctggacagtaatggtgcagcattgcctgatggaaatatagctgagagcttagagtctttagtttaacacagaaaggggtgggggaactcacatctgagcattgttttcctcttcctaaaattaggcaggaaaatcagtctagttctgttatctgttgatttcccatcacctgacagtaactttcatgacataggattctgccgccaaatttatatcattaacaatgtgtgcctttttgcaagacttgtaatttacttattatgtttgaactaaaatgattgaattttacagtatttctaagaatggaattgtggtatttttttctgtattgattttaacagaaaatttcaatttatagaggttaggaattccaaactacagaaaatgtttgkttttagtgtcaaatttttagctgtatttgtagcaattatcaggtttgctagaaatataacttttaatacagtagcctgtaaataaaacactcttccatatgatattcaacattttacaactgcagtattcacctaaagtagaaataatctgttacttattgtaaatactgccctagtgtctccatggaccaaatttatatttataattgtagatttttatattttactactgagtcaagttttctagttctgtgtaattgtttagtttaatgacgtagttcattagctggtcttactctaccagttttctgacattgtattgtgttacctaagtcattaactttgtttcagcatgtaattttaacttttgtggaaaatagaaataccttcattttgaaagaagtttttatgagaataacaccttaccaaacattgttcaaatggtttttatccaaggaattgcaaaaataaatataaatattgccattaa

SEQ ID NO: 702 - DNA, 600 bp, Homo sapiens
agaagtcttctcaagctgacttcctacctccccctccatctctagataagtgtcatatatttgttgagggcaaaagactatggactggaaggcagaaagtgggatcctggccccactctgcctttcctattgagcaaccagctctgggctcagtttcctcacctggagggttggacccactcacctccactctagccccgaaccctcctgccccaggcttccaggccccatcaggcctgccctgagttggccttgtccactccttgaggcagatcctggcactacctcacagctccctggggacggccactccctggctgagggccctcccctcccctctgcctgtccggaacgggaggctgaaatggaaaagctgccttggccctgcttggctgagtcacaaggggcagtgggctcttgggtgctgttccaccctgaccctggctcacccctcttcctaggcctgggggcaggcagttcctaccatgtacccctctcaggctgcctgcctgacaaggtcagcatcatttgctctcctgaatttatgaggtttatttatttttctctttcctactcctattaaagaacctcgtcccagtg

SEQ ID NO: 703 - DNA, 600 bp, Homo sapiens
tccacctctccactcctgtgtctacctggccagtggagtggtccatgctaagtctaacactcctgggagctcaggaggcttctgagcttctcctgtactgtgcatcgtgagggccagagacaggaatgtaaggattggcaactgtgttacctttcaagtttatctcaataaccaggtcatcagggacccattgttctcttcagaaccctatctgggagagaaggcgaaccacctccgggtttccatcatgtcaaggtcacaggcatccatgtgtgcaaaccatctgccccagctgcctccacagactgctgtctccttgtcctcctcggccctgccccacttcagggctgctgtgagatggaattccaggaaagaacttcaggtgtctggaccctttctatctagataatatttttagattcttctgctccctagtgacctacctgggggcaaagaaattgcaaggacttttttttaagggtcagagttttcaaaacaaaagcatcttccctagaaatttttgtgaattgtttgcacttgtgcctgttttaaattaaattgagtgttcaaagccaaaaaaaaaaaaaaaaaaaaaaaaaa

SEQ ID NO: 704 - DNA, 600 bp, Homo sapiens; identical to SEQ ID NO: 703

SEQ ID NO: 705 - DNA, 1400 bp, Homo sapiens
tggtgcctttggggaggtgtatgagggactggtaattggccttcctggggactccagtcccctgcaggtagctatcaagaccctgccagaactctgctcgcctcaggatgagctggatttcctcatggaggccctcatcatcagcaagtttcgccatcagaacattgtgcggtgtgtggggctcagcctcagggccacccctcgcctcattctgctggaactgatgtctggaggggacatgaagagtttcctgaggcacagtcggccacacctgggccagccatcacctctggtcatgcgggacctgctgcaactggcccaggacatagcccagggctgccactacctggaggaaaatcacttcatccacagggatattgccgcccggaactgcctgctgagctgcgctggacccagccgagtggccaagattggggactttgggatggcacgagatatctaccgggccagttattaccgcaggggggaccgggccttgctcccagtcaagtggatgcccccagaggccttcctggagggcatcttcacatccaagacagattcctggtcttttggggtgctgctctgggagatcttctcactgggctacatgccctatcctgggcgcaccaaccaggaggtgctggacttcgtcgttggaggaggccggatggaccctcctaggggctgcccagggcctgtgtaccgcatcatgacccagtgttggcagcacgagcctgagctccgccctagctttgccagcatcttggagcgtctgcagtactgcactcaggacccggatgtgctgaattcactcctgccaatggagctggggcccaccccagaggaggaagggacttctgggctggggaacagatctttggagtgcctaagacccccacagccccaggaactgagtccagagaagttgaaaagctggggaggtagccctcttggcccctggctgtcctctggcctcaagcccctcaaatccaggggcctccaacctcagaacctttggaatcccacttatcgctcctgagccccaaggggccctgagggtaaggactgaggcactgagggtccctccctatactcctcaggctcctgggtggcctgttatgccagcggcctctgttccctgcagtctgtgctgtgtgtctgggcctgtctcggggctggcctggcagcgctgcacttgccatgctggaaaccagcccaggcctcccagggaagggcccagccacttccagcttttgatcttggggccagaggccgccttacacacaccccaggtgtccatggggagcactggattgctctcccattatgagcatccttcatctgggcagaccccccaccctgcagatgcttctaataaaaagctcttctcatcctcc

SEQ ID NO: 706 - DNA, 1400 bp, Homo sapiens
tttacttgtctgcgaatggaactggagaacatcttgggccagctgtctgtgctatctgccagccaggaccccttatacatcaacatcgagagagctgaggagcccactgygggaggcagcctggagctacctggcagggatcagccctacagtggggctggggatggcagtggcatgggggcagtgggtggcactcccagtgactgtcggtacatactcacccccggagggctggctgagcagccagggcaggcagagcaccagccagagagtcccctcaatgagacacagaggcttttgctgctgcagcaagggctactgccacacagtagctgttagcccacaggcagagggcatcggggccatttggccggctctggtggccactgagctggctgactaagccccgtctgaccccagcccagacagcaaggtgtggaggctcctgtggtagtcctcccaagctgtgctgggaagcccggactgaccaaatcacccaatcccagttcttcctgcaaccactctgtggccagcctggcatcagtttaggccttggcttgatggaagtgggccagtcctggttgtctgaacccaggcagctggcaggagtggggtggttatgtttccatggttaccatgggtgtggatggcagtgtggggagggcaggtccagctctgtgggccctaccctcctgctgagctgcccctgctgcttaagtgcatgcattgagctgcctccagcctggtggcccagctattaccacacttggggtttaaatatccaggtgtgcccctccaagtcasaaagagatgtccttgtaatattcccttttaggtgagggttggtaaggggttggtatctcaggtctgaatcttcaccatctttctgattccgcaccctgcctacgccaggagaagttgaggggagcatgcttccctgcagctgaccgggtcacacaaaggcatgctggagtacccagcctatcaggtgcccctcttccaaaggcagcgtgccgagccagcaagaggaaggggtgctgtgaggcttgcccaggagcaagtgaggccggagaggagttcaggaacccttctccatacccacaatctgagcacgctaccaaatctcaaaatatcctaagactaacaaasgcagctgtgtctgagcccaacccttctaaacggtgacctttagtgccaacttcccctctaactggacagcctcttctgtcccaagtctccagagagaaatcaggcctgatgagggggaattcctggaacctggaccccagccttggtgggggagcctctggaatgcatggggcgggtcctagctgttagggacatttccaagctgttagttgctgtttaaaatagaaataaaattgaagactaaagaccta

SEQ ID NO: 707 - DNA, 1400 bp, Homo sapiens
cttcaagaattaaaacctttggatcagtgtctaattgggcaaactaaggaaaacagaaggaagaacagatataaaaatatacttccctatgatgctacaagagtgcctcttggagatgaaggtggctatatcaatgccagcttcattaagataccagttgggaaagaagagttcgtttacattgcctgccaaggaccactgcctacaactgttggagacttctggcagatgatttgggagcaaaaatccacagtgatagccatgatgactcaagaagtagaaggagaaaaaatcaaatgccagcgctattggcccaacatcctaggcaaaacaacaatggtcagcaacagacttcgactggctcttgtgagaatgcagcagctgaagggctttgtggtgagggcaatgacccttgaagatattcagaccagagaggtgcgccatatttctcatctgaatttcactgcctggccagaccatgatacaccttctcaaccagatgatctgcttacttttatctcctacatgagacacatccacagatcaggcccaatcattacgcactgcagtgctggcattggacgttcagggaccctgatttgcatagatgtggttctgggattaatcagtcaggatcttgattttgacatctctgatttggtgcgctgcatgagactacaaagacacggaatggttcagacagaggatcaatatattttctgctatcaagtcatcctttatgtcctgacacgtcttcaagcagaagaagagcaaaaacagcagcctcagcttctgaagtgacatgaaaagagcctctggatgcatttccatttctctccttaacctccagcagactcctgctctctatccaaaataaagatcacagagcagcaagttcatacaacatgcatgttctcctctatcttagaggggtattcttcttgaaaataaaaaatattgaaatgctgtatttttacagctactttaacctatgataattatttacaaaattttaacactaaccaaacaatgcagatcttagggatgattaaaggcagcatttgatgatagcaagacattgttacaaggacatggtgagtctatttttaatgcaccaatcttgtttatagcaaaaatgttttccaatattttaataaagtagttattttatagggsatacttgaaaccagtatttaagctttaaatgacagtaatattggcatagaaaaaagtagcaaatgtttactgtatcaatttctaatgtttactatatagaatttcctgtaatatatttatatactttttcatgaaaatggagttatcagttatctgtttgttactgcatcatctgtttgtaatcattatctcactttgtaaataaaaacacaccttaaaacatg

SEQ ID NO: 708 - DNA, 1400 bp, Homo sapiens
ggtgactgattttggcttagcggtgaagaagcaaagtaggagtgaagccatgctgcaggccacatgtgggactcctatctatatggcccctgaagttatcagtgcccacgactatagccagcagtgtgacatttggagcataggmgtcgtaatgtacatgttattacgtggagaaccaccctttttggcaagctcagaagmgaagctttttgagttaataagaaaaggagaactacattttgaaaatgcagtctggaattccataagtgactgtgctaaaagtgttttgaaacaacttatgaaagtagatcctgctcacagaatcacagctaaggaactactagataaccagtggttaacaggcaataaactttcttcggtgagaccaaccaatgtattagagatgatgaaggaatggaaaaataacccagaaagtgttgaggaaaacacaacagaagagaagaataagccgtccactgaagaaaagttgaaaagttaccaaccctggggaaatgtccctgakrccaattacacttcagatgaagaggaggaaaaacagtctactgcttatgaaaagcaatttcctgcaaccagtaaggacaactttgatatgtgcagttcaagtttcacatctagcaaactccttccagctgaaatcaagggagaaatggagaaaacccctgtgactccaagccaaggaacagcaaccaagtaccctgctaaatccggcgccctgtccagaaccaaaaagaaactctaaggttccctccagtgttggacagtacaaaaacaaagctgctcttgttagcactttgatgagggggtaggaggggaagaagacagccctatgctgagcttgtagccttttagctccacrgagccccgccatgtgtwtgcaccgagcttaaaattgaagctgcttatctccaaagcagcataagctgcacatggcattaaaggacagccmccwgtaggcttggcagtgggctgcagtgraaatcaactcaagatgtacacgaaggttttttaggggggcagataccttcaatttaaggctgtgggcacacttgctcatttttacttcaaattcttatgtttaggcacagctatttataggggaaaacaagaggccaaatatagtaatggaggtgccaaataattatgtgcactttgcactagaagactttgttagaaaattactaataaacttgccatacgtattacagcagaagtgcttcagtcattcacatgtgttcgtgagattttaggttgctatagattgtttaagacagcttattttaaatgtagaaaaataggagattttgtaactgcttgccattaacttgctgctaaattcccaatgtattgattaaatcaataaaaaacagatgttactcagc

SEQ ID NO: 709 - DNA, 1400 bp, Homo sapiens
gcatccccgttcctgggcgagaccaagcaggagacgctcaccaacatctcagccgtgaactacgacttcgacgaggagtacttcagcaacaccrgcgagctggccaaggacttcattcgccggctgctcgtcaaagatcccaagcggagaatgaccattgcccagagcctggaacattcctggattaaggcgatccggcggcggaacgtgcgtggtgaggacagcggccgcaagcccgagcggcggcgcctgaagaccacgcgtctgaaggagtacaccatcaagtcgcactccagcytgccgcccaacaacagctacgccgacttcgagcgcttctccaaggtgctggaggaggcggcggccgccgaggagggcctgcgcgagctgcagcgcagccggcggctctgccacgaggacgtggaggcgctggccgccatctacgaggagaaggaggcctggtaccgcgaggagagcgacagcctgggccaggacctgcggaggctacggcaggagctgctcaagaccgaggcgctcaagcggcaggcgcaggaggaggccaagggcgcgctgctggggaccagcggcctcaagcgccgcttcagccgcctggagaaccgctacgaggcgctggccaagcaagtagcctccgagatgcgcttcgtgcaggacctcgtgcgcgccctggagcaggagaagctgcagggcgtggagtgcgggctgcgctaggcgcagtggggtgggccaggccccaggacagccggagctcggcctgsggtgggggcgcttcctgtggacgctgcgcctcccatcgcccgggtgcctgtccttgcccagcgccaccaggctggaggcggagtgggaggagctggagccaggcccgtaagttcgcaggcaggggtgggtgtgggacggggctgcttctctacacagcctcyacgctggccttcaccttcacccctgcatcgtcggtgaccctgggaccctccaggcagcgtggcctgtggcaccgtgagggttgggacccaccgaggcgcagaggcggcccgaatgcagccctggttcaggcccggaggagggtttgcgggtagttgcacggacaattcggcggggtgctgcctgttgctgccattagcccaggaggaggtcgtgggacggggagggtgggatggacggcggacaggcagtccccacgctgctgggtggcgccgggcttggtggggtcttccactgtgtgcccttctcgccgaggccggtcccccgggtgtggggtgccctgctgcggactcctccgcgagccccatcgtcgcgcctgtggacgcctaggcaagagcggccctctgcagccaagagaaataaaatactggcttccagataaaaaaaaaaaaaaaaaaaaaaaaaaa

SEQ ID NO: 710 - DNA, 1400 bp, Homo sapiens
agagtggtgcctggccgtctggaggggctggggcgccagggagttcgacattttctaccagtcctacgaggagctgggccggctggaggcttgcactcgcaagagaaggtaattcctgtggaatgactgtcacacatcagagctggctggcccggggctgcagcctgacccctctgccatcggcctctagttctccaaggacctagaagacagatggagttctcccctgaactccttgctgctaagaagtgctgagaagttactcgcctggcggtggctccagggttctctggttctctggagcagagttctctgaataccccatcccccaactgctgattttacagccccagggaagacagtggtatcaggctgggagcggcctcctctggcctcccccatcagtttgcaggagcaggggtgcaggatcctgttctgagctgggtcaaacaaagcagggccgggccttcctgccatccccaggtctcagatggaattacactagaggccctccgctgggaagcacttgaggtagggcaggaggggggctgtgacccctgccctttccccgccagagacctcaggctctcagcacattccacaggctcctgagtccccgaggcctgggccagcttgggcaagccaagatcagatgtctctgtgttcgggaaggtctccgtgtgggaaagcccttgggggatcccgggtgaggagtgttgccccatccagagaatgaatgagttcctttaagtgccaccgccagcaagcccagaggcacacagtccgagtgcacccgcttagcctttacattcctctccaccgacaaaaggaaggggaaactcaatcagcaggacttcagaaagggccttgtgtttatagctttgtcaagtaaatttggacgcagctggagcacaggccctgtttgtttgcacataataatcttgtttatcactttaaaaaattcagtaatatctcagcagtcaggcttctggttgtgaaatcacattgtatgggatttataccaaattatgtatttgctaaacattcactgcacacgtgtacagcggagtacgaaaaggaacgttgtccacaggggatttatggatacaacagcaaacattttataaactatgcacatgcattacacacatgcacacacatatgcacacacatgtgcaaacatagccacttttttgtcaagagttaccctttggggctccttaaaccagaatgggagtttgaaagagagatcatactccagctgaagtttgttgacccttttctaaaattaaaaagatcaaatttagtatttgctggatatgcagggagatgagactcttttaatctcaaaataaacagattctttcaagaaaaaaaaaaaaaaaaaaaaaaaaaaaaaa

SEQ ID NO: 711 - DNA, 1400 bp, Homo sapiens
taccgctccacgcctgactccgcctacctaggcgcctcatcccagagcagctccccagcctcgagcacgcccaactcgcctgcgtcgtcggcgtcgcaccacattcggcccagcacgctgcacggactgtcgccaaagctccatcgccagtaccgctctgcgcgatgcaagtcggccggcaacatccctctatcgccgctggcacacacgccgtcccccacgcaggcgtcaccgccgccactgccgggccacacggtgggcagctcgcacactactcagagcttcccggccaaactgcactcatcgcctcccgtcgtgcgcccgcgccccaagagtgccgagccccctcgctcgccgctcctcaagcgcgtgcagtcggccgagaagctgggagcctctttgagtgcggacaagaagggcgcgctgcgcaaacacagcctcgaggtgggccacccggatttccgcaaggacttccatggcgagctggcgctgcatagccttgccgagtccgacggtgagacgcccccagtcgagggccttggcgcgccccggcaggtcgccgtccgccgcctgggccgacaggagtcacctttgagcctgggcgcggacccgttgctgcccgagggtgcctccaggccaccagtgtcgagcaaggagaaggaatccccggggggcgccgaggcgtgcaccccaccccgcgcgacgacccccggtggccggaccctggagcgggacgtcggctgcacgcggcatcagagcgtgcagacggaggatggcactggcgggatggccagggctgtggccaaggcggcgctgagcccggtgcaggaacacgagacaggccggcgcagcagctctggcgaggcgggcacacccctggtacccattgtcgtagagcctgcgcggcccggggctaaggctgtggtgcctcagcctctgggcgcggactccaaggggttgcaggaacccgcacccctggcgccttccgtgcccgaggccccccggggccgggagcgctgggtgttggaggtggtggaggagcgcaccacgctgagcggtcctcgctccaagcccgcctccccaaagctctccccggagccccagacaccctccctagccccagcgaagtgcagtgcacccagcagtgcagtgaccccagtcccacccgcatccctcttgggctcaggcaccaagcctcaagtggggctgacctcccggtgccctgctgaagctgtgcccccagcaggcctgaccaaaaaaggagtgtccagtcccgcacccccgggaccatagccaagggggtcatcggccccgcgctgtacagcctccgtatacatatgtacacatataaataaagtgcgtccgtgctgcgtgaaaaaaaaaaaaaaaaaaaaaaaaaa

SEQ ID NO: 712 - DNA, 1400 bp, Homo sapiens
cttcctgcctcatttcatgcagtcttttctgaacagcctatgctgctgccctgctggccccttgtgcacggcagctggccgtgtccgtagctgtcagtatgacttagatctagctcctacctactggttgatgtgttttttccttttgccaagtgattgagtctgtttagtagtttccatcattctagtctttaagtaaaaatgacactattgaggaaagtcagtctactcccttcttcctccccccaaacacgtgttctcttttgtcaggaaactcagccagtggactgtggcagagaaagtcctccactcagaggcagagactgagttaagtcataggtggccttaggcatctgcattgtttgcaggggttaagttttccttccagtgagggctggagggatgaattagctggtacctgaagccccgcttagctctgacactctgccaacatcctctgattctaggtgtggtgttgactgtcctttcaaggaaaaacttgcaatagagggaaaagccattaaagcagctccctgcttcatcattaagtcctgtcatccctaccagccaatcccagtcaaagaagttatgctttattcacttctgtggaattacaagtgagagacacttttaggacctgatggacaaagcaggagattcactgtcagctttcctggtcctctccttacttctgtgggccttgcaccgtcttagtttacacatctgccaaaggggtagaattacacttctttttacaggtaaatgtcaaggcacaatcagttttcaggaagtgcttcaagaccccaggtgaaatgaaaatgctaagtaccctctgaatggccatgcctgttaccaggtgctgcttcttcagatgatggggagcacttttcagggtgaaattcaggcgagttttgcccaggcctgctgtcttgagtacaaatgtgaatgatcgactgactgcttgttgccaaactggaaatgttctgtagggatttactggcatggtatcattcctagaagaaaaaaagagagaaacttgactgcacattaaaaaaaaaaaaaaatccacattgtgacttttatttaatttctattttttttggtaataaaaagttgacttttttatttgaatttgtcttttttatttattggtctgaaaggcatttcaaaggtattataataatatattggtgtaatttaattggtgcaacatgctttatggctcctgtcaaaattggttttcactcatttgattggtttgagcccagaacagcctacaggggaaaaacaagctggataaccacccaaagtgtttgtattttcgttggaaactgatttttgtttcattttggtttttgtttctgtttttatttttaaattaaataaattgcaatgaactg

SEQ ID NO: 713 - DNA, 1400 bp, Homo sapiens
ccagtcttagctgaggctgagaaagctaaagtttggttttgacaggttttccaaaagtaaagatgctacttcccactgtatgggggagattgaactttccccgtctcccgtcttctgcctcccactccataccccgccaaggaaaggcatgtacaaaaattatgcaattcagtgttccaagtctctgtgtaaccagctcagtgttttggtggaaaaaacattttaagttttactgataatttgaggttagatgggaggatgaattgtcacatctatccacactstcaaacaggttggtgtgggttcattggcattctttgcaatactgcttaattgctgataccatatgaatgaaacatgggctgtgattactgcaatcactgtgctatcggcagatgatgctttggaagatgcagaagcaataataaagtacttgactacctactggtgtaatctcaatgcaagccccaactttcttatccaactttttcatagtaagtgcgaagactgagccagattggccaattaaaaacgaaaacctgactaggttctgtagagccaattagacttgaaatacgtttgtgtttctagaatcacagctcaagcattctgtttatcgctcactctcccttgtacagccttattttgttggtgctttgcattttgatattgctgtgagccttgcatgacatcatgaggccgsatgaaacttctcagtccagcagtttccagtcctaacaaatgctcccacctgaatttgtatatgactgcatttgtgkgtgtgtgtgtgttttcagcaaattccagatttgtttccttttggcctcctgcaaagtctccagaagaaaatttgccaatctttcctactttctatttttatgatgacaatcaaagccggcctgagaaacactatttgtgactttttaaacgattagtgatgtccttaaaatgtggtctgccaatctgtacaaaatggtcctatttttgtgaagagggacataagataaaatgatgttatacatcaatatgtatatatgtatttctatatagacttggagaatactgccaaaacatttatgacaagctgtatcactgccttcgtttatatttttttaactgtgataatccccacaggcacattaactgttgcacttttgaatgtccaaaatttatattttagaaataataaaaagaaagatacttacatgttcccaaaacaatggtgtggtgaatgtgtgagaaaaactaacttgatagggtctaccaatacaaaatgtattacgaatgcccctgttcatgtttttgttttaaaacgtgtaaatgaagatctttatatttcaataaatgatatataatttaaagttaaaaaaaaaaaaaaaaaaaaaaaaaaaaaaaaaaaa

SEQ ID NO: 714 - DNA, 1400 bp, Homo sapiens
ggtcgcctgcccttctacaaccaggaccatgagaagctttttgagctcatcctcatggaggagatccgcttcccgcgcacgcttggtcccgaggccaagtccttgctttcagggctgctcaagaaggaccccaagcagaggcttggcgggggctccgaggacgccaaggagatcatgcagcatcgcttctttrccggtatcgtgtggcagcacgtgtacgagaagaagctcagcccacccttcaagccccaggtcacgtcggagactgacaccaggtattttgatgaggagttcacggcccagatgatcaccatcacaccacctgaccaagatgacagcatggagtgtgtggacagcgagcgcaggccccacttcccccagttctcctactcgsccagcrssacggcctgaggcggcggtggactgcgctggacgatagcttggagggatggagaggcggcctcgtgccatgatctgtatttaatggtttttatttctcgggtgcatttgagagaagccacgctgtcctctcgagcccagatggaaagacgtttttgtgctgtgggcagcaccctcccccgcagcggggtagggaagaaaactatcctgcgggttttaatttatttcatccagtttgttctccgggtgtggcctcagccctcagaacaatccgattcacgtagggaaatgttaaggacttctrcagctatgcgcaatgtggcattggggggccgggcaggtcctgcccatgtgtcccctcactctgtcagccagccgccctgggctgtctgtcaccagctatctgtcatctctctggggccctgggcctcagttcaacctggtggcaccagatgcaacctcactatggtatgctggccagcaccctctcctgggggtggcaggcacacagcagccccccagcactaaggccgtgtctctgaggacgtcatcggaggctgggcccctgggatgggaccagggatgggggatgggccagggtttacccagtgggacagaggagcaaggtttaaatttgttattgtgtattatgttgttcaaatgcattttgggggtttttaatctttgtgacaggaaagccctcccccttccccttctgtgtcacagttcttggtgactgtcccaccgggagcctccccctcagatgatctctccacggtagcacttgaccttttcgacgcttaacctttccgctgtcgccccaggccctccctgactccctgtgggggtggccatccctgggcccctccacgcctcctggccagacgctgccgctgccgctgcaccacggcgtttttttacaacattcaactttagtatttttactattataatataatatggaaccttccctccaaattcttcaataaaagttgcttttc

SEQ ID NO: 715 - DNA, 600 bp, Homo sapiens
ttcacagaacttctcttttatataaaggcaagagcacaaaatgagttcagatgatcacaaacaggtgagttttgttggagaagaaagttggagtaggagactttcacaagtggtttccatggagatagaatgaagcattctgtggtcaagtaagtttagggagctattcatgtttcacttgctttgtggagattcacactatgcactgggaaagtatctgaaaagtcttataataaagaaacaggcttaactttgtgtaagaacactgtttatcaatgtcatttggctatagaaacattttctcctgctgattgtgtgtgtgaaacatgtattaacattccaatgaactagcatttaataaagcacaattttggaaaccctggtaaatgacagtgggaaataacacccgaaaggcaaggacgggcagattggggagggaaaggatgttgggctaagggctgtgagcttatgttacaggcaactgagccactgaagaattttgacgaagaaaatgccaaccaaagcagtcattttaaaagtttatggctgttagttacaggacaagttgtgaaaagaaagaaaaaaaaaaaaaaaaaaaaa

SEQ ID NO: 716 - DNA, 600 bp, Homo sapiens; identical to SEQ ID NO: 715

SEQ ID NO: 717 - DNA, 600 bp, Homo sapiens
tattttataaacagtagcacacaataaattccatgcatgggccgctgctcctatctctgtgttgggttttatttggaagatgcaatctgatttgtccttttgatgcaaatcagaaaatcctgttactagagctgggatgtcctccggagattatctcgtggatagttcatggtaatttgattaattaaattctttataaattttgccttaaaaaaaacttttgttatatacttgttttacatgagcattagtaactgagcactagaggactttgaatgcctactgtaggcctcctaagtctaatatttaagatcactgtttattgtcttttaattgaaagaaaatatgttattgtctagaattttgttatagtggtattgggaatttactgggtgttctaacaataagaaaaatattagtgataattgcattttcctatcattcctttcttctttgtcataaatcacaataagtataggattttgcacattgagggatattaggatattgctcaaaattatataatcatacaataacttgaattatagttctcaacaataattacaatgagatatattataaaacactaagtcaaaatat

SEQ ID NO: 718 - DNA, 600 bp, Homo sapiens; identical to SEQ ID NO: 717

SEQ ID NO: 719 - DNA, 1400 bp, Homo sapiens
ttgtctacctgcggcagccgtactatgccacgagggtgaatgcggctgacattgagaaccgagtgttggaactgaacaagaagcaggagtccgaggatacagccaaggctggcttctgggaggagtttgagagtttgcagaagcaggaggtgaagaacttgcaccagcgtctggaagggcagcggccagagaacaagggcaagaaccgctacaagaacattctcccctttgaccacagccgagtgatcctgcagggacgggacagtaacatccccgggtccgactacatcaatgccaactacatcaagaaccagctgctaggccctgatgagaacgctaagacctacatcgccagccagggytgtctggaggccacggtcaatgacttctggcagatggcgtggcaggagaacagccgtgtcatcgtcatgaccacccgagaggtggagaaaggccggaacaaatgcgtcccatactggcccgaggtgggcatgcagcgtgcttatgggccctactctgtgaccaactgcggggagcatgacacaaccgaatacaaactccgtaccttacaggtctccccgctggacaatggagacctgattcgggagatctggcattaccagtacctgagctggcccgaccatggggtccccagtgagcctgggggtgtcctcagcttcctggaccagatcaaccagcggcaggaaagtctgcctcacgcagggcccatcatcgtgcactgcagcgccggcatcggccgcacaggcaccatcattgtcatcgacatgctcatggagaacatctccaccaagggcctggactgtgacattgacatccagaagaccatccagatggtgcgggcgcagcgctcgggcatggtgcagacggaggcgcagtacaagttcatctacgtggccatcgcccagttcattgaaaccactaagaagaagctggaggtcctgcagtcgcagaagggccaggagtcggagtacgggaacatcacctatcccccagccatgaagaatgcccatgccaaggcctcccgcacctcgtccaaacacaaggaggatgtgtatgagaacctgcacactaagaacaagagggaggagaaagtgaagaagcagcggtcagcagacaaggagaagagcaagggttccctcaagaggaagtgagcggtgctgtcctcaggtggccatgcctcagccctgaccctgtggaagcatttcgcgatggacagactcacaacctgaacctaggagtgccccattcttttgtaatttaaatggctgcatcccccccacctctccctgaccctgtatatagcccagccaggccccaggcagggccaacccttctcctcttgtaaataaagccctgggatcactgaaaaaaaaaaaaaa

SEQ ID NO: 720 - DNA, 1400 bp, Homo sapiens
gacgcctccggtagtgtaaatgaggacaatgcctgctggcccacatgacggggggatgtagacggcagcggcgccagtcgctcctggcaccatggacgatgccacagtcctaaggaagaagggttacatcgtaggcatcaatcttggcaagggttcctacgcaaaagtcaaatctgcctactctgagcgcctcaagttcaatgtggctgtcaagatcatcgaccgcargaaaacacctactgactttgtggagagattccttcctcgggagatggacatcctggcaactgtcaaccacggctccatcatcaagacttacgagatctttgagacctctgacggacggatctacatcatcatggagcttggcgtccagggcgacctcctcgagttcatcaagtgccagggagccctgcatgaggacgtggcacgcaagatgttccgacagctctcctccgccgtcaagtactgccacgacctggacatcgtccaccgggacctcaagtgcgagaaccttctcctcgacaaggacttcaacatcaagctgtctgactttggcttctccaagcgctgcctgcgggacagcaatgggcgcatcatcctcagcaagaccttctgcgggtcggcagcatatgcagcccccgaggtgctgcagagcatcccctaccagcccaaggtgtatgacatctggagcctrggcgtgatcctstacatcatggtctgcggctccatgccctaygacgactccgacatcargaagatgctgcgtatccagaaggagcaccgygtsracttcccrcgctccaagmacctgacctgcgagtgcaaggacctcatctaccrcatgctgcagcccgacgtcagccagcggctccacatcgatgagatcctcagccactcgtggctgcagccccccaagcccaaagccacgtcttctgcctccttcaagagggagggggagggcaagtaccgcgctgagtgcaaactggacaccaagacaggcttgaggcccgaccaccggcccgaccacaagcttggagccaaaacccagcaccggctgctggtggtgcccgagaacgagaacaggatggaggacaggctggccgagacctccagggccaaagaccatcacatctccggagctgaggtggggaaagcaagcacctagcatgacaatggccccgttgtgtgtggtgggggtcggggttggggggcatggtgcagtcggccttcacgtaaactaagtaggcaggtaggatctgaagaaggcacaggtgcaagtaaaattcgtcaattaaaccactattttgattacgttccattagctttcttccacttagcagcaaagacgttccttactgaccaccaaataaaccacagggtgtgtgcaagcatcaaaa

SEQ ID NO: 721 - DNA, 1400 bp, Homo sapiens
ctcactcccatttcctagcaaaatcagaagattgtgaagaggccggcttcaacaaaatgggataaaaaaataattttttaaaacttacaacactccgagttctgctttattctctagcaatccacagtacaagaacaagcaaatgccacagctgcacgactgttgctcatttttccaaaagctatttaatattcttagcaatcaatttggatatcccttaagtgaaaagaatctgaaatacactcaggtggtcttatttattggcaacaaaaggaattttctatccagaagcctatttctcctttcattgttgttatttctgttataatactttaattgtacatctgacaatactgcctcttttatgttgtatttagaaattaatatacttataaaattaagatttattagccaaacttgaattctagttttaaaactgactgtgaattttatttttcatatatttatgcattacacaccttagctataagaaaaaaagggttttgattatatgcttcttgcagttaatctcgttatttaaacaaaaagttttgggtctatctttggagtatttgtaacttctaaattttgaaatgactgaattaggaatttggatgcttattcttttagtctgtttgcctaaaaaccaatttacaatctgactgtctcttgggagagggaggtgccttgcaaactttcacattaagaatgtgcctgaggctgctttactctggaatagtctcagatctaaaatttcctctatataaggtggcatatgttaagttttgcttcattggaccgtttagaatgctatgtaaaatgttgccattctgttagattgctaactatatacccatctctgatttggctctccttaagtgataggatttgttattctaaaggtgataaacttgaaaatatcagaatctgagttttacttgaaattttgcagaatacccaggtggagtgaaaattggaagggttttgtgcaatgactaaaaggtaaaacgctgttaaggttcaagaatcaatactttcaacccaagtagccctctgcttgactgtatattatggaactagtaaaccttaggattttgaaaattggagtctaatctttcaaggaggtgggctcccaggatggtaccattgctctttcctagctaaccctagatatggcagctctttaatgtacttcaaaaagcaaatatatattactaaggaaaaaaagttatttataattgccttgtcataattgttaaggtgttctagagccatttgcatacaatttaatgtaatttcattccattctattgtttacacaacgattactcgaagatgactgcaaaggtaaaaggaaaataaaagtgtattgcacaatgaaaaaaaaaaaaaaaaaaaaa

SEQ ID NO: 722 - DNA, 1400 bp, Homo sapiens; identical to SEQ ID NO: 721

SEQ ID NO: 723 - DNA, 600 bp, Homo sapiens
agtttgagcgcgtcttctgagggccggcgcttgccactagggctcttgtgttttttttcttctgctatgtgacttgcatcgtggagacagggcatttgagtttatatctctcatgcatattttatttaatccccaccctgggctctgggagcagcccgctgagtggactggagtggagcattggctgagagaccaggagggcactggagctgtcttgtccttgctggttttctggatggttcccagagggtttccatggggtaggaggatgggctcgcccaccagtgactttttcymrgagctcccggcgtggtggaagaggggacaggtccctcacccacccacaatcctattctcgggctgagaaccctgcgtgrggacagggctcgcctcaggaatgggctgtttttggcctaaccctcagaaacactggggctggcacaaactcttggtttcttcaacaggagaattttactgtgtttcttttggttccattgtttggagacattcctgggcacagtttggtccgttagaattaaaagttgaattttttttttttttaaaaaaaaaaaaaaaaaaaaaaaaaaaaaaaaaaaaaaa

SEQ ID NO: 724 - DNA, 600 bp, Homo sapiens; identical to SEQ ID NO: 723

SEQ ID NO: 725 - DNA, 1400 bp, Homo sapiens
cagtacaagctaagtacaaggacagtattgagtttaaaaagcagcttattgaatatttaaakaagaktcccagtgtggatcacttgctatccattaagaagacattgaaaagcttaaaagctctactcagatggaaattggttgaaaagagtaatttggaagagtcagatgatcctgatggctctcaaattgagaaaataaaagaagaaataactcagctgcgcaataatgtctttcaggaaatttatcatgagagagaggaatatgagatgctaactagtttggcacagaaatggttccctgagctgcctctgcttcatcctgaaataggattactcaaatacatgaactctggtggtctccttacaatgagcttggaacgagatcttcttgatgctgagcccatgaaggaacttagcagcaagcgtcctttggtacgttctgaggttaatgggcagataattctgttaaagggctattctgtggatgttgacacagaagccaaggtgattgagagagcagccacctaccatagagcttggagagaagctgaaggagactcagggttactgccattgatattcctgtttttatgtaagtctgatcctatggcttatctgatggtcccatactaccctagggcaaacctgaatgctgttcaagccaacatgcctttaaattcagaagaaactttaaaggtcatgaaaggtgttgcccagggtctgcatacattgcataaggctgacataattcatggatcacttcatcagaacaatgtatttgctttaaaccgtgaacaaggaattgttggagattttgacttcaccaaatctgtgagtcagcgagcctcggtgaacatgatggttggtgacttgagtttgatgtcacctgagttgaaaatgggaaaacctgcttctccaggttcagacttatatgcttatggctgcctcttattatggctttctgttcaaaatcaggagtttgagataaataaagatggaatccccaaagtggatcagtttcatctggatgataaagtcaaatccctcctctgtagcttgatatgttatagaagttcaatgactgctgaacaagttttaaatgctgaatgtttcttgatgccaaaggagcaatcagttccaaacccagaaaaagatactgaatacaccctatataaaaaggaagaagaaataaagacggagaacttggataaatgtatggagaagacaagaaatggtgaagccaactttgattgttaaattattattgttgttgttgcagaggttctttttaaaaactttggtttggttaatacacagaaatatctagaaatgttctgggactagttgagttgtatctttagtattcaggttgtgaaaaataaagatgtttggctatgc

SEQ ID NO: 726 - DNA, 1400 bp, Homo sapiens
caggccgagagtggggatgggcgcaccatcgtgcactgcctaaacgggggaggacgcagcggcaccttctgcgcctgcgccacggtcctggagatgatccgctgccacaacttggtggacgttttctttgctgccmaaaccctccggaactacaaacccaacatggtggagaccatggatcagtaccacttttgctacgatgtggccctggagtacttggaggggctggagtcaagatagcggggccctggcctggggcacccactgcacactcagggccagacccaccatcctggactggcgaggaagatcagtgcctcctgctctgcccaaacacactcccatggggcaagcactggagtggatgctgggctatcttgctcccccttccactgtgggcagggcctttcgcttgtcccatgggcgggtggtgggccaaggaggagcttagcaagtctgcascccasccccacctccatagggtcctgcaggcctgtgctgagaggcctggtgctgcctggcagagtgacaaaggctcaggacggctggctctgggggactcaggccaagssssttggcassatcctggsttttggsagggatgagtgaggccctgcagagagcatcccaggccaaggttcccactcagcctgccccctctgcatgtgggtagaggatgtactgggacttggcatttaggattccatctggsssascccctgaaggtccyssssaagcaggtctcaattctgaatagccagtggggcacactgactgtcctccccaggggaactgcagcgccctcctccccactgccccctscascccctgagatattttgctcactatccctccccacttgcttccctgatatgtgctctgagcttccctgaaccaggatctgcctattactgctgtgccccatggggggctccttccctgcctgacccactgttgcagaatgaagtcacctcgcccccctcttcctttaatcttcaggcctcactggcctgtcctgctcagcttgggccagtgacaatctgcaaggctgaacaacagcccctggggttgaggcccctgtggctcctggtcaggctgcccgttgtggggaggggcagtgttagagcagggctggtcataccctctggagttcagagsaagaggtaggaccagtgcttttttgtttcttttgttatttttggttgggtgggtgggaaggtctctttaaaatggggcaggccacacccccattccgtgcctcaatttccccatctgtaaactgtagatatgactactgacctacctcgcagggggctgtggggaggcataagctgatgtttgtaaagcgctttgtaaataaacgtgctctctgaatgccwaaaaaaaaaaaacaaaaaaaa

SEQ ID NO: 727 - DNA, 600 bp, Homo sapiens
tggagaaactgtgaattggagaaatggagctctgtggcttcccacccaaaccttctcagtccagctggaggctggagggagacacaggccccacccagcagactgaggggcagaggcacaggtgggagggcagcggagatcagcgtggacaggagcgatgcactttgtagatgctgtggctttgtgttgcgttttgtgtctctgttgcacagatctgttttttcacactgatccgtattcccctgggtgtgcacacagggcgggtgtggggcatttaggccatgctgtgctctacttcattgagtaaaatcgagtgagaggttccgggcagcaggatcgacgcccagtccagccggcagagggaacacacgggtccttcattgtcctgtaagggtgttgaagatgctccctggcggcccccaagcagactagatgggaggaggcgccgctcagcccctcaccctgcatcactgaagagcggcgcctctgcagcaagcagggcttcaggaggtgcccgctggccacagccaggttttccctaagaagatgttattttgttgggttttgttccccctccatctcgattctcgtacccaacta

SEQ ID NO: 728 - DNA, 600 bp, Homo sapiens; identical to SEQ ID NO: 727

SEQ ID NO: 729 - DNA, 1400 bp, Homo sapiens
gtttgtgatacgcctaagtcctatgataatgttatgcacgttggcttgaggaaggtgaccttcaaatggcaaagaggaaacaaaattggagaaggccagtatgggaaggtgtacacctgcatcagcgtcgacaccggggagctgatggccatgaaagagattcgatttcaacctaatgaccataagactatcaaggaaactgcagacgaattgaaaatattcgaaggcatcaaacaccccaatctggttcggtattttggtgtggagctccatagagaagaaatgtacatcttcatggagtactgcgatgaggggactttagaagaggtgtcaaggctgggacttcaggaacatgtgattaggctgtattcaaagcagatcaccattgcgatcaacgtcctccatgagcatggcatagtccaccgtgacattaaaggtgccaatatcttccttacctcatctggattaatcaaactgggagattttggatgttcagtaaagctcaaaaacaatgcccagaccatgcctggtgaagtgaacagcaccctggggacagcagcatacatggcacctgaagtcatcactcgtgccaaaggagagggccatgggcgtgcggccgacatctggagtctggggtgtgttgtcatagagatggtgactggcaagaggccttggcatgagtatgagcacaactttcaaattatgtataaagtggggatgggacataagccaccaatccctgaaagattaagccctgaaggaaaggacttcctttctcactgccttgagagtgacccaaagatgagatggaccgccagccagctcctcgaccattcgtttgtcaaggtttgcacagatgaagaatgaagcctagtagaatatggacttggaaaattytyttaatcactactgtatgtaatatttacataaagactgtgctgagaagcagtataagcctttttaaccttccaagactgaagactgcacaggtgacaagcgtcacttctcctgctgctcctgtttgtctgatgtggcaaaaggccctctggagggctggtggccacgaggttaaagaagctgcatgttaagtgccattactactgtacacggaccatcgcctctgtctcctccgtgtctcgcgcgactgagaaccgtgacatcagcgtagtgttttgacctttctaggttcaaaagaagttgtagtgttatcaggcrtcccataccttgtttttaatctcctgtttgttgagtgcactgactgtgaaacctttaccttttttgttgttgttggcaagctgcaggtttgtaatgcaaaaggctgattactgaaatttaagaaaaaggttcttttttcaataaatggtttattttaggaaaaaaaaaaaaaaaaaaaaaaaaaa

SEQ ID NO: 730 - DNA, 1400 bp, Homo sapiens; identical to SEQ ID NO: 729

SEQ ID NO: 731 - DNA, 600 bp, Homo sapiens
ggagcggcccctcttcccccagatcctggccacaattgagctgctgcaacggtcactccccaagattgagcggagtgcctcggaaccctccttgcaccgcacccaggccgatgagttgcctgcctgcctactcagcgcagcccgccttgtgccttaggccccgcccaagccaccagggagccaatctcagccctccacgccaaggagccttgcccaccagccaatcaatgttcgtctctgccctgatgctgcctcaggatcccccattccccaccctgggagatgagggggtccccatgtgcttttccagttcttctggaattgggggacccccgccaaagactgagccccctgtctcctccatcatttggtttcctcttggctttggggatacttctaaattttgggagctcctccatctccaatggctgggatttgtggcagggattccactcagaacctctctggaatttgtgcctgatgtgccttccactggattttggggttcccagcaccccatgtggattttggggggtcccttttgtgtctcccccgccattcaaggactcctctctttcttcaccaagaagcacagaattc

SEQ ID NO: 732 - DNA, 600 bp, Homo sapiens
tatggaaaggaattttaacctataatgtaaagggatgtattctgagrggaacaargcaggaatggaaacttgaggtcacttactaaatatagtggatataaaatagaacaccygacyttgcycyctagacccataaccccccgaaccttacctatgttcatatatttgtattgaacaattcttttaaaagcaaaaatgtaaatgatgtgtagtttatttgtgcttttattgttttccctgcgtctcagacatgttgagaatcatggacaaaacctgctggaattttggaatttttgaagatgtaaataatgtgtatttatgttataagtaacatatgtaaacatgtatatttgttttatatttatttttgtaacaccagtgtctgatgaaacatttttgcaaatgcattttataaaaaaataaatatagtgataagttacattatcttttgattcatttaattaaatacttatttttaaataacttaccagtaaactcactttttaaattttgttgcctgttgaggagccaattaaattttaaatattaattttgcaaatgttaaatacattgtttctctattatctgaaaaaaaaaaaa

SEQ ID NO: 733 - DNA, 600 bp, Homo sapiens; identical to SEQ ID NO: 732

SEQ ID NO: 734 - DNA, 600 bp, Homo sapiens
gttctctacaagtgtagaaagtgcaggcgatcattatttcgaagttctagtattctggatcaccgtgaaggaagtggacctatagcctttgcccacaagagaatgacaccatcttccatgcttaccacagggaggcaagctcaatgtacatcttatttcattgaacctgtacagtggatggaatctgctttgttgggagtgatggatggacagcttctttgcccaaaatgcagtgccaagttgggttccttcaactggtatggtgaacagtgctcttgtggtaggtggataacacctgcttttcaaatacataagaatagagtggatgaaatgaaaatattgcctgttttgggatcacaaacaggaaaaatatgaacatgatattttatagcttgggaagaaacttgcagatgatatgtgctgcctttgcttcttatcattcatggcagattgtttgtgctttcaacatttcatttgaaatgggagaagataaaatcacttgatgtaacctggaaactatgctttacatggcaatcaaagccttttgatcatgtacattttatttgatattaaaatcttttataaccagaaaaaaaaaaa

SEQ ID NO: 735 - DNA, 600 bp, Homo sapiens; identical to SEQ ID NO: 734

SEQ ID NO: 736 - DNA, 600 bp, Homo sapiens
cgactggctgtgctatctggcccctgagattgtacgcgagatgacccccgggaaggacgaggatcagctgccattctccaaagctgctgatgtctatgcatttgggactgtttggtatgagctgcaagcaagagactggcccttgaagaaccaggctgcagaggcatccatctggcagattggaagcggggaaggaatgaagcgtgtcctgacttctgtcagcttggggaaggaagtcagtgagatcctgtcggcctgctgggctttcgacctgcaggagagacccagcttcagcctgctgatggacatgctggagaaacttcccaagctgaaccggcggctctcccaccctggacacttctggaagtcagctgagttgtaggcctggctgccttgcatgcaccaggggctttcttcctcctaatcaacaactcagcaccgtgacttctgctaaaatgcaaaatgagatgcgggcactaacccaggggatgccacctctgctgctccagtcgtctctctcgaggctacttcttttgctttgttttaaaaactggccctctgccctctccacgtggcctgcatatgcccaagccggaattc

SEQ ID NO: 737 - DNA, 600 bp, Homo sapiens
ccaaaaatgaatgtctgtcatatatttatattacaaatacattatatttatgttctattcatcttttgaatgtttagtatgctattaagtcattctgaatctttgtatttgcttttgcaaataggtatttcaaagctcttttcctaactggttaagtaaaataaaaaattgagctttctagaatatttgcctaattgggaattaaaaagtaaaataataggccaggcatggtggctcatgcctataagcaccctgggaggccgaggcaggcagattatttgagctcaggagtttgagaccatcctgggcaacatggcgaaaccctatctctacaaaaaatacaaaaattagccagacatggtggcacatgcctttagtcccagctactctggaggctgaagttggaggatggcttgagcccacgagatggaagttgcagtgaactgaaattgtgccactgcacttttcagcctgggtgccacagcgagaccctagttaagagaaaaaaaaagtaaaaacaaattgtgggtcaaagtaaatgtatacagttttattacaatgtaacaaaagttgaaaatcgggcccggaattcagtttcag

SEQ ID NO: 738 - DNA, 1400 bp, Homo sapiens
aagaaaaaaatccaagatgacagatgaggagatcttagagaagctrakaarcatwgtgagtgttggkracmsmwwgawwrmwtaywcwagatttgawaawwttsktcamrgggcatcaggtactgtttatacagcactagacattgcaacaggacaagaggtggccataaagcagatgaaccttcaacagcaacccaagaaggaattaattattaatgaaattctggtcatgagggaaaataagaaccctaatattgttaattatttagatagctacttggtgggtgatgaactatgggtagtcatggaatacttggctggtggctctctgactgatgtggtcacagagacctgtatggatgaaggacagatagcagctgtctgcagagagtgcctgcaagctttggatttcctgcactcaaaccaggtgatccatagagatataaagagtgacaatattcttctcgggatggatggctctgttaaattgactgactttgggttctgtgcccagatcactcctgagcaaagtaaacgaagcactatggtgggaaccccatattggatggcacctgaggtggtgactcgaaaagcttatggtccgaaagttgatatctggtctcttggaattatggcaattgaaatggtggaaggtgaacccccttaccttaatgaaaatccactcagggcattgtatctgatagccactaatggaactccagagctccagaatcctgagagactgtcagctgtattccgtgactttttaaatcgctgtcttgagatggatgtggataggcgaggatctgccaaggagcttttgcagcatccatttttaaaattagccaagcctctctccagcctgactcctctgattatcgctgcaaaggaagcaattaagaacagcagccgctaagactgcaagccttacacctcaccatctccctcatgagtaagactgaaataaaactctgctgcaggaaagatggaagaaaagacagtcaaatggggtgggggttctttacctttcaaatgaatagaaacttcttataagcctttttcctactccctcagattatgtaatttatttgtaagcctgaatcgcagcccaaacagggcagcaatgttgaagtgaccataaagtggtcacttccaccgtgaagcgaaagagccagtagtgaatcccctcattttgtgcattcactttgaagaaaaaggtttctcaaagatgcacactccctcttcatagtgttgtgtttgtttttaagttagagagtagtccctcttgcattcaaacctccttcaaaactccttacccaatgtgatgtttttcacttgcattgtcattagatgtccagaaaaaaaaaagatgtcaaaatgtttttctaaaaaaagaaagc

SEQ ID NO: 739 - DNA, 1400 bp, Homo sapiens
tcatcggcagaggagtgagctctgtggtccgccgttgtgttcatcgagctactggccacgagtttgcggtgaagattatggaagtgacagctgagcggctgagtcctgagcagctggaggaggtgcgggaagccacacggcgagagacacacatccttcgccaggtcgccggccacccccacatcatcaccctcatcgattcctacgagtcttctagcttcatgttcctggtgtttgacctgatgcggaagggagagctgtttgactatctcacagagaaggtggccctctctgaaaaggaaaccaggtccatcatgcggtctctgctggaagcagtgagctttctccatgccaacaacattgtgcatcgagatctgaagcccgagaatattctcctagatgacaatatgcagatccgactttcagatttcgggttctcctgccacttggaacctggcgagaagcttcgagagttgtgtgggaccccagggtatctagcgccagagatccttaaatgctccatggatgaaacccacccaggctatggcaaggaggtcgacctctgggcctgtggggtgatcttgttcacactcctggctggctcgccacccttctggcaccggcggcagatcctgatgttacgcatgatcatggagggccagtaccagttcagttcccccgagtgggatgaccgttccagcactgtcaaagacctgatctccaggctgctgcaggtggatcctgaggcacgcctgacagctgagcaggccctacagcaccccttctttgagcgttgtgaaggcagccaaccctggaacctcaccccccgccagcggttccgggtggcagtgtggacagtgctggctgctggacgagtggccctaagcacccatcgtgtacggccactgaccaagaatgcactgttgagggacccttatgcgctgcggtcagtgcggcacctcatcgacaactgtgccttccggctctacgggcactgggtaaagaaaggggagcagcagaaccgggcggctctctttcagcaccggccccctgggccttttcccatcatgggccctgaagaggagggagactctgctgctataactgaggatgaggccgtgcttgtgctgggctaggacctcaaccccagggattcccaggaagcagaactctccagaagaagggttttgatcattccagctcctctgggctctggcctctggcctcaggcccactaatgatcctgctaccctcttgaagaccagcccggtacctctctccccactggccaggactctgagatcagagctggggtggaagggagccattctgaacgccacgcctggcccggtcagtgctgcatgcactgcatatgaaataaaatctgctacacgccaggg

SEQ ID NO: 740 - DNA, 600 bp, Homo sapiens
gaaggaaatgtaaacgaaggctgacttgattgtgccatttagagggaactcttggtacctggaaatgtgaatctggaatattacctgtgtcatcaaagtagtgatggattcagtactcctcaaccactctcctaatgattggaacaaaagcaaacaaaaaagaaatcyctctataaaatgaataaaatgtttaagaaaagagaaagagaaaaggaattaattcagtgaaggrtgattttgstcctagtttkggagtttgaatttctgccaggattgaattatttkgaaatctcctgtctttttaaactttttcwaaataggtctctaaggaaaaccagcagaacattagcctgtgcaaaaccwwctktttggggagmacactcttccattatgttggsacatagatctccctgkggkgggattttttttttccctttttttgtgggggagggttggtggtatatttttcccctcttttttccttcctctcctacatctcccttttcccccgatccaagttgtagatggaatagaagcccttgttgctgtagatgtgcgtgcagtctggcagccttaagcccactcygggcacttttagat

SEQ ID NO: 741 - DNA, 600 bp, Homo sapiens; identical to SEQ ID NO: 740

SEQ ID NO: 742 - DNA, 1400 bp, Homo sapiens
agcttgtgataatggatcttcatttaatgtttactgttatgaggtagaataaaaaagaatactttgtaatagccacaagttcttgtttagagaccagagcaggattaataatttattttaacattttagtgtttggtggcacattctaaaatatagattaagaatacttaaaatgcctgggatagttcttgggactaacaacatgatcttctttgagttaaacctacctaagtagattttaggtgggttcctattaggtcagatttttagcttccctaattacctttcactgacatatacagaaaaaggagcagttttagttttaattaattaaaattaacagatgtgatgaggattwaatgaatcaaaagacttaatttgtagattcttttararttatgagctaggtatakttkggggaaactcaacctggtgctggtgctcttaacaattttgtaaataaagaarataatttccttttctagaggtacatattaggccttttatgaacactaaaacaatgaggaaatgttggtcatggggcaaagtatcacttaaaattgaattcatccatttttaaaaaacacttcatgaaagcattctggtgtgaattgccatttttttcttactggcttctcaattttcttccttctctgcccctacctaaaacattctcctcggaaattacatggtgctgaccacaaaktttctggatgttttattaaatattgtacgtgtttacagttgggaatttaaaataatacatacactggttgataaagggaagctgcaggaccaaggtgaagattgatagtccaaatgcttttcttttttgagttgtatattttttcacaccatcttagatataattaggtagctgctgaaaggaaaagtgaatacagaattgacggtattattggagatttttcctctgcgtagagccatccagatctctgtatcctgttttgactaagtcttaggtgggttgggaagacagataatgaagtaggcaaagagaaaaggacccaagatagaggtttatattcagaaatggtatatatcaatgacagcatatcaaacttcctatgggaaaaagtctggtgggtggtcagctgacagatttcccatttagtagtcatagaatacagaaatagtttagggacatgtattcattttgttattttgagcattgataggtcagtatatctacctaatctgtttggtaagtataggatatataaaccattaccattgatctgtcttatgccataatcttaaaaaaaawttgaatgctcttgaatttgtatattcaataaagttatccttttataaaaaaaaaaaaaaaaaaaaaaaaaaaaaaaaaaaaaaaaaaaaaaaaaaaaaaaaaaaaaaaaaaaaaa

SEQ ID NO: 743 - DNA, 600 bp, Homo sapiens
gtgaagatgaagacgagctatttcagtctatcatggagcacaacgtttcctatccaaaatccttgtccaaggaggctgtttctrtctgcaaaggactgatgaccaaacacccagccaagcggctgggctgtgggcctgagggggagagggacgtgagagagcatgccttcttccggaggatcgactgggaaaaactggagaacagggagatccagccaccattcaagcccaaagtgtgtggcaaaggagcagagaactttgacaagttcttcacacgaggacagcccgtcttaacaccacctgatcagctggttattgctaacatagaccagtctgattttgaagggttctcgtatgtcaacccccagtttgtgcaccccatcttacagagtgcagtatgaaactcaccagcgagaacaaacacctccccagcccccagccctccccgcagtggaagtgaatccttaaccctaaaattttaaggccacggcttgtgtctgattccatatggaggcctgaaaattgtagggttattagtccaaatgtgatcaactgttcagggtctytctctyacaaccaagaacattatcttagtggaag

SEQ ID NO: 744 - DNA, 1400 bp, Homo sapiens
ttccctcagccgttacctgtgtgtggtgatatcaaagtagagttcttccacaaacagaacaagatgctaaaaaaggacaaaatgtttcacttttgggtaaatacattcttcataccaggaccagaggaaacctcagaaaaagtagaaaatggaagtctatgtgatcaagaaatygatagcatttgcagtatagagcgtgcagataatgacaaggartatctagtacttactttaacaaaaaatgatcttgacaaagcaaataaagacaaagccaaccgatacttttctccaaattttaaggtgaagctgtacttcacaaaaacagtagaggagccgtcaaatccagaggctagcagttcaacttctgtaacaccagatgttagtgacaatgaacctgatcattatagatattctgacaccactgactctgatccagagaatgaaccttttgatgaagatcagcatacacaaattacaaaagtctgaatttttttttatcaagagggataaaacaccatgaaaataaacttgaataaactgaaaatggacctttttttttttaatggcaataggacattgtgtcagattaccagttataggaacaattctcttttcctgaccaatcttgttttaccctatacatccacagggttttgacacttgttgtccagttgaaaaaaggttgtgtagctgtgtcatgtatatacctttttgtgtcaaaaggacatttaaaattcaattaggattaataaagatggcactttcccgttttattccagttttataaaaagtggagacagactgatgtgtatacgtaggaattttttccttttgtgttctgtcaccaactgaagtggctaaagagctttgtgatatactggttcacatcctacccctttgcacttgtggcaacagataagtttgcagttggctaagagaggtttccgaarggttttgctaccattctaatgcatgtattcgggttagggsaatggaggggaatgctcagaaaggaaataattttatgctggactctggaccatataccatctccagctatttacacacacctttctttagcatgctacagttattaatctggacattcgaggaattggccgctgtcactgcttgttgtttgcgcatttttttttaaagcatattggtgctagaaaaggcagctaaaggaagtgaatctgtattggggtacaggaatgaaccttctgcaacatcttaagatccacaaatgaagggatataaaaataatgtcataggtaagaaacacagcaacaatgacttaaccatataaatgtggaggctatcaacaaagaatgggcttgaaacattataaaaattgacaatgatttattaaatatgttttctcaattgtaaaaaaaaaa

SEQ ID NO: 745 - DNA, 1400 bp, Homo sapiens; identical to SEQ ID NO: 744

SEQ ID NO: 746 - DNA, 1400 bp, Homo sapiens
  misc_feature (1008)..(1008): n is a, c, g, or t
attaattcttgactatataaatttatggtttgataatattatcaatttgtaatcaattgagatttctttagtgcttgcttttctgtgactcaactgcccagacacctcattgtacttgaaaactggaacagcttgggaatgccatggggtttgataatctgccagggacatgaagaggctcagcttcctggaccatgactttggctcagctgatcctgacatgggagaacaaccacatttttctttgtgtgtgcttctagcagctgttcgggaggaccttgacccaayagtgttcccatgctgtttcttgtgaaatgctctcggctatgtagcagcttttgattccctgcataccctaggctgctgcccctatcctgtcccttgtttataacattgagaggttttctagggcacatactgagtgagagcagtgttgagaagtcggggaaaatggtgactacttttagagcaaggctgggcatcagcacctgtccagctctacttgtgtgatgtttcaggaactcagcccctttttctgcctaggataaggagctgaaagattaacttggatcttctaatggtccaaatcttttggtcacaataaagagtctccaaattagagactgcatgttagttctggatggatttggtggcctgacatgataccctgccagctgtgaggggaccccgtttttaagatgcatggccaagctctctgcaaatggaaatgcttacactgggtgttggggatgtttgctacctcctgctatttttgtggttttggttctcccactatggtaggacccctggccagcattgtggcttgtcatgtcagccccattgactaccttctcatgctctgaggtactactgcctctgcagcacaaatttctatttctgtcaataaaaggagatgaaaatattctattggagtatgcctttcttttttctcttcgttttttctttccttttctaattttttatatgaaataatgagtaagtttcttnctgaaccatttgagagtggtaagttgcagatagaatgcccctttaccactatatacctgaatgtgtattctttcyttttaacacttttattttaaatataaattaagagaaatgggccaaaaccatttgtattgtttaaagaataattataaacacacttgtatccaccaaatcaagaaakggaacactgacagtaagaaccttctctatcttgtccttcctttctcattatagcccccacctaagaggtaaccaccatcttgacttttatttaaataactttcttgcttttctgtatactttcatcacattcaggtgtgttccaatacaagtagattttagttcggccagtttttgaactttaaataaacatatcataatagataaaaaaa

SEQ ID NO: 747 - DNA, 1400 bp, Homo sapiens
agatcatsgaawtcaatttgggcaacgagaccgatcctcatcagctcccaatgtgcatataaacacaatagaacctgtcaatattgatgacttgattagagaccaaggatttcgtggtgatggaggatcaaccacaggtttgtctgctaccccccctgcctcattacctggctcactaactaacgtgaaagccttacagaaatctccaggacctcagcgagaaaggaagtcatcttcatcctcagaagacaggaatcgaatgaaaacacttggtagacgggactcgagtgatgattgggagattcctgatgggcagattacagtgggacaaagaattggatctggatcatttggaacagtctacaagggaaagtggcatggtgatgtggcagtgaaaatgttgaatgtgacagcacctacacctcagcagttacaagccttcaaaaatgaagtaggagtacycaggaaaacacgacatgtgaatatcctactcttcatgggctattccacaaagccacaactggctattgttacccagtggtgtgagggctccagcttgtatcaccatctccatatcattgagaccaaatttgagatgatcaaacttatagatattgcacgacagactgcacagggcatggattacttacacgccaagtcaatcatccacagagacctcaagagtaataatatatttcttcatgaagacctcacagtaaaaataggtgattttggtctagctacagtgaaatctcgatggagtgggtcccatcagtttgaacagttgtctggatccattttgtggatggcaccagaagtcatcagaatgcaagataaaaatccatacagctttcagtcagatgtatatgcatttggrattgttctgtatgaattgatgactggacagttaccttattcaaacatcaacaacagggaccagataatttttatggtgggacgaggatacctgtctccagatctcagtaaggtacggagtaactgtccaaaagccatgaagagattaatggcagagtgcctcaaaaagaaaagagatgagagaccactctttccccaaattctcgcctctattgagctgctggcccgctcattgccaaaaattcaccgcagtgcatcagaaccctccttgaatcgggctgstttccaaacagaggattttagtctatatgcttgtgcttctccaaaaacacccatccaggcagggggatatggtgcgtttcctgtccactgaaacaaatgagtgagagagttcaggagagtagcaacaaaaggaaaataaatgaacatatgtttgcttatatgttaaattgaataaaatactctctttttttttaaggtgrammaaaraaaaaaaaaaaaaaaaaaaaaaaaaaaaaaaaccc

SEQ ID NO: 748 - DNA, 1400 bp, Homo sapiens
aactgataaccccacagcaaatagcaatttgtacatcctggcgggtcatgaaaacagttactgagaattgttgtgctttgacagttaactctagaaagaaagaacactaccactgcaacattaatggatgcttgaagctgtacaaaagctgcagtaacctgtcttcagttactttgtaatttattgtggcatgagataagatggggaaaattttgttttaagtggtatggatatatttagcatattgaaccacacaagtgcttaattcattgttatgtaatctttgtacatataggcagtattttttctgtgaaacttcatattgctgaagacatacactaagaatttatgtagataatgtacttttatgagatgtacaagtaagtgtcttatctgtacagatgtaaatgttgatgaaaatgcaattggggttaatattttaagaattctttagtatattcttgggtgtggctatattacaaaatgggatgctggcaatgaaacaatacatttaacactattgtatttttattatatgtaatttagtaatatgaatataaatcttgtaacttttaaaattgtaatggaggctgtaatcattttataatctttttaattttaatgcaagtacactggtgtttatatttgcacaaagtattgatatgtgatgtattaagtcacaaaagtaagctgtgacattgtctataagcatttggctccacaaatgtatttggattgttttctatgtgaagcaaaccaattataattaaccacatgttgtagtaactggtctttttatatttaagcagaatcctgtaagattgcttgtctttgcttaaaaacaatacctttgaacatttttgaatcacagaatagcggtaccatgatagaatactgcaattgtggtcagaattacagtatgcacaaagaattaattagcattattaaagagtcctcactaaacatttcatatgatcacactgaagaactgtaacattccatagagtgaagtggttcaaatttctcttggaatttttacttttgttggccttattttatgatccttttcatatttcttttgacttagagtattaatacatggccaaaataatttagttactacctcatacaaacaatataatggttactacacatcacaggaacttagttttggtttaagtcatttttgattgcttttttccaatggaatatgtatataccaggttttagcaaaatgcacacttttggctctttttggtatatgttctttatattttaatgtgagtatatacactaagaacaaactaaattgtgatttatgatcttcatttattttaatgataatggttttaaaatatgttcctgattgtacatattgtaaaataaacatgttttttaac

SEQ ID NO: 749 - DNA, 1400 bp, Homo sapiens; identical to SEQ ID NO: 748

SEQ ID NO: 750 - DNA, 1400 bp, Homo sapiens
ggaggcacactgccccctccagactttccacctccaccactgccggactcagccatcttcctgccccccagcctggatcctttaccagggccagtggtccggggccgtggtggggctgaggcccgtggcccaccacctcccaaggcccatccaaggcctccactgcccccaggcccctcaccagccagcactttcctgggggaagtggscagtggggatgaccggtcctgctcggtgctgcagatggccaagacgctgagcgaggtggactatgcccctgctgggcctgcassctcagcgctcctcccaggccccctggagctgcagcccccccggggactgccctcggactatggccggcccctcagcttccctccaccccgcatccgggagagcatccaggaagacctggcagaggaggctccgtgcctgcagggcgggcgggccagcgggctgggcgaggcaggcatgagtgcctggctgcgggccatcggcttggagcgctatgaggagggcctggtgcataatggctgggacgacctggagtttctcagtgacatcaccgaggaggacttggaggaggctggggtgcaggacccggctcacaagcgcctccttctggacaccctgcagctcagcaagtgatagcggaggcaccacgaagctgtgaactcagagcccctccctgctaccaaggcccagctatggccccagggttgaaaagttatgagggtcagggcagtatctctctgcctatttattggggtgcctatttattggggatctgcattccccgctgcccaatcatttgcaatgccctaattagggcatcctgcccctcgccttttaggctcaggacggaaggtcagttgccatggttaccgaggaccctggttactctggtgctgtcctgttttactggaccccgcctcccagccccaggggtgcctgtgggggtccatttgggtacgtctgggcccccactttcaccagtttctgcggccttccaccgggcctgaaccacagcggaggagctccgctaagacctccccacccccgctgggggtgggggcgggtgtccgtccggaaatgaaggaatagcccgaggaccgggctggggtttatttaaactgttctgtgtgggtctggggagggagagcaccttaatattattggggttggttggggtggggcaggatctcagccataaagtgccagtttgcttagttctcactgtctcctggtctgtgctgccctgctctggggatgcacggcggcagggtgggggagggaggttcctcgcaggtctcagcccgggacagggtcttgcaagcagcctcctgggcagtcgtaagggttgcggcgtgatgtcttcaataaattaagttttatttggaaaa

SEQ ID NO: 751 - DNA, 600 bp, Homo sapiens
cagcaggagggacaatgcggccaggggacgagcgccttccttgcccacctcactgccacattccagtgggacggccacggggggacctaggccccagggaaagagccccatgccgccccctaaggagccgcccagacctagggctggactcaggagctgggggggcctcacctgttcccctgaggaccccgccggacccggaggctcacagggaacaagacacggctgggttggatatgcctttgccggggttctggggcagggcgctccctggccgcagcagatgccctcccaggagtggaggggctggagagggggaggccttcgggaagaggcttcctgggccccctggtcttcggccgggtccccagcccccgctcctgccccaccccacctcctccgggcttcctcccggaaactcagcgcctgctgcacttgcctgccctgccttgcttggcacccgctccggcgaccctccccgctcccctgtcatttcatcgcggactgtgcggcctgggggtggggggcgggactctcacggtgacatgtttacagctgggtgtgactcagtaaagtggatttttttttctttaaaaaaaa

SEQ ID NO: 752 - DNA, 600 bp, Homo sapiens; identical to SEQ ID NO: 751

SEQ ID NO: 753 - DNA, 1400 bp, Homo sapiens
agtcatggctcagaggtgcttgtaaatgtcttgggaagaggtttctgtaacccctgccctggtgtgaggaggaaatggctctggcctggctgcctggccgtggcttctctttggctcccaaagagaaggacagtgttgggagtatctgccgtggcttctctttggctcccaaagagaaggacagtgttgggagtatctgccggcgctgtccaggtcctttagtcagcgtcactccatctgatgtgcagaagctgggctgcacctgcgggggtgggcatagaccgggctgggtctgcagcagcccctggtcctgagcaggcggcagtgaacagcactggcccacctcccactcacagcccctctgtcccctctgcagtgcacccaggtgggcccctctgcgtgcctttgggtgctcccctctcgtggtcgttctggcccgaggcccttagagtatggaggctgagccaggccttgggtttccccagcacagcctcctgtcgctgcatgcgacgtgttgggatttttggatgaaagactctcccacgctctgttggtggacttagctgcctcactggaagtgatgtgggtggaaggtggttgtatgttaccttttccacctctcattgttttccccagaacattgtagatgggggttggcagagggagaaataagccagccacggcagtcgcttggtttcccaggtggaatgggctaacacaggagatgatgggaacctgtcccgcagtccctgcatgaccattggccctgctggcctggcgatgtgggcatcctggggttcttagggtcccagaacaagccccaggcaagctggaacttgggtggggaggggacatgaggaggataaacagctgactgtggcttcaaggacatcagggccaccccaagtcctcagtgtcctactcctggcaaggagttgggtttggatcaaaagtgtttaaaattaatatgttgtcagtgattagaacaacactgtttacataaaaaccatttttctaattctaacaagttagaatgtgaggaaggaatgaacatgagtgtttaggaacctgccctttggtgctgggctggcgtcccgcactggggtgtcctcgctgtctgggggctgctctgctgccccggcccaggtccccttgtggtgttgccagacgggcctcatggtctgctgtgcagagagaggcaggaaggatccctgaagagtcttggagaaaaggttctgtgccctcaggtggggcttaccccctcgtatttataatcttaatttatatagtgaccaccgtggaaacaaacgcctcttgtattgtcatgtacatagtccatacctgagtgctgtacataagttgttctgtgtataaataaaacaagcctgtttttgatcttc

SEQ ID NO: 754 - DNA, 1400 bp, Homo sapiens
ggcatcccrcagtttcacagtccagttgggtcaccacttaagtcaayacaggccacakkaacaccttctgctatgaaatcttcccctcaaattcctcatcaaacatacagcagcattctgaaacatctgarctaaaacactcagcagacatttatctttgtattcttcatgaaatgtgttttgtctttttttattactagtgtttaagtcattttttacttgaatcagatggtgtcatttagtaaggattttatgagttcttgttttttaaaatccagactttctttttctacatgtgagatagttttcattttaactggcatgtcatttgcacacaaaaataaagactagagcaaaataatgcaacgcaggaggagaaaagaaatgcactaagacaagaacattctctcatagaacattgatctgttttacaggaaacaaaccttgccttgaaatttacacagtgagactgtacataattgcatgaaaatagctatttttttcctaagacatttttcattcatgaatattttcaagtttttcatactgtacacatttcttaaaacacatgataccagcagcaactgaaaatgaatgccgaatttggtacacatgtgttatctacctcaaggtaacaagagtatgtggcaaaacatataccacccatagtgcttcacaaaatgcacttctatttagccagcgtttattgtagtaaactattcttaataaaactcactcactgtttataaatgttctggtatgcattctttatagtgaagtgttaatacatcacatcttatttattttagcaaatcagtatattttctgtatttaattataaaaaattaacttagtttttaaaatttatttgcaaatatactttactttttccatttggcactatggtttgttgcctacctagctgcatctataatgtcagcttatcctaaggctgtccacgtacttaatttacttaagtgttcattttaagtaacgtgctcactgtgtataggaatttgtattttggaggtgcttgatctatctacaaagaaaaattaattaggaattactttattataaaatgctcctagaagtcttaattgtgtttattttttaaaaaaacaaatgttagacttgtgtgcatggaagtaattaaggtacatcattattgtagtttgaaagttgtacatgataagacattttgtttttactgtatgtttttactgaatgatctattccccatcccaaggcaagcatgaataaaattaggttaaacgtagcatgtggcatcgcagtctcttagaatttgtttcatctattttattttattgaatactgtctgtatctttggttatcctgtttgaagaaaaaggacaaataaaacatggccagcaaataca

SEQ ID NO: 755 - DNA, 1400 bp, Homo sapiens; identical to SEQ ID NO: 754

SEQ ID NO: 756 - DNA, 1400 bp, Homo sapiens
ccagatgttgtgacagaatgtagattgggactgaaggaggagaacccttccaaaaaagcctttgaggaatgtactagagttgcccataactacctaagaggggaaccatttgaagaataccaagaaagctcatatttttctcagtttttacaatggaaatggctggaaaggcaacccgtaacaaagaacacatttagacattacagagttctaggaaaaggcggatttggagaggtgagtaacgggagccagttcatagcagcgctgctagctgggtggggagywagtttagcctacgcttatgaaaccaaagatgccttgtgcttggtgctcaccattatgaatggaggggatttgaagtttcacatttacaacctgggcaatcccggctttgatgagcagagagccgttttctatgctgcagagctgtgttgcggcttggaagatttacagagggaaagaattgtatacagagacttgaagcctgagaatattctccttgatgatcgtggacacatccggatttcagacctcggtttggccacagagatcccagaaggacagagggttcgaggaagagttggaacagtcggctacatggcacctgaagttgtcaataatgaaaagtatacgtttagtcccgattggtggggacttggctgtctgatctatgaaatgattcagggacattctccattcaaaaaatacaaagagaaagtcaaatgggaggaggtcgatcaaagaatcaagaatgataccgaggagtattctgagaagttttcagaggatgccaaatctatctgcaggatgttactcaccaagaatccaagcaagcggctgggctgcaggggcgagggagcggctggggtgaagcagcaccccgtgttcaaggacatcaacttcaggaggctggaggcaaacatgctggagccccctttctgtcctgatcctcatgccgtttactgtaaggacgtcctggatatcgagcagttctcggcggtgaaagggatctacctggacaccgcagatgaagacttctatgctcggtttgctaccgggtgtgtctccatcccctggcagaatgagatgatcgaatctgggtgtttcaaagacatcaacaaaagtgaaagtgaggaagctttgccattagatctagacaagaacatacataccccggtttccagaccaaacagaggcttcttctatagactcttcagaagagggggctgcctgaccatggtccccagtgagaaggaagtggaacccaagcaatgctgagcaccccggtgcggaccacagagcagaccctggcgccaggaaggagcatgtgttagcgtctcgtcccacctggaattgtaataaatacatctaaataaaacatgccttgggagtgtacagac

SEQ ID NO: 757 - DNA, 600 bp, Homo sapiens
aatggaagcgtgttacttacaaagaggtgctcagcttcaagcctccccggcagctgggggccagggtctccaaggagacgcctctgtgaagatctctgggctccggggtggcagtgaggaccaccttcaccttccacctgagaggggactctcgttgccaccttgaccttggctggggcttgcatcccaaggcatccatcagagcagacgcccgggttccatggaccctcctccccacggccatgcctctgctcttgggcgcccatcatggaggagcacctgaactttctggacaagacctctggccgacctggggatggcctctgatycctggagcagtggcccacttgcccggtgctctcagaaacctcagagctggtggggctccagatcaggccttggcctctgagccctgcctgctctgggccatgcagaggaaggacagagggtgggcgcagggcaccaactcagggacatcccctctcctgggcgacgtcagtggaccttcctgcacccccagcctggaatgtaaatcagctgtgtggtgcccgcgtggctggaaggaaatagacccttttgtagctccctgaaaaaaaaaaa

SEQ ID NO: 758 - DNA, 600 bp, Homo sapiens; identical to SEQ ID NO: 757

SEQ ID NO: 759 - DNA, 1400 bp, Homo sapiens
tctggcaaaaatctcctcrgaacacgcccggacatatatccagtccctgccccccatgccccagaaggacctgagcagcatcttccgtggagccaaccccctggccatagacctccttggaaggatgctggtgctggacagtgaccagagggtcagtgcagctgaggcactggcccacgcctacttcagccagtaccacgaccccgaggatgagccagaggccgagccatatgatgagagcgttgaggccaaggagcgcacgctggaggagtggaaggagctcacttaccaggaagtcctyagcttcaagcccccagagccaccgaagccacctggcagcctggagattgagcagtgaggtgctgcccagcagcccctgagagcctgtggaggggcttgggcctgcacccttccacagctggcctggtttcctcgagaggcacctcccacactcctatggtcacagacttctggcctaggacccctcgccttcaggagaatctacacgcatgtatgcatgcacaaacatgtgtgtacatgtgcttgccatgtgtaggagtctgggcacaagtgtccctgggcctaccttggtcctcctgtcctcttctggctactgcactctccactgggacctgactgtggggtcctagatgccaaaggggttcccctgcggagttcccctgtctgtcccaggccgacccaagggagtgtcagccttgggctctcttctgtcccagggctttctggaggrcgcgctggggccgggaccccgggagactcaaagggagaggtctcagtggttagagctgctcagcctggaggtagggsgctgtcttggtcactgctgagacccacaggtctaagaggagaggcagagccagtgtgccaccaggctgggcagggacaaccaccaggtgtcaaatgagaaaagctgcctggagtcttgtgttcacccgtgggtgtgtgtgggcacgtgtggatgagcgtgcactccccgtgttcatatgtcagggcacatgtgatgtggtgcgtgtgaatctgtgggcgcccaaggccagcagccatatctggcaagaagctggagccggggtgggtgtgctgttgccttccctctcctcggttcctgatgccttgaggggtgtttcagactggcggcaccgttgtggccctgcagccggagatctgaggtgctctggtctgtgggtcagtcctctttccttgtcccaggatggagctgatccagtaacctcggagacgggaccctgcccagagctgagttgggggtgtggctctgccctggaaagggggtgacctcttgcctcgaggggcccagggaagcctgggtgtcaagtgcctgcaccaggggtgcacaataaagggggttctctctcagaaaaaaa

SEQ ID NO: 760 - DNA, 1400 bp, Homo sapiens; identical to SEQ ID NO: 759

SEQ ID NO: 761 - DNA, 600 bp, Homo sapiens
tgcaggccctggcagacgagaagaacggggcccagacccggcctgctggtgccccaccccgaagcctgcagcccccacccggccgcccagacccagagctgagcagctctccccgccgaggcccccccaaggacaagaagctcctggccaccaacgggacccctctgccctgaccccacggggccggggagggaggggacccccctccaccccccttccgtgccccccaactgtgaatctgtaaataaggcccaaggaacatgtcgggaggggggtggacacaaaaaccggccttgccctgcagggatggggctccacaggccgtgcccaactgggggtggttctaggggaacagggggcgggggagctgtttctattttatttattgattaatttattattttatttattgatcaatctctctgcggggtggggtgggggagggacgggagctggttggggtggcttagcagatccggacagggccctctgtccctgtgtcgtccccaaccccctcttcccgggcccctcctcccctggtcctccccccacgaccttctgtacggatttgctctccggaaggaattctggtttcgcgtg

SEQ ID NO: 762 - DNA, 1400 bp, Homo sapiens
ccattgaacaggactaccggctgcccccgcccccagactgtcccacctccctccaccagctcatgctggactgttggcagaaagaccggaatgcccggccccgcttcccccaggtggtcagcgccctggacaagatgatccggaaccccgccagcctcaaaatcgtggcccgggagaatggcggggcctcacaccctctcctggaccagcggcagcctcactactcagcttttggctctgtgggcgagtggcttcgggccatcaaaatgggaagatacgaagaaagtttcgcagccgctggctttggctccttcgagctggtcagccagatctctgctgaggacctgctccgaatcggagtcactctggcgggacaccagaagaaaatcttggccagtgtccagcacatgaagtcccaggccaagccgggaaccccgggtgggacaggaggaccggccccgcagtactgacctgcaggaactccccaccccagggacaccgcctccccattttccggggcagagtggggactcacagaggcccccagccctgtgccccgctggattgcactttgagcccgtggggtgaggagttggcaatttggagagacaggatttgggggttctgccataataggaggggaaaatcaccccccagccacctcggggaactccagaccaagggtgagggcgcctttccctcaggactgggtgtgaccagaggaaaaggaagtgcccaacatctcccagcctccccaggtgcccccctcaccttgatgggtgcgttcccgcagaccaaagagagtgtgactcccttgccagctccagagtgggggggctgtcccagggggcaagaaggggtgtcagggcccagtgacaaaatcattggggtttgtagtcccaacttgctgctgtcaccaccaaactcaatcatttttttcccttgtaaatgcccctcccccagctgctgccttcatattgaaggtttttgagttttgtttttggtcttaatttttctccccgttccctttttgtttcttcgttttgtttttctaccgtccttgtcataactttgtgttggagggaacctgtttcactatggcctcctttgcccaagttgaaacaggggcccatcatcatgtctgtttccagaacagtgccttggtcatcccacatccccggaccccgcctgggacccccaagctgtgtcctatgaaggggtgtggggtgaggtagtgaaaagggcggtagttggtggtggaacccagaaacggacgccggtgcttggaggggttcttaaattatatttaaaaaagtaactttttgtataaataaaagaaaatgggacgtgtmcmagctccaggrrwraaaaaaaaaaaaaaaaaaactcgagactagttc

SEQ ID NO: 763 - DNA, 1400 bp, Homo sapiens; identical to SEQ ID NO: 762

SEQ ID NO: 764 - DNA, 1400 bp, Homo sapiens
  misc_feature (1394)..(1394): n is a, c, g, or t
ctgaacccgcgcggcggcaagggcaaggccttgcagctcttccggagtcacgtgcagccccttttggctgaggctgaaatctccttcacgctgatgctcactgagcggcggaaccacgcgcgggarctggtgcggtcggaggagctgggccgctggracgctctggtggtcatgtytggagacgggctgatgcacgargtggtgaacgggctyatggagcggcctgactgggagaccgccatccaraagcccctgkgtagcctcccagcaggctctggcaacgcsctggcagcttccttraaccattatgctggctatragcaggtcaccaatgaagacctcctgaccaactgcacgctattgctgtgccgccggctgctgtcacccatgaacctgctgtctctgcacacggcttcggggctgcgcctcttctctgtgctcagcctggcctggggcttcattgctgatgtggacctagagagtgagaagtatcggcgtctgggggagatgcgcttcactctgggcaccttcctgcgtctggcagccctgcgcacctaccgcggccgactggcctacctccctgtaggaagagtgggttccaagacacctgcctcccccgttgtggtccagcagggcccggtagatgcacaccttgtgccactggaggagccagtgccctctcactggacagtggtgcccgacgaggactttgtgctagtcctggcactgctgcactcgcacctgggcagtgagatgtttgctgcacccatgggccgctgtgcagctggcgtcatgcatctgttctacgtgcgggcgggagtgtctcgtgccatgctgctgcgcctcttcctggccatggagaagggcaggcatatggagtatgaatgcccctacttggtataygtgcccgtggtcgccttccgcttggagcccaaggatgggaaaggtgtgtttgcagtggatggggaattgatggttagcgaggccgtgcagggccaggtgcacccaaactacttctggatggtcagcggttgcgtggagcccccgcccagctggaagccccagcagatgccaccgccagaagagcccttatgacccctgggccgcgytgtgccttagtgtctacttgcaggacccttcctccttccctagggctgcagggcctgtccacagctcctgtgggggtggaggagactcctctggagaagggtgagaaggtggaggctatgctttggggggacaggccagaatgaagtcctgggtcaggagcccagctggctgggcccagctgcctatgtaaggccttctagtttgttytgagacccccaccccacgaaccaaatccaaataaagtgacattcccaaaaaaaaaaaaaaaaaaaaaaaaaamccgngggggg

SEQ ID NO: 765 - DNA, 600 bp, Homo sapiens
catttttcagtaataaaaaaagttactgaatttaattgttgaatatgatgcatatctcattcattacgatttatcagaaaccaaagatttaaattgcctagatttgtggttctttctcttcctaagttcccagcgactgctttcaaatactattttctaaatttcaccaaaggagcaaagaggataaaacaacactccataaaggcctcttgggatgtcagaaatctaaaatctaaaagaaaacagacacagagcaagacaataacatcacaagctaaaagccagagaaatttaaaattaccaacatccttgttggagtaagacagtaaatatcagccttgcagcaagacagctctgagcagctgtgggcaaagaggtaaaccagtgggggtgcaaggagactgtctgcagcttagggcagaaatggtgggatccaacttgtgaaatgcttcatgttttacaaaccaaaaagtcaggtagcaacaaacttattgtatgtcaaatcaataaatgttactttcaatattctgagattctgttcagcattcactaaccctgtttagcattcactaagccctacataggattctcagtgctctg

SEQ ID NO: 766 - DNA, 600 bp, Homo sapiens; identical to SEQ ID NO: 765

SEQ ID NO: 767 - DNA, 1400 bp, Homo sapiens
agactctgcagagccctgggtatgacccaagccggccagagtccttcttccagcagagcttccagaggctcagccgcctgggccatggctcctacggagaggtcttcaaggtgcgctccaaggaggacggccggctctatgcggtaaagcgttccatgkcaccattccggggccccaaggaccgggcccgcaagttggccgaggtgggcagccacgagaaggtggggcagcacccatgctgcgtgcggctggagcaggcctgggaggagggcggcatcctgtacctgcagacggagctgtgcgggcccagcctgcagcaacactgtgargcctggggtgccagcctgcctgaggcccaggtctggggctacctgcgggacacgctgcttgccctggcccatctgcacagccagggcctggtgcaccttgatgtcaagcctgccaacatcttcctggggccccggggccgctgcaagctggktgacttcggactgctggtrgasytgggtacagcaggagctggtgaggtccaggagggagacccccgctacatggcccccgagctgctgcagggctcctatgggacagcagcggatgtgttcagtctgggcctcaccatcctggaagtggcatgcaacatggagctgccccacggtggggagggctggcagcagctgcgccagggctacctgccccctgagttcactgccggtctgtcttccgagctgcgttctgtccttgtcatgatgctggagccagaccccaagctgcgggccacggccgaggccctgctggcactgcctgtgttgaggcagccgcgggcctggggtgtgctgtggtgcatggcagcggaggccctgagccgagggtgggccctgtggcaggccctgcttgccctgctctgctggctctggcatgggctggctcaccctgccagctggctacagcccctgggcccgccagccaccccgcctgrctcaccaccctgcagtttgctcctggacagcagcytctccagcaactgggatgacgacagcctagggccttcactctcccctgaggctgtcctggcccggactgtggggagcacctccaccccccggagcaggtgcacacccagggatgccctggacctaagtgacatcaactcagagcctcctcggggctccttcccctcctttgagcctcggaacctcctcagcmtgtttgaggacaccctagacccaacctgagccccagaytctgcctctgcacttttaaccttttatcctgtgtctctcccgtcgcccttgaaagctggggcccctcgggaactcccatggtcttctctgcctggccgtgtctaataaaaagtatttgaaccttgrrarmammmaarvwwrmwmatgtggcggaattcc

SEQ ID NO: 768 - DNA, 600 bp, Homo sapiens
cagaggtcaggcagcaacatagagcagtacattcacgatctggactcgaactcctttgaactggacttacrgywktsckrwgatgwgmwgaggttswtgttggmgaagywskctggcksawacccwwrgcaccagtttgtagaaaataatttaatactaaagatgggcccagtggataagcggaagggtttatttgcaagacgacgacagctgttgctcacagaaggaccacatttatattatgtggatcctgtcaacaaagttytgaaaggtgaaattccttggtcacaagaacttcgaccagaggccaagaattttaaaactttctttgtccacacgcctaacaggacgtattatctgatggaccccagcgggaacgcacacaagtggtgcaggaagatccaggaggtttggaggcagcgataccagagccacccggacgccgctgtgcagtgacgtrgystgcggccgggctgcccttcgctgccaggacacctgccccarcgcggcttggccgccatccgggacgcttccagaccacctgccagccatcacaakgggracgcagaggcggaaaccttgcagsatttttatttaaaa

SEQ ID NO: 769 - DNA, 600 bp, Homo sapiens
  misc_feature (582)..(582): n is a, c, g, or t
ctcctactgctctgagcccacactcctcaaaaaggccaacaaaaaacagaacttcaagtcggaggtcatggtaccagttaaagccagtggcagctcccactgccgggcagggcagactggagtctgtctcattatgtgattcctggagcctgtgcctatgtcactgcaattttcaggagacatattcaactcctctgctcttccaaacctggtgtctatccggcagagggaggaaggcagagcaagtggagcagggcttagcaggagcagtttctggccagaagcaccagcctgctgccagcggggcagcccctcataggaggcccaggagggagccccaaggcgtagaagccttgttgaagctgtgagcaggagaagcggtgcccaccagcttccaggtctccctgacctgcctgctctatgccccacaccctacgtggccgtggctctgtgcagtgttacgttagatagctctcgcctgggtctgtgctgtttgtcgtgaaaagcttaatgggctggccaggctgtgtcaccttctccaagcaaagccatatggagcatctacccagactcccactctgnacacactcactcccacct

SEQ ID NO: 770 - DNA, 600 bp, Homo sapiens; identical to SEQ ID NO: 769
  misc_feature (582)..(582): n is a, c, g, or t

SEQ ID NO: 771 - DNA, 1400 bp, Homo sapiens
ggcttgtctgtcggccctgtctgaagtgamggtgcagccrggctgctmcctgcccagcaaccctgargccattgtgctggacrtcgactacaagtctgggaccccgatgcagagtgctgcaaaagccccatatctggccaagttcaaggtgaagcgatgtggagttagtgaacttgaaaaagaaggtctgcggtgccgctcagactccgaggatgagtgcagcacgcaggaggccgacggccagaagatctcctggcaggcagccatcttcaaggtgggagacgactgccggcaggacatgctggccctgcagatcatcgacctcttcaagaacatcttccagctggtcggcctggacctctttgtttttccctaccgcgtggtggccactgcccctgggtgyggggtgatcgagtgcatccccgactgcacctcccgggaccagctgggccgccagacagacttcggcatgtacgactacttcacacgccagtacggggatgagtccacyctggccttccagcaggcccgctacaacttcatccgaagcatggccgcctacagcctcctgctgttcctgctgcagatcaaggacagacacaacggcaacattatgctggacaagaagggycatatcatccacatcgactttggcttcatgtttgaaagctcgccgggcggcaatctcggctgggaacccgacatcaagctgacggatgagatggtgatgatcatggggggcaagatggaggccacacccttcaagtggttcatggagatgtgtgtccgaggctacctggctgtgcggccctacatggacgcggtcgtctccctggtcactctcatgttggacacgggcctgccctgttttcgcggccagacaatcaagctcttgaagcacaggtttagccccaacatgactgagcgcgaggctgcaaatttcatcatgaaggtcatccagagctgcttcctcagcaacaggagccggacctacgacatgatccagtactatcagaatgacatcccctactgaggaggggaccttcgagggcctctgscccatgtgccctcaaagctgtcccacaatcatggagccctgcgacctccctgccctgccgccacatgcagtggaggagaggcctgtggcccaaagaacctggtagcgcctcctggggcagcacgtgggtggcgcagccttggtaacgccatggactgcagcgacaatcaatggatggtgctgtctatgcacaggtgtgagtcctctgtttgcactggacatattccctacctgtcttatttcataggtacatgaagtattgtgtataaaaaaagagataagatttaaccaacatcaacaaaataaaaacccaaaatagtaaaaacccaaaaaaaaaaaaaaa

SEQ ID NO: 772 - DNA, 1400 bp, Homo sapiens
ccgttgggaccattgggcgccggagggccaatggctctgttgcgccccaggaaaggagccacaatgtgatagaggtggctacagacgcacctcttcgaaagcctggaggctattttgctgccccggctcagccggatcctgatgatcagtttatcatacccccggagctggaagaggaggtcaaagaaatcatgaagcatcaccaggagcaacagmagcagcagmagccgccaccaccccctcagytccagccgcagctgccgcggcactaccagctggaccagctgccagattattacgacacgccactatgacccagccgagctgtttaacaaataaactaaccacaaaagactgagttgcaagagtctcccaggctcacattaaaccaggggttttactccacatccttcccccagacactgttcccaacctgtcatcgcagstaatctgtaggttctctttcttkgggttatttttttaagtaatcaccactttcttctrgtgatgyttyaccaatatgatttacatttgttaacttctccccctaacatatcaratatgtaaagacaaagaacaaaaggtttaatatattacagagaaacagttaatgataatgtaatattttttaaaayggctttttgttgtttgtttggaaggcagggcaggctgccgttgctaaatgatttaataatattgtaattctgtatttctttggggggaaaaggcttttgttttgttttgttttgttttgttttgtttttgtcttgaaaataatagacatttgtagaatatggagactaactcctaggagttgctttactctgtcaggtgacttaagtcactgggattcactaattttctctgagagaacagctgattgagaatttccattgtaaatagctcagtgttgtatagtgaggyttacgatgttttgtagtcttggcgtaaggacacagcccaagtaactgacgtttcccctccccstcccctctgaggarcctgcctgcctcacaactcaccctcacttcactgaatgaggaggctgagcagctgcagtgtttctgtccggaggaaatggatcttaggccactggacaagaacctgcacccaagggccctgaacccattttcctcccctgtcccagccttcccactttgacagacacttttaactgtgttccttactgctgccacaatcagcatggttgtatagtgccccattaggccatttacatacccagagttatactcaagcagaatgcacaaatggacatgtcataatttttgttacaataaatatgaaatttacaagtaaaaaaaaaaaaaargggcggccgctctagagtatccctcgaggggcccaagcttacgcgtacccagctttcttgtacaaagtgg

SEQ ID NO: 773 - DNA, 600 bp, Homo sapiens
tgtggttttatctacgttattggaaagaaaatgacatttaaataatgtgtgtaatgtataatgtactattgacatgggcatcaacacttttattcttaagcatttcagggtaaatatattttataagtatctatttaatcttttgtagttaactgtactttttaagagctcaatttgaaaaatctgttactaaaaaaataaattgtatgtcgattgaattgtactggatacattttccatttttctaaagagaagtttgatatgagcagttagaagttggaataagcaatttctactatatattgcatttcttttatgttttacagttttccccattttaaaaagaaaagcaaacaaagaaacaaaagtttttcctaaaaatatctttgaaggaaaattctccttactgggatagtcaggtaaacagttggtcaagactttgtaaagaaattggtttctgtaaatcccattattgatatgtttatttttcatgaaaatttcaatgtagttggggtagattatgatttaggaagcaaaagtaagaagcagcattttatgattcataatttcagtttactagactgaagttttgaagtaaac

SEQ ID NO: 774 - DNA, 1400 bp, Homo sapiens
ctccagctgaaaccaaatattacmaattccgcaagacacctcctggarggsctcctgcagaaggacaggacaaagcggctcggggscaaggrtgacttcatggagattaagagtcatgtcttcttctccttaattaactgggatgatctcattaataagaagattactcccccttttaacccaaatgtgagtgggcccaacgasctacggcactttgaccccgagtttaccgaagagcctgtccccaactccattggcaagtcccctgacagcgtcctcgtcacagccagcgtcaaggaagctgccgaggctttcctaggsttttcctatgcgcctcccacggactctttcctctgaaccctgttagggcttggttttaaaggattttatgtgtgtttccgaatgttttagttagccttttggtggagccgccagctgacaggacatcttacaagagaatttgcacatctctggaagcttagcaatcttattgcacactgttcgctggaakctttttgaagagcacattctcctcagtgagctcatgaggttttcatttttattcttccttccaacgtggtgctatctctgaaacgagcgttagagtgccgccttagacggaggcaggagtttcgttagaaagcggacgctgttctaaaaaaggtctcctgcagatctgtctgggctgtgatgacgaatattatgaaatgtgccttttctgaagarattgtgttagctccaaagcttttcctatcgcagtgtttcagttctttattttcccttgtggatatgctgtgtgaaccgtcgtgtgagtgtggtatgcctgatcacagatggattttgttataagcatcaatgtgacacttgcaggacactacaacgtgggacattgtttgtttcttccatatttggaagataaatttatgtgtagacttttttgtaagatacggttaataactaaaatttattgaaatggtcttgcaatgactcgtattcagatgcytaaagaaagcattgctgctacaaatatttctatttttagaaagggtttttatggaccaatgccccagttgtcagtcagagccgttggtgtttttcattgtttaaaatgtcacctgtaaaatgggcattatttatgtttttttttttgcattcctgataattgtatgtattgtataaagaacgtctgtacattgggttataacactagtatatttaaacttacaggcttatttgtaatgtaaaccaccattttaatgtactgtaattaacatggttataatacgtacaatccttccctcatcccatcacacaactttttttgtgtgtgataaactgattttggtttgcaataaaaccytgaaaaatawwwaaaaaaaaaaaaaaaaarrggcggccgc

SEQ ID NO: 775 - DNA, 1400 bp, Homo sapiens
cacctcagagccagtattacctggctgagaagcaccttttcagcaccatccctgagctcattaactaccatcagcacaactctgcaggactcatatccaggctcaaatatccagtgtctcaacaaaacaagaatgcaccttccactgcaggcctgggatacggatcatgggaaattgatccaaaggacctgaccttcttgaaggagctggggactggacaatttggggtagtgaagtatgggaaatggagaggccagtacgacgtggccatcaagatgatcaaagaaggctccatgtctgaagatgaattcattgaagaagccaaagtcatgatgaatctttcccatgagaagctggtgcagttgtatggcgtctgcaccaagcagcgccccatcttcatcatcactgagtacatggccaatggctgcctcctgaactacctgagggagatgcgccaccgcttccagactcagcagctgctagagatgtgcaaggatgtctgtgaagccatggaatacctggagtcaaagcagttccttcaccgagacctggcagctcgaaactgtttggtaaacgatcaaggagttgttaaagtatctgatttcggcctgtccaggtatgtcctggatgatgaatacacaagctcagtaggctccaaatttccagtccggtggtccccaccggaagtcctgatgtatagcaagttcagcagcaaatctgacatttgggcttttggggttttgatgtgggaaatttactccctggggaagatgccatatgagagatttactaacagtgagactgctgaacacattgcccaaggcctacgtctctacaggcctcatctggcttcagagaaggtatataccatcatgtacagttgctggcatgagaaagcagatgagcgtcccactttcaaaattcttctgagcaatattctagatgtcatggatgaagaatcctgagctcgccaataagcttcttggttctacttctcttctccacaagccccaatttcactttctcagaggaaatcccaagcttaggagccctggagcctttgtgctcccactcaatacaaaaaggcccctctctacatctgggaatgcacctcttctttgattccctgggatagtggcttctgagcaaaggccaagaaattattgtgcctgaaatttcccgagagaattaagacagactgaatttgcgatgaaaatattttttaggagggaggatgtaaatagccgcacaaaggggtccaacagctctttgagtaggcatttggtagagcttgggggtgtgtgtgtgggggtggaccgaatttggcaagaatgaaatggtgtcataaagatgggaggggagggtgttttgataaaataaaattactagaaagcttgaaa

SEQ ID NO: 776 - DNA, 1400 bp, Homo sapiens
aatctgagatgcacaataaaacagttagccagaggtttggcctgcttttggagtcctattgtcgtgcatgtgggatgtatttgaagcacctgaataggcaagtcgaggcaatggaaaagctcattaacttaactgacattctcaaacagsmgmrgawggatgaaacacaaaaggtacagatgaagtttttagttgascmaatgaggcgaccagatttcatggatgcyctacagggcttkctgtctcctctaaaccctgctcatcaactaggaaacctcaggcttraagagtgtcgaattatgtcytctgcaaaaaggccactgtggttgaattgggagaacccagacatcatgtcagagttactgtttcagaacaatgagatcatctttaaaaatggggatgatttacggcaagatatgctaacacttcaaattattcgtattatggaaaatatctggcaaaatcaaggtcttgatcttcgaatgttaccttatggttgtctgtcaatcggtgactgtgtgggacttattgaggtggtgcgaaattctcacactattatgcaaattcagtgcaaaggcggcttgaaaggtgcactgcagttcaacagccacacactacatcagtggctcaaagacaagaacaaaggagaaatatatgatgcagccattgacctgtttacacgttcatgtgctggatactgtgtagctaccttcattttgggaattggagatcgtcacaatagtaacatcatggtgaaagacgatggacaactgtttcatatagattttggacactttttggatcacaagaagaaaaaatttggttataaacgagaacgtgtgccatttgttttgacacagrattycttaatastgattagtaaaggagcccaagaatgcacaaagacaagagaatttgagaggtttcaggagatgtgttacaaggcttatctagctattcgacagcatgccaatctcttcataaatcttttctcaatgatgcttggctctggaatgccagaactacaatcttttgatgacattgcatacattcgaaagaccctagccttagataaaactgagcaagaggctttggagtatttcatgaaacaaatgaatgatgcacatcatggtggctggacaacaaaaatggattggatcttccacacaattaaacagcatgcattgaactgaaaagataactgagaaaatgaaagctcactctggattccacactgcactgttaataactctcagcaggcaaagaccgattgcataggaattgcacaatccatgaacagcattagaatttacagcaagaacagaaataaaatactatataatttaaataatgtaaacgcaaacagggtttgatagcacttaaactagttcatttcaaaa

SEQ ID NO: 777 - DNA, 600 bp, Homo sapiens
agcagcccgtgcgacaaccacgcgtcgagtgagcagctctacttttccacgcccaccaaccacaacctgttcccactcaatacgctggagtccacgtgaggcctggtgcacggggggcatggcaccaggcccctgctcggctctccacagggctaggtgggagagcccaagcccgccacctctggcctgaggaacccccagatgtcacctgtgcccagaggcccaggctgatcggtgtcggagcgcccctcaccatccttgggggcagggcccgcaggcaaggtctcccactgcagggcttgctggagaggcctcggctcttggacacgtggctttgggcgtccaccagggcctcatcctgtccaggacgctcctttctgctgacagcccagccagtttggctgttttttaaagacacatccacggacctgagtttactttttacttttggcaggtaaatccaagctccctggagcacaaagagtgtttgagctcttcttgatttttcttttttttttttttttttaacaaaaagtgttattttcaggctacatgcaacagtggattgtataacccagtatttcatccctttcctgatcc

SEQ ID NO: 778 - DNA, 1400 bp, Homo sapiens
ggagagcgaggcagtggcggtggccctggcaggtcggctgcgggagctcctgcgggacctgccgcctgagaaccgggcctcgctgcagtacctgctgcgtcacctacgcaggatcgtggaggtggagcaggacaacaagatgacccccgggaacctgggcatcgtgttcgggcccacgctgcttcggccacggcccaccgaggccaccgtgtccctctcctccctggtggattatccccatcaggcccgcgtcatcgagactctcatcgtccactacggcctggtcttcgaggaggagccggaggagacccccgggggccaggacgagtcatccaaccagcgagctgaggtagtcgtccaggtgccgtacctggaggcgggcgaggcggtggtctacccgctgcaggaggcggcggcggacgggtgcagagaatcccgagttgtgtccaacgattcggactcggacctagaggaggcctccgagctgctgtcctcatcggaggccagtgccctgggccacctcagcttcctggagcagcagcagagcgaggccagcctagaggtggcttctggcagccacagcggcagtgaggagcagctggaggccacagcccgggaggacggggacggggacgaggacggcccggcccagcagctctcaggattcaacaccaaccagtccaacaacgtgctgcaggccccactgccccccatgaggctccgtggcgggcggatgacactgggctcctgcagggaaaggcagccggaattcgtgtgagctggggtggggctgggaccacaggtggcttctctcttgcctgctcctgtccctccagcacgtcccctgcaccacggcatagcttaggtgcgccgtcctggggtcgctgccgagagcgcctggacttcgacgtcccaccagcgggcgcctcctcccagaggcttccaggagcacgagggccttgcggcacaggactgtgccctgtgctgtcccctgcaccccggctcagctgagctggggaacactgctgtcgtgtgaagtcacagtggccttgttggtgcccacagggctgtgtggatggaggaagctgtccctgcccagtgcatcccccaggtcatcacggggacgcaggaggcaggccctgccctgccctctcctcacaggtctgttgcagggactccagaaaccattctgggagccgtggatgggggcggagctggggtttggtgcagtttccagggtgcagtacagcagggcctgaatactggccctggactcccttttccagaacaccaggtgtggccacctggggctcaggtacacagtggggtctctcggaagccaccgtgtggttctttcacaggcacgtttattttgctgaaataaaaagtttttaatcggg

SEQ ID NO: 779 - DNA, 1400 bp, Homo sapiens; identical to SEQ ID NO: 778

SEQ ID NO: 780 - DNA, 1400 bp, Homo sapiens
tcaagtagctgatgtgcagttgagaaaactagaggactgaaaaaacaaattttaactagcaaatgctgtgaattactcttcctccccttctctgaaatgggtaaaggacaaattgtgtaaaaaaacctatgcactatagaagggaatagtaaccatttcttttgtctctctgtttctgttctgactgagaacctgcagccatttcttgttacatgaaaacaaaatgctacttgttacctctattttttgttactatacaattatgaaatgtaatgtaagacaccaacagaaatgatatacctgtaactgtacctatcaggactatacctcatttacagtcagaaagcttactgggatgtcaggaaatgatacagggttggttctcatttcgtgccgaaatgagacagaaattcagtgacgaaggtgcgttgtaggggtattgatgtgccccaggtagtgccagcagagtagggaaaactgcatttgcataaaaactactcttgacatgattgttcattttacaaaaaaattccattaattaccaagccctcacccagcccatgtgtgataggatttatgtaggaagaaacttgattttcaaataattttttaaatgtatctcttgcctaaaggactatatacatctaataaagtaacactgtgtcatcttctggagttatcaaaaattgtatacaatcaagacaacacaagaattattttatttttgagtgcaaatacaggtactgttggagttgatgggcaccatgctttctcatgaagtagcatttccctaccatcaagccattgttttgtgccattcaggagaggaaaaaaaggaatttatgctgtacatttcagttcagtgtatgaccaaaagcaatatgtttataagaagatgtttgacatactaattattttatatcatttaaaccatactgtagcaacataatatatggagctaatttgtagaattatttttacgatttccaaacaaatgtactgtactgttatataatttattgtgaggaccttctcatggaagccattaggaaaacaaactagaggtaaatatcacattaatctgtattatcaatttctcatagacactgtgctaatgtgaattttaaatgacctgcatcaagtcttctgatctcagataactcagtacagatagcaattagtcagctgatttgattacaatggagtaaccgacaatatatttatttataaagcacatattcataataacgagaagaattcagaaaaccacttaagcaagacccttctgaaataaaaaatgttgctttttaaatagtttgtcctaaggtgtttaaaacatgtcaaccttatgtaaggaaaaatttcctggtccaaataaagttgaagtttaagaaaaattg

SEQ ID NO: 781 - DNA, 1400 bp, Homo sapiens; identical to SEQ ID NO: 780

SEQ ID NO: 782 - DNA, 600 bp, Homo sapiens
ttatggtctgaaccggcagatgtgtgtccctccgtggctacagagtggtaaacaaatctcacctttggggctgcgtttcatcacctcgtccacaatagtcaatcctaattgtggtcctgcctcttttctaagcatatggctaagactgtatgtgstgaattcctgggcctcctgcagaagcagaaagcctgctggggatggtgccagctgtgccttggctgttgtatttgaattgagatttttactatacaaagccacctagggcctggggatttgggtcagttgtagttgcctctcccccaccctcttttcccttcccaaaggtgggtgttgaactaggggggatattgctgtcctgagggaccctctcatttctgacatttgaagaaaacgtataaatctttcttaaccgtgaaagcaaaagcctttgggtttattttgggatagttaggagctagggtagaatataatttttttccaaaaacttacttacaaacaaaaagcctaatccctctattttaagatttctgraaaaacactccactccatgttatattctggggaaagcaaaaamaaaaaaaaaaaaaaaaamaaaamaaa

SEQ ID NO: 783 - DNA, 600 bp, Homo sapiens
tagtataatttcagatgaattgtattgaaaaaatgctgaggaatgaatgtgtcaaaatgggttaactgtgtatattgactttcatgtcgtcatgcatctgtcatgaatgaatgatactttgcactgggctgtacgacagtgaggaccttagggcatgaagcctttttcctggtcccagcagcatctgccctgtgaagtttgttttctcccactgcctccaggccccactgatacccccaaatagatgctgggttatgagaaccagcgaaatcccccatgtcatcagtcttaaaaaaaaaattttacaaatccacgtatttgtcccattcttggagtagttttagtgtatgtctttacattaactactaacagtataaataacttgacatcgtaattgtctgcatcctgtccttgatatttttagcagttccaaatctttgtttttgtatttgtttgctgtgttcatgggcaaagtaagtactttttaatgcagttattttgagagtttggaagataattaccaaaagggtccattatttcataagagttactttgcaaaaaaaaaaaaggggggttttttttttgggcaattccaccaag

SEQ ID NO: 784 - DNA, 600 bp, Homo sapiens
agatgacaaattggggctgtcgggggctgtggatgggtggggagcaaatcatctgcattcctgatgaccaatgggatgaggtcacttttttttttttcccccttgaggattgcggaaaaccaggaaaagggatctatgatttttttttccaaaacaatttcttttttaaaaagactattttatatgattcacatgctaaagccaggattgtgttgggttgaatatattttaagtatcagaggtctatttttacctactgtgtcttggaatctagccgatggaaaatacctaattgtggatgatgattgcgcagggaggggtacgtggcacctcttccgaatgggttttctatttgaacatgtgccttttctgaattatgcttccacaggcaaaactcagtagagatctatatttttgtactgaatctcataattggaatatacggaatatttaaacagtagcttagcatcagaggtttgcttcctcagtaacatttctgttctcatttgatcaggggaggcctctttgccccggccccgcttcccctgcccccgtgtgatttgtgctccattttttcttcccttttccctcccagttttc

SEQ ID NO: 785 - DNA, 600 bp, Homo sapiens; identical to SEQ ID NO: 784

SEQ ID NO: 786 - DNA, 600 bp, Homo sapiens
tttcattatcaagaatgagtatggttgcttttgccatggttgcttttactattaataaatgtatctagcctacccaaamtctgtagtaacttttgagattctcttaatttcccctcagattaaaatagagaaggttgaaggtactttttgatgaaatttttttctagtctggttagaaaaaaaaagttgtgacatattcattgtgttaccgtaactagaaccttgctttgtgaactgtctttcattgggatgtatggtttctctcaatgtgaaatctggaaacttcatgtaaactacccatgccgttatttcatgtgactccagtgcccttgtattccataacatgctgatgagagggatttctcacggtttctttctttgctaaattttttaaccataaagcagcttaccctttattttcccatcttggaagtaaaattgaccaaagaatgtacgttctagcctggtggaatgtgcatactttaggtttgtatgttacattgtccaaagccctttactttcttattagtaaactgaatctaatatgacacaaatgttttcacccaatctcttgcaactggtcaaattcgagaaggtgtg

SEQ ID NO: 787 - DNA, 600 bp, Homo sapiens; identical to SEQ ID NO: 786

SEQ ID NO: 788 - DNA, 600 bp, Homo sapiens
caggttaagctgtgtgattttggagttagcactcagctggtgaattctatagccaagacgtatgttggaacaaatgcttatatggcgcctgaaaggatttcaggggagcagtatggaattcattctgatgtctggagcttaggaatctcttttatggagcttgctcttgggaggtttccatatcctcagattcagaaaaaccagggatctttaatgcctctccagcttctgcagtgcattgttgatgaggattcgcccgtccttccagttggagagttctcggagccatttgtacatttcatcactcagtgtatgcgaaaacagccaaaagaaaggccagcacctgaagaattgatgggccacccgttcatcgtgcagttcaatgatggaaatgccgccgtggtgtccatgtgggtgtgccgggcgctggaggagaggcggagccagcaggggcccccgtgaggctgccgcagggcactgaaagcccaggaccagtaaccaaggagaacaacccacccgtcgcccttctccgtatgctgcctgcgccagaagagctttgctgggccctggcttccctgccctcgccttcacctctgtcag

SEQ ID NO: 789 - DNA, 600 bp, Homo sapiens; identical to SEQ ID NO: 788

SEQ ID NO: 790 - DNA, 1400 bp, Homo sapiens
  misc_feature (1313)..(1313): n is a, c, g, or t
  misc_feature (1396)..(1396): n is a, c, g, or t
  misc_feature (1399)..(1399): n is a, c, g, or t
gacttcgagaggacgctgggactcagcagcccatgtgacaacagggttccagcacagcagctgtattttaccaccccttccaaccagaatgtataccaggtggactctctgcaatctacgtgaaagaccccacacccctccttgctggaatgtgtctggcccttcagcagtttctcttggcagcatcagctgggctgctttctttgtgtgtggccccaggtgtcaaaatgacaccagctgtctgtactagacaaggttaccaagtgcggaattggttaatactaacagagagatttgctccattctctttggaataacaggacatgctgtatagatacaggcagtaggtttgctctgtacccatgtgtacagcctacccatgcagggactgggattcgaggacttccaggcgcatagggtagraccaaatgatagggtaggagcatgtgttctttagggccttgtaaggctgtttccttttgcatctggaactgactatataattgtcttcaatgaagactaattcaattttgcatatagaggagccaaagagagatttcagctctgtatttgtggtatcagtttggaaaaaaaaatctgatactccatttgattattgtaaatatttgatcttgaatcacttgacagtgtttgtttgaattgtgtttgttttttcctttgatgggcttaaaagaaattatccaaagggagaaagagcagtatgccacttcttaaaacagaacaaaacaaaaaaagaaaattgtgctcttttctaatccaaagggtatatttgcagcatgcttgactttaccaattctgatgacatctttacggacactattatcactaagaccttgttatggcgaagtctttagtctttttcatgtattttcctcatgattttttctctttatgtagtttgactatgccttacctttgtaaatatttttgcttgtgttgtcgcaaaggggataatctgggaaagacaccaaatcatgggctcactttaaaaaaagaaagaataaaaaaaccttcagctgtgctaaacagtatattacctctgtataaaattcttcagggagtgtcacctcaaatgcaatactttgggttggtttctttcctttaaaaaaatttgtataaaactggaagtgtgtgtgtgtgagcatgggtacccatttgataagagaaatgcatttgattgtgaagaagggagagttaaattctccattatgttcgtggtgtaaagtttwgagctggaatttattataagaatgtaaaaccttaaattattaataaataactattttggctanaaaaaaaaaaaaaaaaaaaaaaaaaaaaaaaaaaaaaaaaaaaaaaaaaaaaaaaaaaaaaaaaaaaaaaaaaaaaggggggnccnc

SEQ ID NO: 791 - DNA, 1400 bp, Homo sapiens; identical to SEQ ID NO: 790
  misc_feature (1313)..(1313): n is a, c, g, or t
  misc_feature (1396)..(1396): n is a, c, g, or t
  misc_feature (1399)..(1399): n is a, c, g, or t

SEQ ID NO: 792 - DNA, 600 bp, Homo sapiens
ccagcacctgtgccgaggtctgcgtcgaagacagaatggacagtgaggacagttatgtcttgkaaaagacaagaagcytcagatgggtaccccaagaaggatgtgagaggtgggcgctttggaggtttgcccctcacccaccagctgccccatccctgaggcagcgctccatgggggtatggttttgtcactgcccagacctagcagtgacatctcattgtccccagcccagtgggcattggaggtgccaggggagtcagggttgtagccaagacgcccccgcacggggagggttgggaagggggtgcaggaagctcaacccctctgggcaccaaccctgcattgcaggttggcaccttacttccctgggatccccagagttggtccaaggagggagagtgggttctcaatacggtaccaaagatataatcacctaggtttacaaatatttttaggactcacgttaactcacatttatacagcagaaatgctattttgtatgctgttragtttttctatctgtgtacttttttttaagggaaagattttaatattaaacctggtgcttctcamwmamaaaaaaaaaaaaaaaaaaaaaaa

SEQ ID NO: 793 - DNA, 600 bp, Homo sapiens; identical to SEQ ID NO: 792

SEQ ID NO: 794 - DNA, 600 bp, Homo sapiens
gatcctcagacatgcagctgtgtgtggcagtattttagtaccgggttaagaaaactggcaactgggaagaagtggcctcaaaggcacttaatttgatttttattttttaaatgctgtcaaagttacagtttacgcaggacattcttgccgtattctcatgatcccagataagtgtgtgttttatactgcaacaatatgcagcaatggtaagcgtaaagttttttttttgtttttgtttttttttatattatgaagtcttttaacagtctctctttatataaatacacagagtttggtatgatatttaaatacatcatctggccaggcatggtggcttacgcctgtaatcctagcactttgggaggccaagacgggcggatcacctgaggtgaggagttcaagaccagcctgcccaacatagtgaaactccgtctctaccaatatacaaaaattagccgggcatgatggtggtggcctgtaatcccagctacttgggaggctgagacaggagaatcgcttgaacccaggagacggtggttgcagtgagcgaagatcgagccactgcactccagcctgggcagctgaacaagactccgtctc

SEQ ID NO: 795 - DNA, 600 bp, Homo sapiens; identical to SEQ ID NO: 794

SEQ ID NO: 796 - DNA, 1400 bp, Homo sapiens
cacatctcaggaatcttccgccccaagttctcgctccctccaccgctgcagctcattccggaggtgcagaagcccctgcatgagcagctgtggtaccatggggccatcccgagggcagaggtggctgagctgctggtgcactctggggacttcctggtgcgggagagccagggcaagcaggagtacgtgctgtcggtgctgtgggatggtctgccccggcacttcatcatccagtccttggataacctgtaccgactggaaggggaaggctttcctagcattcctttgctcatcgaccacctactgagcacccagcagcccctcaccaagaagagtggtgttgtcctgcacagggctgtgcccaaggacaagtgggtgctgaaccatgaggacctggtgttgggtgagcagattggacgggggaactttggcgaagtgttcagcggacgcctgcgagccgacaacaccctggtggcggtgaagtcttgtcgagagacgctcccacctgacctcaaggccaagtttctacaggaagcgaggatcctgaagcagtacagccaccccaacatcgtgcgtctcattggtgtctgcacccagaagcagcccatctacatcgtcatggagcttgtgcaggggggcgacttcctgaccttcctccgcacggagggggcccgcctgcgggtgaagactctgctgcagatggtgggggatgcagctgctggcatggagtacctggagagcaagtgctgcatccaccgggacctggctgctcggaactgcctggtgacagagaagaatgtcctgaagatcagtgactttgggatgtcccgagaggaagcygatggggtctatgcagcctcagggggcctcagacaagtccccgtgaagtggaccgcacctgaggcccttaactacggccgctactcctccgaaagcgacgtgtggagctttggcatcttgctctgggagaccttcagcctgggggcctccccctatcccaacctcagcaatcagcagacacgggagtttgtggagaaggggggccgtctgccctgcccagagctgtgtcctgatgccgtgttcaggctcatggagcagtgctgggcctatgagcctgggcagcggcccagcttcagcaccatctaccaggagctgcagagcatccgaaagcggcatcggtgaggctgggacccccttctcaagctggtggcctctgcaggcctaggtgcagctcctcagcggctccagctcatatgctgacagctcttcacagtcctggactcctgccaccagcatccacactgccggcaggatgcagcgccgtgtcctctctgtgtccctgctgctgccagggcttcctcttccgggcagaaacaataaaaccacttgtgcccactgaa

SEQ ID NO: 797 - DNA, 600 bp, Homo sapiens
cccctcaccccagagccgccgcctgtcccgagtggctcctgacaggagcagtaatggcagcagccggggcagtagtgaagaggggccctctgggttgcctggcccctgggccttcccaccagctgtgcctcgaagcctgggcctgttgcccgccttgcgcctagagactgtagaccctggtggtggtggctcctggggacctgatcgggaggccctggcgcccaacagcctgtctcctagtccccagggccatcgggggctggaggaagggggcctggggccctgagggtggggtaggcagatgggccaaggtgaccaccattctgcctcaatcttttgcaagcccacctgcctctctcctgctgctcctccagctgtatctgcacctgcctctctgtcctggccaggggtggacaactggggtcccccaaaactcagtcctggcacctcaactgtgacaatcagcaaagccccacccaggcccccatctgggatgatgggagagctctggcagatgtcccaatcctggaggtcatccattaggaattaaattctccagcctcaaaaaaaaaaaaaaaaaaaaaamwmraraaaaaaaaa

SEQ ID NO: 798 - DNA, 1400 bp, Homo sapiens
gaaaagaatagtaagagggactacttaagttctagttttctatgttctgatgatgatagagcttctaaaaatatttctatgaactctgattcatcttttcctggaatttctataatggaaagtccattagaaagtcagcccttagattcagatagaagcatyaaagaatcctcttttgaagaatcaaatattgaagatccacttattgtaacaccagattgccaagaaaagacctcaccaaaaggtgtcgagaaccctgctgtacaagagagtaaccaaaaaatgttaggtcctcctttggaggtgctgaaaacgttagcctctaaaagaaatgctgttgcttttcgaagttttaacagtcatattaatgcatccaataactcagaaccatccagaatgaacatgacttctttagatgcaatggatatttcgygtgcctacagtggttcatatcccatggctataacccctactcaaaaaagaagatmctrtakgscacatywgrmcccrarkcmgakcaaktcggsaackccakaccgaactccgaaragtgtgagaagaggggtggcccccgttgatgatgggcgaattctaggaaccccagactaccttgcacctgarctgttactaggcagggcccatggtcctgcggtagactggtgggcacttggagtttgcttgtttgaatttctaacaggaattccccctttcaatgatgaaacaccacaacaagtattccagaatattctgaaaagagatatcccttggccagaaggtgaagaaaagttatctgataatgctcaaagtgcagtagaaatacttttaaccattgatgatacaaagagagctggaatgaaagagctaaaacgtcatcctctcttcagtgatgtggactgggaaaatctgcagcatcagactatgcctttcatcccccagccagatgatgaaacagatacctcctattttgaarccaggaatactgctcagcacctgacygtatctggatttagtctgtagcacaaaaattttccttttagtctagcctygtgttatagaatgaacttgcataattatatactccttaatactagattgatctaagggggaaagatcattatttaacctagttcaatgtgcttttaatgtacgttacagctttcacagagttaaaaggctgaaaggaatatagtcagtaatttatcttaacctcaaaactgtatataaatcttcaaagcttttttcatytatttattttgtttattgcactttatgaaaactgaagcatcaataaaattagaggacactawwrararwrarmmamwarmwwrattttctttctcctctgatttcagttcactgttcagtttagcattaaaataataaaataatcatacagttcc

SEQ ID NO: 799 - DNA, 1400 bp, Homo sapiens; identical to SEQ ID NO: 798

SEQ ID NO: 800 - DNA, 600 bp, Homo sapiens
ttttcatagctcctgcccgcagacctctggattaggtctctgttgactggctgtgtgaccttaggcccggagctgcccctctctgggcctcaraggccttatgagggtcctctacttcaggaacacccccatgacattgcatttgggggggctcccgtggcctgtagaatagcctgtggcctttgcaatttgttaaggttcaagacagatgggcatatgtgtcagtggggctctctgagtcctggcccaaagaagcaaggaaccaaatttaagactctcgcatcttcccmryscckwawkcsmtrkccccctgagtttccttttctgtctctctctttttattttttttatttttatttttatttttgagacagagcctcgctctgttacccagggtggagtgcagtggtgcgatctcggctcagtgcaacctctgcttcccaggttcaagcgattctcctgcctcagcctcccgagtagctgggattacaggtgtgcaccaccacacccggctaattttttttatttttaatagagatgaggtttcaccatgatggccaggctgatctcgaactcctaacctcaagtgatcctcccacc

SEQ ID NO: 801 - DNA, 600 bp, Homo sapiens; identical to SEQ ID NO: 800

SEQ ID NO: 802 - DNA, 600 bp, Homo sapiens
ctcccctccttcctgttcctcttatataccagtttatccccattctttttttttttcttactccaaaataaatcaaggctgcaatgcagctggtgctgttcagattcwammawmarrwrmwaymakkgtyysggatykmgmatcmtactggaaagcaaacacctttcctccagctccagaattccttgtctctgaatgactctgtcttgtgggtgtctgacagtggcgacgatgaacatgccgttggttttattggcagtgggcacaaggaggtgagaagtggtggtaaaaggagcggagtgctgaagcagagagcagatttaatatagtaacattaacagtgtatttaattgacatttcttttttgtaatgtgacgatatgtggacaaagaagaagatgcaggtttaagaagttaatatttataaaatgtgaaagacacagttactaggataacttttttgtgggtggggcttgggagatggggtggggtgggttaaggggtcccattttgtttctttggatttggggtgggggtcctggccaagaactcagtcatttttctgtgtaccaggttgcctaaatcatgtgcagatggttct

SEQ ID NO: 803 - DNA, 600 bp, Homo sapiens
aaccctctctggcggtggccaccagtccttgccaatccccagagctgttcttccaaagcccccaggctggcttagaaccccatagagtcctagcatcaccgaggacgtggctgctctgacaccacctagggcaacctacttgttttacagatggggcaaaaggaggcccagagctgatctctcatccgctctggccccaagcactatttcttccttttccacttaggcccctacatgcctgtagcctttctcactccatccccacccaaagtgctcagaccttgtctagttatttataaaactgtatgtacctccctcacttctctcctatcactgctttcctactctccttttatctcactctagtccaggtgccaagaatttcccttctaccctctattctcttgtgtctgtaagttacaaagtcaggaaaagtcttggctggacccctttcctgctgggtggatgcagtggtccaggactggggtctgggcccaggtttgagggagaaggttgcagagcacttcccacctctctgaatagtgtgtatgtgttggtttattgattctgtaaataagtaaaatgacaatatgaatcctc

SEQ ID NO: 804 - DNA, 600 bp, Homo sapiens
gcccatcgaggtcctctgcaaaggctatccctccgaattctcaacatacctcaacttctgccgctccctgcggtttgacgacaagcccgactactcttacctacgtcagctcttccgcaacctcttccaccggcagggcttctcctatgactacgtctttgactggaacatgcygaaattcggtgcagcccggaatcccgaggatgtggaccgggagcggcgagaacacgaacgcgaggagaggatggggcagctacgggggtccgcgacccgagccctgccccctggcccacccacgggggccactgccaaccggctccgcagtgccgccgagcccgtggcttccacgccagcctcccgcatccagccggctggcaatacttctcccagagcgatctcgcgggtcgaccgggagaggaaggtgagtatgaggctgcacaggggtgcgcccgccaacgtctcctcctcagacctcactgggcggcaagaggtctcccggatcccagcctcacagacaagtgtgccatttgaccatctcgggaagtgaggagagcccccattggaccagtgtttgcttagtgtcttcactgtattttcttt

SEQ ID NO: 805 - DNA, 1032 bp, Homo sapiens
aamtatgttgctgctggagatcaatgaagccgagtgratgggggctgaatgtgcgagtccatagctgaagaggagcgccagatggtggaggaatacacttatttatgaagtggacttagtagttttaagcagaaccatgaaaacctctgtgacaactccctccagctccaagagtgccgggaggtggggggcggcgcatccgcggcctcgagcttgctacctcagcccatccccaccacccctgacatcgagaacgctgagctcacccccatcttgcccttcctgttccttggcaatgagcaggatgctcaggacctggacaccatgcagcggctgaacatcggctacgtcatcaacgtcaccactcatcttcccctctaccactatgagaaaggcctgttcaactacaagcggctgccagccactgacagcaacaagcagaacctgcggcagtactttgaagaggcttttgagttcattggaggaagctcaccagtgtgggaaggggcttctcatccactgccaggctgggggtgtcccgctccgccaccatcgtcatcgcttacttgaatgaaagcacacttcgggatgaccatggactggatgctttataaatttgttcaaagggcaaaacgaaccaatttaatcttcccccaaaacctttaacttccattggggggcagttgctaragttcgaggaagacctaaacaacggkktgacaccgagaatccttacaccaaagctgatgggcgtggagacggttgtgtgacaatggtctggatggaaaggattgctgctctccattaggagacaatgaggaaggaggatggattctggttttttttctttctttttttttttgtagttgggagtaagtttgtgaatggaaacaaacttgtttaaacactttatttttaacaagtgtaagaagactataacttttgatgccattgagattcacctcccacaaactgacaaattaaggaggttaaagaagtaatttttttaagccaacaataaaaatataatac

SEQ ID NO: 806 - DNA, 1032 bp, Homo sapiens; identical to SEQ ID NO: 805

SEQ ID NO: 807 - DNA, 600 bp, Homo sapiens
catgtactgtaaatatttttcacataaagggaacaaatgtctagttttatttgtataggaaatttgccctgaccctaaataatacattttgaaatgaaacaagcttamaaarawawaawmwawwwwawwawrrwwwmmsttgtatctatttgtggtgaatgtgttttttaaatggaactatctccaaatttttctaagactactatgaacagttttcttttaaaattttgagattaagaatgccaggaatattgtcatcctttgagctgctgactgccaataacattcttcgatctctgggatttatgctcatgaactaaatttaagcttaagccataaaatagattagattgttttttaaaaatggatagctcattaagaagtgcagcaggttaagaattttttcctaaagactgtatatttgaggggtttcagaattttgcattgcagtcatagaagagatttatttcctttttagaggggaaatgaggtaaataagtaaaaaagtatgcttgttaattttattcaagaatgccagtagaaaattcataacgtgtatctttaagaaaaatgagcatacatcttaaatcttttcaatta

SEQ ID NO: 808 - DNA, 600 bp, Homo sapiens; identical to SEQ ID NO: 807

SEQ ID NO: 809 - DNA, 1400 bp, Homo sapiens
cactgtcaggaccaatttacttgatttttgaatactgttgctatggtgatcttctcaactatctaagaagtaaaagagaaaaatttcacaggacttggacagagattttcaaggaacacaatttcagtttttaccccactttccaatcacatccaaattccagcatgcctggttcaagagaagttcagatacacccggactcggatcaaatctcagggcttcatgggaattcatttcactctgaagatgaaattgaatatgaaaaccaaaaaaggctggaagaagaggaggacttgaatgtgcttacatttgaagatcttctttgctttgcatatcaagttgccaaaggaatggaatttctggaatttaagtcgtgtgttcacagagacctggccgccaggaacgtgcttgtcacccacgggaaagtggtgaagatatgtgactttggattggctcgagatatcatgagtgattccaactatgttgtcaggggcaatgcccgtctgcctgtaaaatggatggcccccgaaagcctgtttgaaggcatctacaccattaagagtgatgtctggtcatatggaatattactgtgggaaatcttctcacttggtgtgaatccttaccctggcattccggttgatgctaacttctacaaactgattcaaaatggatttaaaatggatcagccattttatgctacagaagaaatatacattataatgcaatcctgctgggcttttgactcaaggaaacggccatccttccctaatttgacttcgtttttaggatgtcagctggcagatgcagaagaagcgatgtatcagaatgtggatggccgtgtttcggaatgtcctcacacctaccaaaacaggcgacctttcagcagagagatggatttggggctactctctccgcaggctsaggtcgaagattcgtagaggaacaatttagttttaaggacttcatccctccacctatccctaacaggctgtagattaccaaaacaagrttaatttcatcactaaaagaaaatctattatcaactgctgcttcaccagacttttctctagaagcbgtctgcgtttactcttgttttcaaagggacttttgtaaaatcaaatcatcctgtcacaaggcaggaggagctgataatgaactttattggagcattgatctgcatccaaggccttctcaggcyggcttgagtgaattgtgtacctgaagtacagtatattcttgtaaatacataaaacaaaagcattttgctaaggagaagctaatatgattttttaagtctatgttttaaaataatatgtaaatttttcagctatttagtgatatattttatgggtgggaataaaatttctactacagaaaaaaaaaaaaaaaaaaaaaaaaaa

SEQ ID NO: 810 - DNA, 600 bp, Homo sapiens
gtggacagtcctgatgacacagccctcagcgagagtgccaacmaggccttcctgggsttcacatamgtggcgccgtctgtcctggacagcatcaaggagggcttctcyttccagcccaagctgsgctcamccaggcgcctcaacagtagcccccgggyccccgtcagccccctcaagttctccccttttgaggggtttcggcccagccccagcctkccggagccmacggagctacctctacctcmactcctgccacsgscgccgccytcgacmaccgccyytctccccatccgtcccccctcagggaccaagaaktmcaagaggggscgtgggygtmcagggcgctaggaagccgggtggggkwkarggtagcccttgagccctgtccctgcggctgtraragmagcwggaccctgggccagttccagagacctgggggtgtgtctgggggtggggtgtgagtgcgtatgaaagtgtgtgtctgctggggcagctgtgcccctgaatcatgggcacggagggccgcccgccrmrccccgcgctcaactgctcccgtggaagattaaagggctgaatcatgaaaaaaaaaaaaaaaaaaaa

SEQ ID NO: 811 - DNA, 1400 bp, Homo sapiens
atgggatggaggcggcggggccgccatgtccaasrgcragragctcwrsctggacksmrkcatcgkscgmywgckrgaagcywgsrwcctgacwcsmsakygsgcsmcastgmagggctcgcggcctgkcaagaatgtacagctgacagagaacgagatccgcggtctgtgcctgaaatcccgggagatttttctgagccagcccattcttctggagctggaggcacccctcaagatctgcggtgacatacacggccagtactacgaccttctgcgactatttgagtatggcggtttccctcccgagagcaactacctctttctgggggactatgtggacaggggcaagcagtccttggagaccatctgcctgctgctggcctataagatcaagtaccccgagaacttcttcctgctccgtgggaaccacgagtgtgccagcatcaaccgcatctatggtttctacgatgagtgcaagagacgctacaacatcaaactgtggaaaaccttcactgactgcttcaactgcctgcccatcgcggccatagtggacgaaaagatcttctgctgccacggaggcctgtccccggacctgcagtctatggagcagattcggcggatcatgcggcccacagatgtgcctgaccagggcctgctgtgtgacctgctgtggtctgaccctgacaaggacgtgcagggctggggcgagaacgaccgtggcgtctcttttacctttggagccgaggtggtggccaagttcctccacaagcacgacttggacctcatctgccgagcacaccaggtggtagaagacggctaygagttctttgccaagcggcagctggtgacacttttctcagctcccaactactgtggcgagtttgacaatgctggcgccatgatgagtgtggacgagaccctcatgtgctctttccagatcctcaagcccgccgacaagaacaaggggaagtacgggcagttcagtggcctgaaccctggaggccgacccatcaccccaccccgcaattccgccaaagccaagaaatagcccccgcacaccaccctgtgccccagatgatggattgattgtacagaaatcatgctgccatgctgggggggggtcaccccgacccctmaggcccacctgtcacggggaacatggagccttggtgtatttttcttttctttttttaatgaatcaatagcagcgtccagtcccccagggctgcttcctgcctgcacctgcggtgactgtgagcaggatcctggggccgaggctgcagctcagggcaacggcaggccaggtcgtgggtctccagccgtgcttggcctcagggctggcagccggatcctggggcaacccatctggtctcttgaataaaggtcaaagctggattctc

SEQ ID NO: 812 - DNA, 1400 bp, Homo sapiens
cttaacagagcatgaatgggaacagattattgatattctgtggagtgatcccagaggcaaaaatggctgttttccaaatacgtgccgaggagggggctgctattttggaccagatgttacttccaagattcttaataaataccagttgaagatgctcatcaggtctcatgaatgtaagcccgaagggtatgaaatctgtcatgatgggaaggtggtgactatattttctgcttctaattattatgaagaaggcagcaatcgaggagcttacatcaaactatgttctrgtacaactcctcgatttttccagtaccaagtaactaaagcaacgtgctttcagcctcttcgccaaagagtggatactatggaaaacagcgccatcaagatattaagagagagagtgatttcacgaaaaagtgaccttactcgtgctttccaacttcaagaccacagaaaatcaggaaaactttctgtgagccagtgggctttttgcatggagaacattttggggctgaacttaccatggagatccctcagttcgaatctggtaaacatagaccaaaatggaaacgttgaatacatgtccagcttccagaatatccgcattgaaaaacctgtacaagaggcycattctactctagttgaaactctgtacagatacagatctgacctggaaatcatatttaatgccattgacactgatcactcaggcctgatctccgtggaagaatttcgtgccatgtggaaactttttagttctcactacaatgttcacattgatgattcccaagtcaataagcttgccaacataatggacttgaacaaagatggaagcattgactttaatgagtttttaaaggctttctatgtagtgcatagatatgaagacttgatgaaacctgatgtcaccaaccttggctaaacacaaatgagagcttccctcaggctccctgaaacagctaggcccaaatcacaagtacagtcctttccaacacccctgaaattcatagtcagtagcagagaaaagcagatcccaattcatccccatcccacaaacagatgcatagtatgggttttggaagtccctagcaagctgttattggtaagattaggttaaatgtcagtaataggatttggtttcagcattagtacctacatattgccagtgagaaactgggttggacctagtggtgttgtcgtgagtgccacctaaccaggaggccagagcggtttgaaaacatcctgaaaggaactcatacagcacaagagaaaactactaagcttgacatctgtgagtgactgagggagacaggaggaataccaggttattcatggaataaagtctttccatctttaaactgtgatcttctttggagattttataagccagtgatcctcaa

SEQ ID NO: 813 - DNA, 600 bp, Homo sapiens
ttccagcccttaacagctcaacaaaccaaaaattccttctcagaaattcggattcaccccctgagccaggcctctggcgggagcagcaacatccggcaggaacccgcaccgaagggcaggccagccctccagctgccagacggtggatgtgatggcagaagacagagacaccattctggaccccaagatagacgcttcatgttaaggacgacagaacaacaaggagaatacttctgctgtggtgacccaaagaagcctcacactccgtgcgtcccaaaccgagcccttcatcgtccaatctccagtcctgctccctatccagtactccaggtccgaggcacttccatgtgcccgacactccaggtccgaggcactgatgctttcagctgcccaacccagcaatccgggttctctttcttcgtgagacacgttatgagggaagccctgattcacagggcccaggtaaaccaagctgcgctcctgacataccatgagaatgcggcactgacgggcaagtgacttctgcaagcctgcggctggtcccaatgccctgaatcacctctctcatggaagaaccaattaacaccaatgaatcaacca

SEQ ID NO: 814 - DNA, 600 bp, Homo sapiens
tacatcgtcaccgagtatatgaacaaaggaagtttactggatttcttaaaagatggagaaggaagagctctgaaattaccaaatcttgtggacatggcagcacaggtggctgcaggaatggcttacatcgagcgcatgaattatatccatagagatctgcgatcagcaaacattctagtggggaatggactcatatgcaagattgctgacttcggattggcccgattgatagaagacaatgagtacacagcaagacaaggtgcaaagttccccatcaagtggacggcccccgaggcagccctgtacgggaggttcacaatcaagtctgacgtgtggtcttttggaatcttactcacagagctggtcaccaaaggaagagtgccatacccaggcatgaacaaccgggaggtgctggagcaggtggagcgaggctacaggatgccctgcccgcaggactgccccatctctctgcatgagctcatgatccactgctggaaaaaggaccctgaagaacgccccacttttgagtacttgcagagcttcctggaagactactttaccgcgacagagccccagtaccaacctggtgaaaacctgtaa

SEQ ID NO: 815 - DNA, 600 bp, Homo sapiens; identical to SEQ ID NO: 814

SEQ ID NO: 816 - DNA, 1400 bp, Homo sapiens
tccaaaggccccaggtggccacctgcaccttcaagctaggagggctggccagaactcagacgctgggccccctcgggggctcacttgggttcctgagggggccggcccggtgctagggggctgtggccgaggcatggatcagagctgcctgtcagcagatggggccggccggggctgtggcagggccacctggagtgtgagagaggagcaggtgaagcagtgggcggcagagatgctggtagcgctggaggcgctgcacgagcagggggtgctgtgccgggacctccaccccgggaacctgctcctggaccaggcaggtcasrtscsgctcacwyayyyykgccagtggtcagaggtggmgccccarwgctscggrgaggmcgwggacaatctctacagcgccccaggcaagaaggggggaggccaggaggtgggtgggatttccgagctgacggaagcctgtgactggtggagctttgggtctctactgtatgaactgctgacgggaatggcactgtcccagagccacccttcaggaatccaggcccacacccagctccagctgcccgagtggctcagtcgcccagcggcctctctgctgactgagctgctgcagttcgagcctacccggcgcctgggcatgggagaaggtggtgtcagcaaactcaagtcccatccctttttcagtaccatccaatggagcaagctggtggggwmatctctggagactcatctcaggacactgatccactggctcagtggacccaaaccagactgtcctggctagtcctcttagtcacacagcgagtaggcctcttccaccagaagctgttcgtgcagctggggaggcccagaagcagggatgccatctgttgtgcagggagggatgaggactccctctcaggccctggctgtttaccatgtcactgcctactgtgacttcatgcccttttgggataagaaaccacaaaacgcatggaacaactatccatggctcttagccagaaatgtcttgcctctggtctctgaaaagctggggtgagtggttacctcaaagacaattgcctccagtttgggggctcctctcagggttcaccctgtcaccggggcgtgggaccgacctgggaaatttccactagagttttgccctcagctcctccctgccagcatcccagtcaccaccaggtggcgcttctgacacggtccacgtgcctggctctgaaggcccaactgtcagaccagacccctcactcatggtggggagacttgacttcctcgggctcttcaggagactgagacagagaagacaagtgaaagcgcagcctgtacatgactctctgtggtccacgtcctgcctctccctggggtttacacggccccaataaagcctgctctggcct

SEQ ID NO: 817 - DNA, 1400 bp, Homo sapiens
tcgaaacctggaacatctggtagaggaaaggacacagctgtacaaggcagagagggacagggctgacagacttaactttatgttgcttccaaggctagtggtaaagtctctgaaggagaaaggctttgtggagccggaactatatgaggaagttacaatctacttcagtgacattgtaggtttcactactatctgcaaatacagcacccccatggaagtggtggacatgcttaatgacatctataagagttttgaccacattgttgatcatcatgatgtctacaaggtggaaaccatcggtgatgcgtacatggtggctagtggtttgcctaagagaaatggcaatcggcatgcaatagacattgccaagatggccttggaaatcctcagcttcatggggacctttgagctggagcatcttcctggcctcccaatatggattcgcattggagttcactctggtccctgtgctgctggagttgtgggaatcaagatgcctcgttattgtctatttggagatacggtcaacacagcctctaggatggaatccactggcctccctttgagaattcacgtgagtggctccaccatagccatcctgaagagaactgagtgccagttcctttatgaagtgagaggagaaacatacttaaagggaagaggaaatgagactacctactggctgactgggatgaaggaccagaaattcaacctgccaacccctcctactgtggagaatcaacagcgtttgcaagcagaattttcagacatgattgccaactctttacagaaaagacaggcagcagggataagaagccaaaaacccagacgggtagccagctataaaaaaggcactctggaatacttgcagctgaataccacagacaaggagagcacctatttttaaacctaaatgaggtataaggactcacacaaattaaaatacagctgcactgaggccaggcrmcctcargtgtcctgaaagcttacattttcctgagacctcaatgargcagaaatgtacttaggcttggctgccctgtytggamcatggactttctttgcatgaatcagatgtgtgttctcagtgaaataactaccttccactctggaaccttattccagcagttgttccagggagcttctacctggaaaagaaaagaaatgaatagactatctagaacttgagaagattttattcttatttcatttattttttgtttgtttatttttatcgtttttgtttactggctttccttctgtattcataagattttttaaattgtcataattatattttaaatacccatcttcattaaagtatatttaactcataatttttgcagaaaatatgctatatattaggcaagaataaaagctaaaggtttcccaaaaaaaaa

SEQ ID NO: 818 - DNA, 600 bp, Homo sapiens
cgctggatcaccaaggagtccaaggacatcctggagaagctctttgaaagggaaccaaccaagaggctgggartgacsggaaacatcaaaatccaccccttcttcaagaccataaactggactctgctggaaaagcggaggttggagccaccyttcaggcccaaagtgaagtcacccagagactacagtaactttgaccaggagttcctgaacgagaaggcgcgcctctcctacagcgacaagaacctcatcgactccatggaccagtctgcattcgctggcttctcctttgtgaaccccaaattcgagcacctcctggaagattgaggttcctggacagatcaggctagccctgccctccacccacacctgcccgctccccacgataagcaccagtgggactgtggtgacttctgctgctggccccgcccctgcccccagagcgtccttggctgccgtctggccgggctctcatggtacttcctctgtgaactgtgtgtgaatctgcttttcctctgccttcggagggaaattgtaaatcctgtgtttcattacttgaatgtagttatctattgaaaatatactttagagcacaatgga

SEQ ID NO: 819 - DNA, 1400 bp, Homo sapiens
acgctggtatgggggctcggacccctcactggggacagggccagtgttggagaattctgattccttttttgttgtcttttacttttgtttttaacctgggggttcggggagaggccctgcttgggaacatctcacgagctttcctacatcttccgtggttcccagcacagcccaagattatttggcagccaagtggatggaactaactttcctggactgtgtttcgcattcggcgttatctggaaagtggactgaacggaatcaagctctgagcagaggcctgaagcggaagcaccacatcgtccctgcccatctcactctctcccttgatgatgcccctagagctgaggctggagaagacaccagggctgactttgaccgagggccatggacgcgacaggcctgtggccctgcgcatgctgaaataactggaacccagcctctcctcctacaccggcctacccatctgggcccaagagctgcactcacactcctacaacgaaggacaaactgtccaggtcggagggatcacgagacacagaacctggaggggtgtgcacgctggcaggtggcctctgcggcaattgcctcaccctgaggacatcagcagtcagcctgctcagagcgggggtgctggagcgcgtgcagacacagctcttccggagcagccttcaccttctctctgggatcagtgtccggctggccgacgtggcatttgctgaccgaatgctcatagaggttgacccccacagggtcacgcaggactcggacactgccctggaaacatggatggacaagggcttttggccacaggtgtgggtgtcctgttggaggagggcttgtttggagaagggaggctggctgggggagaaacccggatcccgctgcatctccgcgcctgtgggtgcatgtcgcgtgctcatctgttgcacacagctcactcgtatgtcctgcactggtacatgcatctgtaatacagtttctacgtctatttaaggctaggagccgaatgtgccccattgtcagtgggtccacgtttctccccggctcctctgggctaaggcagtgtggcccgargcttaaaaagttactcggtactgtttttaagaacacttttatagagttagtggaaggcaagttaagagccaatcactgatccccaagtgtttcttgagcatctggtctggggggaccactttgatcggacccacccttggaaagctcaggggtaggcccaggtgggatgctcaccctgtcactgagggttttggttggcatcgttgtttttgaatgtagcacaagcgatgagcaaactctataagagtgttttaaaaattaacttcccaggaagtgagttaaaaacaataaaagccctttcttgagttaaaaagaaaaaaaaa

SEQ ID NO: 820 - DNA, 1400 bp, Homo sapiens
caaaaaggcatctgatgctgaaaaggtttatggggaatgcagtcagaagggtcctgtcccctttagccattgccttcccacagaaaaactgcaacgctgtgagaagattggggaaggggtgtttggcgaagtgtttcaaacaattgctgatcacacacccgtagccataaaaatcattgctattgaaggaccagatttagtcaatggatcccatcagaaaacctttgaggaaatcctgccagagatcatcatctccaaagagttgagcctcttatccggtgaagtgtgcaaccgcacagaaggctttatcgggctgaactcagtgcactgtgtccagggatcttaccctcccttgctcctcaaagcctgggatcactataattcaaccaaaggctctgcaaatgaccggcctgatttttttaaagacgaccagctcttcattgtgctggaatttgagtttggagggattgacttagagcaaatgcgaaccaagttgtcttccttggctactgcaaagagcattctacaccagctcacagcctccctcgcagtggcagaggcatcactgcgctttgagcaccgagacttacactgggggaacgtgctcttaaagaaaaccagcctcaaaaaactccactacaccctcaatgggaagagcagcactatccccagctgtgggttgcaagtgagcatcattgactacaccctgtcgcgcttggaacgggatgggattgtggttttctgtgacgtttccatggatgaggacctgtttaccggtgacggtgactaccagtttgacatctacaggctcatgaagaaggagaataacaaccgctggggtgaatatcacccttatagtaatgtgctctggttacattacctgacagacaagatgctgaaacaaatgaccttcaagactaaatgtaacactcctgccatgaagcaaattaagagaaaaatccaggagttccacaggacaatgctgaacttcagctctgccactgacttgctctgccagcacagtctgtttaagtaagctaaatgtatcttactgccccgaaatgagaggagactggtcttgaagcctctggtgctgtttcaacctccgtccccacaggagggtggaactcccattctcacaggtttccagtcagcttttcaaacaagaattttgtttccaaatggaaactgaaatatttgttgaaatgtttaaatttgctgataacaaatgttctgaaagaagtaaactagccgggcgcagtggcgtgcgcctgtaatcccagctactcgggaggctgaggcaggaggatcgcttgagcccaagagttcatatctagcctggtcaacatagcaagacccctgtctctatttttttaaataaataaactacatgtgaaaac

SEQ ID NO: 821 - DNA, 1400 bp, Homo sapiens
tttattagatactgttatgtcccccaagggtacaggaggggcatccctcagcctatgggaacacccaaactaggaggggttattgacaggaaggaatgaatccaagtgaaggctttctgctcttcgtgttacaaaccagtttcagagttagctttctggggaggtgtgtgtttgtgaaaggaattcaagtgttgcaggacagatgagctcaaggtaaggtagctttggcagcagggctgatactatgaggctgaaacaatccttgtgatgaagtagatcatgcagtgacatacaaagaccaaggattatgtatatttttatatctctgtggttttgaaactttagtacttagaattttggccttctgcactactcttttgctcttacgaacataatggactcttaagaatggaaagggatgacatttacctatgtgtgctgcctcattcctggtgaagcaactgctacttgttctctatgcctctaaaatgatgctgttttctctgctaaaggtaaaagaaaagaaaaaaatagttggaaaataagacatgcaacttgatgtgcttttgagtaaatttatgcagcagaaactatacaatgaaggaagaattctatggaaattacaaatccaaaactctatgatgatgtcttcctagggagtagagaaaggcagtgaaatggcagttagaccaacagaggcttgaaggattcaagtacaagtaatattttgtataaaacatagcagtttaggtccccataatcctcaaaaatagtcacaaatataacaaagttcattgttttagggtttttaaaaaacgtgttgtacctaaggccatacttactcttctatgctatcactgcaaaggggtgatatgtatgtattatataaaaaaaaaaacccttaatgcactgttatctcctaaatatttagtaaattaatactatttaatttttttaaagatttgtctgtgtagacactaaaagtattacacaaaatctggactgaaggtgtcctttttaacaacaatttaaagtactttttatatatgttatgtagtatatcctttctaaactgcctagtttgtatattcctataattcctatttgtgaagtgtacctgttcttgtctcttttttcagtcattttctgcacgcatccccctttatatggttatagagatgactgtagcttttcgtgctccactgcgaggtttgtgctcagagccgctgcaccccagcgaggcctgctccatggagtgcaggacgagctactgctttggagcgagggtttcctgcttttgagttgacctgacttccttcttgaaatgactgttaaaactaaaataaattacattgcatttattttatattcttggttgaaataaaatttaattgactttg

SEQ ID NO: 822 - DNA, 1400 bp, Homo sapiens
ggagcagccggcctgtgacacctgaagccgccagctcgccacaggggccagggagctggagatggcctccagcgtcagtgccaagactgagcgggccctccagtgttgtccaaggaaatgtagaatcactttgtagatatggagatgaagaagacaaatctttattataatattgatcagttttatgccgcattgttcgtggcagtagaccacatctgttcgtctgcacagctgtgaggcgatgctgttccatctgcacatgaaggacccccatacagcctgtctcccacccctgacaacccgagagggcatatggggccctgccaacaccacttcctcagcagaaacccgtcatgacgcggctgcttcggaagcagacatctggggacacagcctcagtacccagtcttttccctagttcctgaaactttcctaggaccttaagagaatagtaggaggtcctatagcattcccagtgtcactagaattttgaagacaggaaagtggaggttagtctgtggcctttttttcatttagccattgcacagtcagctgcagaagtcctgctgaccacctagtcatggacaaaggcccaggaccagtgacaccctgcgtccctgtgtgcrttaagttcattctgggtcgcagccatgaagtgtcaccagtatctactactgtgaagtcagctgtgctgttttccattcgcttccackgcttctgcctcctgccataaaaccagcgagtgtcgtggtgcaggcaggccctgtggcctgctgggctgagggaagtcagagccccagggcgccacgaagcagccactgggataccccaccccgccccgccctgcccgcccccccccccaccagtcctgcccccgcatggagcccccgtgattagtagcccgtatgatcacgtagacccacccaacacactcctgcacactggccccggcccacggcacagcaatcccctgcgcgtggatttcacctcaccctttgtaccagatgttgagtgaccagctctgtggccctgtgtcgtcagaggcttgtgattaactgtggcggcagacacagcttgtccacagcttgggccaggcttcccctgtcctcccaccggtcggctgcttggcaaggctgttcaggacgtgcacttccccaagtcggcactgagtggcccagcaccrcctagccctgccaccccactgccctcctgggccttctgctggatgggcacctggggggttctggtttttacttttttaatgtaagtctcagtctttgtaattaattattgaattgtgagaacatttttgaacaatttacctgtcaataaagcagaagacggcagttttaaagttaaaaaaaaaaaaaaaaaaaaaaaaaaaaawwaaaaaaaaaaaa

SEQ ID NO: 823 - DNA, 1400 bp, Homo sapiens
gtcaaggaggagatgaccagtgccttggccactatgcgggtagactacgaccaggtgaagatcaaggacctgaagacctctaacaaccggctcctcaacaagaggagaaaaaagcaggcaggcagctcctctgcctcacagggctgcaacaaccagtagctcatggggccttggaggagcctggcctctcagcctgcatwacagactgaatgtgctcaggccctggccaggagggcccagggtcattcttttaacaaaaggattattttgttgtgtttwaawwwgtcackcggmacktcagratksaggaccctgaccctaaacctccttcagatctctggcccaggctcaagccctatagatgggcagggcctaggggctgggagctgcctgctgccatagcagcacctttagctaggttggcccgagtgaggcctctgtgctgtcctgccctggtgcatggccttagctttctaggccactgggagttgtggctgggcttcccatcttccacagagacatctccctgtgggatgggcagatgggcctggccttgagaaaggcattggccattggttgccatggtgaccagggaccacgttgctgcctgtgaatgctgagtgagcgagtaagggaggaggggcgattgagggttcacctctgccttggggaggctgatttctcacacactggctggccctctcattctcactcctccttgggccctgaggctgctggatccggtctgcctgcctccctgtgcagtccagccctgccttgctgcagccccagcccagatggcactcagcgctctcccctgagggagtccctgggcctagccatcccctcactattcccgacccaaagggtgacttttcatctgaacttaaggtgggagatatttttaacttttttccactttggaaaatgtcactgtgacaaaagccagcatactttccctgcacccatctgctcaccagatctcaggcaggaaagcccctctctgttgaagtcaggggctatcttttggtatacttgtgtgaaagtggctggttgggagcagagctaagtggcttcccattaacctgaggtctctttctttactctgggtcagacctgaggttggggaaggcgactgagccatgctcagaatgtctggtcctggcttgggcctgagtagggcagagagggcctttcctggctgatcagagcttaccagccccaccccaccatggtagccttagggtgctgagtgcctgatactgcctgacaagtgcctgacacgcagcctagttccttcctggcccctctctcactggctgggaaaccctagaccatgtcagataggacaacactgctgggttttacatccagatagtaataaacaccatttcatcatt

SEQ ID NO: 824 - DNA, 1400 bp, Homo sapiens; identical to SEQ ID NO: 823

SEQ ID NO: 825 - DNA, 600 bp, Homo sapiens
taatcctagcactttgggaggccgaggcaggcggatcatctgaggtcaggagttctagaccagcctggccaacatggtgaaaccccgtctctactaaaaatacaaaaacttagctgggtgtggtagtgcgtgcctgtaatcctagctacttaggaggctgaggcaggagaatcgcttgaacctgggtggcggaggttgcaatgagccgagatcgcgccactgcactccagcctgggtgcaatgaaactgggagtgaaactccgtctcaaaaaaataaaatgctgtatgaacaagatgagcattctgtcaggtgtcgggacacctgggcaaagacgaattcatgctgtctgtgaaaaggaagtttgcactgtaacatatgccatagcttggcccttgctttgtatgcaaccttagctgatggggaaaattccaaacataagtggcacaggaaagaggcaggcagaggaggcaggggtctgtgctgtgcaagtcactggttttttatgactatcattttcattgaatgcatttgttgaattgggacaaaaggaacattttctaaatcagcttgatactctttataaaaaacagctgaatctt

SEQ ID NO: 826 - DNA, 1400 bp, Homo sapiens
ttattcttttttgcagtctgctttaattcatgtccttctgcagttgctctgtattaaaacagggtaaaaaggccatagcccattatgaaaaatataatacaaaactctttgacctatgaggtaacttacagacattgtgttttctaaacaggctgtcagtgaaagcccgtatctgtctccaggtgaatgtaatttacttccgagtactttacccagaggatgtrttccccaggtgggcagagtacagttgatctctagcacagacagagattctggcctctgcatattctcaggtctctgtgtgtacctcccattgagtagagaagcttaagataatttctgagagaagaacactgctgattgtgggagcagtttaggagtccatggaaraaagaaaaatacatgtgtcttggcagccatggtgtatttttgtccaaatggattggaaggatatttgaatatttgaatgttggtatgacataaagctgcagtgcactatagagtcaagtcattgaattaccactcctgatacagggctttattgtactactgtgaagtgtatgtgtgcaatacattggtgagttcatttactggtgtacggaagagccagcaggagcagcgtggtcattgctgggtgctattacagttgcttgtagtgagtgctgttttccaggagatggagccagttgggtgtggcagatctactgaatatcaaatgatgctcttcttcccatgtagaccttcagcaaaagccggtacttggaagccacaggctcaccttctctatctatccaataattattaatgaagagacctccataagggagcagctggctgttatcgataaatgtaccaattattaaataattagtctccaagccattcagtgatgtcttcagcatcactataggactgtctagtgtcactttttacttccttctgggtggaggctttccgactcccaatcatgaaggcaagttaatctttccagttagtgacttttgccccatagttggggtaagcacttcctagattgagaaaaagcagctacagtcaatcctgctctgtttgcctcatttggtgatcagtcagtcacacataagttccttgtattctaaatttcatgcacttctcccagatgctatagggttttctctcactgttgccartggatgtcatccagacagtgggctcatatcttacggttttgtgcaatcattgtcgtattgtagtcttaagactcattatagtgtatttttgatatttttgaaatgtgttaaattttttaattcartaatatgagccagagcatgttgcagcaaatctattgtttgtaaaaataacaataacaataataaataaaataaagtggaatctttttcatggctttgttttaaaaa

SEQ ID NO: 827 - DNA, 600 bp, Homo sapiens
tgacctcttccctgctattatccctcctcccaactgtacagatttgtttgttgtagtttatgtacttcttgatactgtcaaaaaattatctggaaatggttttattttgtgaagtgaacaatactttgtaatttatgatagtgtaaatggaaggcaaagcatcacatgtattaaattcttctgtctattattctggagtatgtgcaagaaagtggtttggagggatggggtggtggatcatcaaaacattgtttccagatagacgctggcaacaaattttcagtcatcactgaaacacaatgagaaaacagcatctcatcgagtccccactccttctgcaagctcccttctagagagcctgcttcaagattaaggccctgaggctccacattcactttccataagccccactgcatggatgcatcatcatacagaggtgaaccgtttagggcaaatcaccctaggccacttggagggtagcagaacaagacttttaaagtcagaaagccctgagtttgatcccagatccgtccatttagtactacctgcatataaccatgggaagtttgcggctctgaaaaactgaagttgattatctga

SEQ ID NO: 828 - DNA, 600 bp, Homo sapiens; identical to SEQ ID NO: 827

SEQ ID NO: 829 - DNA, 1400 bp, Homo sapiens
cactccacttcaaaatttacaggttttagcatcttcttcagcaaatgaatgcatttcggttaaaggaagaatttattccatattaaagcagataggaagtggaggttcaagcaaggtatttcaggtgttaaatgaaaagaaacagatatatgctataaaatatgtgaacttagaagaagcagataaccaaactcttgatagttaccggaacgaaatagcttatttgaataaactacaacaacacagtgataagatcatccgactttatgattatgaaatcacggaccagtacatctacatggtaatggagtgtggaaatattgatcttaatagttggcttaaaaagaaaaaatccattgatccatgggaacgcaagagttactggaaaaatatgttagaggcagttcacacaatccatcaacatggcattgttcacagtgatcttaaaccagctaactttctgatagttgatggaatgctaaagctaattgattttgggattgcaaaccaaatgcaaccagatacaacaagtgttgttaaagattctcaggttggcacagttaattatatgccaccagaagcaatcaaagatatgtcttcctccagagagaatgggaaatctaagtcaaagataagccccaaaagtgatgtttggtccttaggatgtattttgtactatatgacttacgggaaaacaccatttcagcagataattaatcagatttctaaattacatgccataattgatcctaatcatgaaattgaatttcccgatattccagagaaagatcttcaagatgtgttaaagtgttgtttaaaaagggacccaaaacagaggatatccattcctgagctcctggctcatccatatgttcaaattcaaactcatccagttaaccaaatggccaagggaaccactgaagaaatgaaatatgttctgggccaacttgttggtctgaattctcctaactccattttgaaagctgctaaaactttatatgaacactatagtggtggtgaaagtcataattcttcatcctccaagacttttgaaaaaaaaaggggaaaaaaatgatttgcagttattcgtaatgtcagataccacctataaaatatattggactgttatactcttgaatccctgtggaaatctacatttgaagacaacatcactctgaagtgttatcagcaaaaaaaattcagtagattatctttaaaagaaaactgtaaaaatagcaaccacttatggcactgtatatattgtagacttgttttctctgttttatgctcttgtgtaatctacttgacatcattttactcttggaatagtgggtggatagcaagtatattctaaaaaactttgtaaataaagttttgtggctaaaatgacactaacattt

SEQ ID NO: 830 - DNA, 1400 bp, Homo sapiens; identical to SEQ ID NO: 829

SEQ ID NO: 831 - DNA, 1400 bp, Homo sapiens
atgtggcagcccagatcgcctccggcatgcgctatctggccacactcaactttgtacatcgggacctggccacgcggaactgcctagttggggaaaatttcaccatcaaaatcgcagactttggcatgagccggaacctctatgctggggactattaccgtgtgcagggccgggcagtgctgcccatcckytkgmtggcctkskmgtgcatcctcatggggaagttcacgactgcgagtgacgtgtgggcctttggtgtgaccctgtgggaggtgctgatgctctgtagggcccagccctttgggcagctcaccgacgagcaggtcatcgagaacgcgggggagttcttccgggaccagggccggcaggtgtacctgtcccggccgcctgcctgcccgcagggcytatatgagctgatgcttcggtgctggagccgggagtctgagcagcgaccacccttttcccagctgcatcggttcctggcagaggatgcactcaacacggtgtgaatcacacatccagctgcccctccctcagggagygatccaggggaagccagtgacactaaaacaagaggacacaatggcacctctgcccttcccctcccgacagcccatcacctctaatagaggcagtgagactgcaggtgggctgggcccacccagggagctgatgccccttctccccttcctggacacactctcatgtccccttcctgttcttccttcctagaagcccctgtcgcccacccagctggtcctgtggatgggatcctctccacccwcctctagccatcccttggggaagggtggggagaaatataggatagacactggacatggcccattggagcacctgggccccactggacaacactgattcctggasaggtggctgcgcccccagcttctctctccctgtcacacactggaccccactggctgagaatctgggggtgaggaggacaagaaggagaggaaaatgtttccttgtgcctgctcctgtacttgtcctcagcttgggcttcttcctcctccatcacctgaaacactggacctgggggtagccccgccccagccctcagtcacccccacttcccacytgcagtcttgtagctagaacttctctaagcctatacgtttctgtggagtaaatattgggattggggggaaagagggagcaacggcccatagccttggggttggacatctctagtgtagctgccacattgatttttctataatcacttggggtttgtacatttttggggggagagacacagatttttacactaatatatggacctagcttgaggcaattttaatcccctgcactaggcaggtaataataaaggttgagttttccacaaaaaaaaaaaaaaaammrraawwmaaaaaaaa

SEQ ID NO: 832 - DNA, 600 bp, Homo sapiens
grctragaattgcagaytttggagctgcagccaggttggcatcaaaaggaactggtgcaggagagtttcagggacaattactggggacaattgcattyatggcrcctgaggtmctaagaggtcarcagtatggwaggagctgtgatgtatggagtgttggctgygcyattatagaaatggcttgtgcaaaaccaccwtggaatgcagaaaaacactccaatcatctygcyttgatatttaagattgctagygcaactactgcwccrtcsatcccktcacayytgtcycctggtttacgagatgtggctcttcgttgtttagaacttcarcctcaggacmgrcctccrtcaagagagctrctgaarcatccrgtcttycgtacyacrtggtagccaattatrcagatcaactacagtagaaacaggatgctcaacaagagaaaaaaaacttgtggggaaccacattgatattctactggccatgatgccactgaacagctatgaacgaggccagtggggaacccttacctaagtatgtgattgacaaatcatgatctgtacctaagctcagtatgcaaaagcccaaactagtgcagaaact

SEQ ID NO: 833 - DNA, 600 bp, Homo sapiens
cctgcagctcctgccatttctcattggaagggactcctctttgggggagggtggatatccaaaccaaaaagaagaaaacagatgcccccagaaggggccagtgcgggcagccagggcctagtgggtcattggccatctccgcctgcctaaggctctgagcaggtcccagagctgctgttcctccactgcttgcccatagggctgcctggttgactctccttcccattgtttacagtgaaggtgtcattcacaaaaactcaaggactgctattctccttcttccccttagtttactcctggtttttaccccaccctcaaccctctccagcataaaacctagtgagctaaaggctttgtctgcagaaggagatcaagaggcttgggggtaaggccaagaaggtaggaggaaaatggcagacctgggctggagaagaaccttctccgtatcccaggtgtgcctggcagtatggtttcctcttcctctgtgcctgtgcagcattcatcccagctggcccttggagttcaggttccttcttccctccctcctgtgaagttacactgtaggacacaagctgtgagcaatctgcagtctactggccc

SEQ ID NO: 834 - DNA, 1400 bp, Homo sapiens
ccacacagtgatggaggtgctgcgagagcacaaggacagtgtcatggccgtgctggaagcctttgtctatgaccccttgctgaactggaggctgatggacacaaataccaaaggcaacaagcgatcccgaacgaggacggattcctactctgctggccagtcagtcgaaattttggacggtgtggaacttggagagccagcccataagaaaacggggaccacagtgccagaatctattcattctttcattggagacggtttggtgaaaccagaggccctaaataagaaagctatccagattattaacagggttcgagataagctcactggtcgggacttctctcatgatgacactttggatgttccaacgcaagttgagctgctcatcaaacaagcgacatcccatgaaaacctctgccagtgctatattggctggtrmcctttctggtaactggaggcccagatgtgcccatcacgttttttctgaggcttttgtactttagtaaatgcttccactaaactgaaammatggtgagaaagtttgactttgttaaatattttgaaatgtaaatgaaaagaactactgtatattaaaagttggtttgaaccaactttctagctgctgttgaagaatatattgtcagaaacacaaggcttgatttggttcccaggacagtgaaacatagtaataccacgtaaatcaagccattcattttggggaacagaagatccataactttagaaatacgggttttgacttaactcacaagagaactcatcataagtacttgctgatggaagaatgacctagttgctcctctcaacatgggtacagcaaactcagcacagccaagaagcctcaggtcgtggagaacatggattaggatcctagactgtaaagacacagaagatgctgacctcacccctgccacctatcccaagacctcactggtctgtggacagcagcagaaatgtttgcaagataggccaaaatgagtacaaaaggtctgtcttccatcagacccagtgatgctgcgactcacacgcttcaattcaagacctgaccgctagtagggaggtttattcagatcgctggcagcctcggctgagcagatgcacagaggggatcactgtgcagtgggaccaccctcactggccttctgcagcagggttctgggatgttttcagtggtcaaaatactctgtttagagcaagggctcagaaaacagaaatactgtcatggaggtgctgaacacagggaaggtctggtacatattggaaattatgagcagaacaaatactcaactaaatgcacaaagtataaagtgtagccatgtctagacaccatgttgtatcagaataatttttgtgccaataaatgacatcagaattttaaacat

SEQ ID NO: 835 - DNA, 1400 bp, Homo sapiens; identical to SEQ ID NO: 834

SEQ ID NO: 836 - DNA, 1400 bp, Homo sapiens
ctagtgtatgagctcctaacgggcaaysyacccttttmtgsrgyygaccwmwtsawgammtrcaawwwkawyctmaaaggaattgaaaaaatggattttcccaggaagataacacgacgacctgaggatttgattcggaggctttgcaggcaaaatccaacagaaaggctgggaaatctgaagaatggaataaatgacattaagaaacacaggtggttaaatggttttaattgggagggactgaaagcacggagccttccatcacctttgcaaagagagctcaagggacccatagatcacagctactttgacaaatatcctcctgaaaagggaatgcctccagatgagctatcaggctgggataaagacttctgacagaagaaaagttgattactgcctgtactctacagaagaggacctcaaggatcaataatccaacacattattttcttttcagagtattataatatctttggaagaccattagggaaaagaaattcctgcacaatgggaagaggagaatggtgtggatatggttctgagttatagtgtcttatttagatgctgtgaattattgatgtattacattatttgcttttctcaactgctagaggctaccccattttcctttccacaatcagagccatttttgttaaagtggcagttttttctgcaatctattgttccattccaatcatatccttctcgtttgagtactactaacgtttaaaaagggtcttgcccttgaataactaagtcatacaaatagaaggaaaaacaatggtgaattttggagagctccccagctctcagcaacttcatataagcatggtggtatcttaaaatggtggtttgcagaaaccatggtagccaacagaacctcctgactttcacctgcttttaacctgaaaatatattaatacgcctctgacatgagtccagggagaggcaagattgagcaatagtcagtggcaccatttcctaaagtaactgaatcaatcaatccagtcaggtaattattttctattggggaacttagaaaaaaaagtaaagcaagaaatattttctctcctttatgatcagtgataccttagagacttttcgaaagtccttgttaaagatagttacaatgtgtggttaaatgatgctaaaatattttcacaaccagagtagaaaacgtgctggaacaaaattgcgaaggcttttgcctcccagtaaatagaaaggaaaatatattctagtaggtaagactgctgactctttgaaaatctgaggtattttgaaaaattctgtgatagttgctattaataaaccaaaattgtatagaatcatcgttaatttttaatataaatcccattgacaaatgttgatgcactgtagtcactgctgagttaatagcg

SEQ ID NO: 837 - DNA, 600 bp, Homo sapiens
cttctggacttcccccgcctgcccgacccccaggccctgttcccagcccgccgccggccccctgagttcccaggccgccccaccaccctgacctttgccccgagacctcggccggctgccagtcgcccccgcttggacccctggaaactggtctccttcggccggacactcaccatctcgcctcccagcaggccagacactccggagagccctgggccccccagcgtgcagcccacactgctggacatggacatggaggggcagaaccaagacagcacagtgcccctgtgcggggcccacggctcccactaaggcctgcccaccaccgcccgcctgggcagccatgaatgtagcgccccaggccctgccccagcccgccatgccacaaggtgggggaggccctgggcaggatgttcactctatttattggggaaggagggaggggggggacacttaacttattcctttgtaccccagggggtggagccctgtgcccaccctgcactggggggagggtgggcagggatactcagggacagggcatcatgggggatttggcacaaaatggagcattaaaggtaacccctgccccctaccgca

SEQ ID NO: 838 - DNA, 600 bp, Homo sapiens
ttttaatctctcgactgaatggactttgcacactttggcccagggtggccacacctctatcccggctttggtgcggggtacacaagaggggatgagttgtgtgaataccccaagactcccatgagggagatgccatgagccgcccaaggccttcccctggcactggcaaacagggcctctgcggagcacactggctcacccagtcctgcccgccaccgttatcggtgtcattcacctttcgtgttttttttaatttatcctctgttgattttttcttttgctttatgggtttggcttgtttttcttgcatggtttggagctgatcgcttctcccccaccccctagggkaccagcaggcagagccttgccctctgctcaggctggggtccagtgggaggggcccaagatctctgctcagagaagtgcagggggagccttccagctcactctccctgaggactggcttgacaggggctatgggtttgctttggtgttgtttttaaaaaaagaaaatatatttttttgaaaaaacgactgcccatcccgggtcctttccctgatgggttggggcagttacctggttgctgttttaattaaaaa

SEQ ID NO: 839 - DNA, 600 bp, Homo sapiens; identical to SEQ ID NO: 838

SEQ ID NO: 840 - DNA, 1400 bp, Homo sapiens
tgaaaggatctgggctaggtatattargggtagttgccaataacctgaagaagctggcattgtttacagaaacagatcaagggctataatttatgtcattttatagcagcagtatctattaatacatgccttttcctcccatccacctcccccgcacacacacaaagatgacctgggacatgatttttttattcccacattttcttggagcacaaacaactttgttgaggattttggaaggaaagcacaactgggtcctttattcatttctgggacagaaagagggtcagtggacttttgtgggcctccagcttctctcagagtctccccctctgcagcccatcctgggagtgtattaactggagggaagatgggtcttgcagtacatttgttttgcccagccatcactcttttttgtgaggagcctaaatacattcttcctggggtccagagtccccattcaaggcagtcaagttaagacactaacttggccctttcctgatggaaatatttcctccatagcagaagttgtgttctgacaagactgagagagttacatgttgggaaaaaaaagaagcattaacttagtagaactgaaccaggagcattaagttctgaaattttgaatcatctctgaaatgaagcaggtgtagcctgccctctcatcaatccgtccgtctgggtgccagaactcaaggttcagtggacacatccccctgttagagaccctcatgggctaggacttttcatctaggatagattcaagacctttacctcagaattatgtaaactgtgattgtgttttagaaaaattattatttgctaaaaccatttaagtctttgtatatgtgtaaatgatcacaaaaatgtattttataaaatgttctgtacaataaagttacacctcaaagtgtactcttggaatggattctttcctgtaaagtcttatctgcgactctgtctcgggaatgttttgtctgttgccgtcagccgaactttgttatggagggagcagcctcacacaagcagaaacactcctgtggatggtattgtagcatgtattgtttattttagtcaatagaccctctccttawaaatggtgtttagtctwcctgttgcatttcatgggcctgggggtttcctrgcagaggatattggagcccctttttgtgacattaccaattacatctttgtccacgtttaatactttgttttggaaaatttaaatgctgcagatttgtgtagagttctaataccaaagacagaagtaaatgttttccatatactttgtcttgcctgtatgcagccctygtgtaatayggtgaattagagtggtatttcactttgtattattttgtaaatatgtcaatataataaatagtgactaaaaaaaaaaaaaa

SEQ ID NO: 841 - DNA, 1400 bp, Homo sapiens; identical to SEQ ID NO: 840

SEQ ID NO: 842 - DNA, 600 bp, Homo sapiens
gccccacctctacacctacactgcgccggcggccctgggctccaccggcaccgtggcccacctggtggcctcgcaaggctctgcgcgccacaccgtgcagcacactgcctacccagccagcatcgtccaccaggtccccgtgagcatgggcccccgggtcctgccctcgcccaccatccacccgagtcagtatccagcccaatttgcccaccagacctacatcagcgcctcgccagcctccaccgtctacactggatacccactgagccccgccaaggtcaaccagtacccttacatataaacactggaggggagggagggagggagggagggagagaatggcccgagggaggagggagagaaggagggaggcgctcctgggaccgtgggcgctggccttttatactgaagatgccgcacacaaacaatgcaaacggggcaggggcgggggggggggggggggcagagggcagggggacgggtcgggacaccagtgaaacttgaaccgggaagtgggaggacgtagagcagagaagagaacatttttaaaaggaagggattaaagagggtgggaaatctatggtttttattttaaaaaag

SEQ ID NO: 843 - DNA, 1400 bp, Homo sapiens
gatatgaggatcttggagctaacgccagaaccagaccggcctcgaattctgcctcctgaccaacgacctcccgagcctcctgaaccaccaccagtcactgaggaagatctagattatcggacagaaaaccagcatgtacccaccaccagttcttcattaactgaccctcatgccggagtgaaggcagccctgttacagctgcttgctcagcatcagccccaggatgaccccaaaagagaaggtgggattgattatcaagcaggagacacttacgtgtccacttcagactacaaggacaactttggatcctcttctttctcttctgctccttatgttagcaatgatggtctaggaagcagttctgctccaccactagaacgacgtagtttcattggaaattcagatattcagtctttggataactacagtactgcttcatctcattctggtggtccacctcagccttctgccttttctgagtcatttcccagttcagtagctggatatggagacatttacctcaatgctggtcccatgttgtttagtggagacaaggaccatagatttgaatatagccatggtcctattgcagtcctggcaaacagcagtgacccttccacggggccagagagtactcatcctttgccagcaaagatgcacaactataactatggtggtaacttacaggaaaatccgagtggccccagcctcatgcatggacagacctggacttctcctgcccaaggacctggatattcacaaggatacaggggacatattagcacatcaactggcagaggcagaggcagagggttaccatactgagtatctgtttttcctcaggcacatcatttttatctggaaagacttttctagctgcaatttaaggcagcaatccaagagacttgaataataataattcaacaacagctttatttttatgtggagaagggtcttgcatacaatagtttaaaaaagacaaaaaaaacctttgcttaaattcatgctgttctaaaaactagatcgattgtacatcttcacaaattctagttaacaattttattttgtattcttgcagttttaagtggatgctaattttaggggcataagccttttatggccctcttgcagatcttctgaactatgcacatttgtgctttttttgtaagtttggaccaacttttatgtaacaaacagcccctccccacctccagttttacaacaatcagaaagggcactgatttatttggtatttttctttttacaaagctacctttagtcaaaggtcactgtcagtctttgcacctgctttcagtgttattgtgaaaggtgtactttgtgctcatttcagaaaataaaacacaacctttctcttgatgcaacagttttataaaaaaaaa

SEQ ID NO: 844 - DNA, 1400 bp, Homo sapiens
gtttcagagctttcccatttaagaaaaatagatcttgagattctgattcttttccaaacagtcccctgctttcatgtacagctttttctttaccttacccaaaattctggccttgaagcagttttcctctatggctttgcctttctgattttctcagaggctcgagtctttaatataaccccaaatgaaagaaccaaggggaggggtgggatggcacttttttttgttggtcttgttttgttttgttttttggttggttggttcgttattttttaagattagccattctctgctgctatttccctacataatgtcaatttttaaccataattttgacatgattgagatgtacttgaggcttttttgttttaattgagaaaagactttgcaattttttttttaggatgagcctctcctagacttgacctagaatattacatattcctccagtaagtaatactgaagagcaaaagagaggcaggattggggtcacagccgcttcttcagcatggaccaagtgggccttggggattgcagcgttctcgaagtggctgtaggactcgaatttacagaaagccacagaggtgcaacttgaggctctgctagcaagccaccagtgaggctattgggtaaccacctttctatacaggagattggaatctactttgtcatttatccaccacagtgacaaaggaaaagtggtgccgttatgcaatccatttaactcataaacatattactctgagtaactggccagccattcatcggatccttcattgggtactcctgaaatcagacatgttcctgtagaaagaattttaagttaggctttctatgcacctatcaagaatcaagagaatagattgtatcaaacaacggcagggaaatccttcagcaattctaatccactttgggttttcagctgtttttacatctaaagcaatagactagaactgaattatcttctacatagtaaaatcacaattgtggaattacaggaattctggtgatattaaggtgaaataacaaaacacaaaaggccctattttaacagttgatgtgacagtaagttttaatagaacctgtaacttcattttggaaatgcttctccaccaaataagggctttttcccctatttaaggagccagatggattgaaagatgtggaaataggcagctgtagatcttgatcttccaggtaccccatgtacctttattgagcttaattataatactgtcaaattgccacgatctcactaaaggatttctatttgctgtcagttaaaaataaagccctaaatacatttttattctttctactgagggcattgtctgttttctttgtaaatgccgtacaataaacaaattatttaataacctaaaaaaaaaaaaaaaaaaaaa

SEQ ID NO: 845 - DNA, 1400 bp, Homo sapiens
gcatgcacagctgcttgtcctgctctcttcaggaggccctggtgtcaggcaggtttgccagtgaagacttcttgggtagtttagatcccatgtcacctcagctgatattatggcaagtgatatcacctctcttcagcccctagtgctattctgtgttgaacacaattgatacttcaggtgcttttgatgtgaaaatcatgaaaagaggaacaggtggatgtatagcatttttattcatgccatctgttttcaaccaactatttttgaggaattatcatgggaaaagaccagggcttttcccaggaatatcccaaacttcggaaacaagttattctcttcactcccaataactaatgctaagaaatgctgaaaatcaaagtaaaaaattaaagcccataaggccagaaactccttttgctgtctttctctaaatatgattactttaaaataaaaaagtaacaaggtgtcttttccactcctatggaaaagggtcttcttggcagcttaacattgacttcttggtttggggagaaataaattttgtttcagaattttgtatattgtaggaatccctttgagaatgtgattccttttgatggggagaaagggcaaattattttaatattttgtattttcaactttataaagataaaatatcctcaggggtggagaagtgtcgttttcataacttgctgaatttcaggcattttgttctacatgaggactcatatatttaagccttttgtgtaataagaaagtataaagtcacttccagtgttggctgtgtgacagaatcttgtatttgggccaaggtgtttccatttctcaatcagtgcagtgatacatgtactccagagggacgggtggaccccctgagtcaactggagcaagaaggaaggaggcagactgatggcgattccctctcacccgggactctccccctttcaaggaaagtgaacctttaaagtaaaggcctcatctcctttattgcagttcaaatcctcaccatccacagcaagatgaattttatcagccatgtttggttgtaaatgctcgtgtgatttcctacagaaatactgctctgaatattttgtaataaaggtctttgcacatgtgaccacatacgtgttaggaggctgcatgctctggaagcctggactctaagctggagctcttggaagagctcttcggtttctgagcataatgctcccatctcctgatttctctgaacagaaaacaaaagagagaatgagggaaattgctattttatttgtattcatgaacttggctgtaatcagttatgccgtataggatgtcagacaataccactggttaaaataaagcctatttttcaaatttaaaaaaaaaaaaaaaaaagtccagcaatttcgttacttatg

SEQ ID NO: 846 - DNA, 1400 bp, Homo sapiens
tcagatgctcaaaggccttaagtacatccactctgctggggtcgtgcacagggacctgaagccaggcaacctggctgtgaatgaggactgtgaactgaagattctggatttkgggctggcgcgacatgcagacgccgagatgactggctacgtggtgacccgctggtacckagcccccgaggtgatcctcagctggatgcactacaaccagacagtggacatctggtctgtgggctgtatcatggcagagatgctgacagggaaaactctgttcaaggggaaagattacctggaccagctgacccagatcctgaaagtgaccggggtgcctggcacggagtttgtgcagaagctgaacgacaaagcggccaaatcctacatccagtccctgccacagacccccaggaaggatttcactcagctgttcccacgggccagcccccagsctgcggacctgctggagaagatgctggagctagacgtggacaagcgcctgacggccgcgcaggccctcacccatcccttctttgaacccttccgggaccctgaggaagagacggaggcccagcagccgtttgatgattccttagaacacgagaaactcacagtggatgaatggaagcagcacatctacaaggagattgtgaacttcagccccattgcccggaaggactcacggcgccggagtggcatgaagctgtagggactcatcttgcatggcaccgccggccagacactgcccaaggaccagtatttgtcactaccaaactcagcccttcttggaatacagcctttcaagcagaggacagaagggtccttctccttatgtgggaaatgggcctagtmsmtgcrsaattcwawgayktcrsytgggagaaactagctctgatcctaacaggccacgttaaactgcccatctggagaatcgcctgcaggtggggccctttccttcccgccagagtggggctgagtgggcgctgagccaggccgggggcctatggcagtgatgctgtgttggtttcctagggatgctctaacgaattaccacaaacctggtggattgaaacagcagaacttgattcccttacagttctggaggctggaaatytgggatggaggtgttggcagggctgtggtccctttgaaggctctggggaagaatccttccttggctctttttagcttgtggcggcagtgggcagtccgtggcattccccagcttattgctgcatcactccagtctctgtctcttctgttctctcctcttttaacaacagtcattggatttagggcccaccctaatcctgtgtgatyttatyttgatccttattaattaaacctgcaaatactctagttccaaataaagtcacattctcaggtwmmarrwrramawraaaaaa

SEQ ID NO: 847 - DNA, 1400 bp, Homo sapiens; identical to SEQ ID NO: 846

SEQ ID NO: 848 - DNA, 1400 bp, Homo sapiens
ctcctgccccaggaaactgctgagatccacctccacagcctgtcgccggggcccagcaaatagcagcctttctggcaggtcctcccctctcttgtcagatgcccaggagggaagcttctgtctccagctttcccgagtaccagtgacacgtctcgccaagcaggacagtgcttgatacaggaacaacatttacaactcattccagatcccaggcccctggaggctgcctcccaacagtggggaagagtgactctccaggggtcctaggcctcaactcctcccatagatactctcttcttctcataggtgtccagcattgctggactctgaaatatcccgggggtggggggtgggggtgggtcagaaccctgccatggaactgtttccttcatcatgagttctgctgaatgccgcgatgggtcaggtaggggggaaacaggttgggatgggataggactagcaccattttaagtccctgtcacctcttccgactctttctgagtgccttctgtggggactccggctgtgctgggagaaatacttgaacttgcctcttttacctgctgcttctccaaaaatctgcctgggttttgttccctatttttctctcctgtcctccctcaccccctccttcatatgaaaggtgccatggaagaggctacagggccaaacgctgagccacctgcccttttttctcctcctttagtaaaactccgagtgaactggtcttcctttttggtttttacttaactgtttcaaagccaagacctcacacacacaaaaaatgcacaaacaatgcaatcaacagaaaagctgtaaatgtgtgtacagttggcatggtagtatacaaaaagattgtagtggatctaatttttaagaaattttgcctttaagttattttacctgtttttgtttcttgttttgaaagatgcgcattctaacctggaggtcaatgttatgtatttatttatttatttatttggttcccttcctattccaagcttccatagctgctgccctagttttctttcctcctttcctcctctgacttggggaccttttgggggagggctgcgacgcttgctctgtttgtggggtgacgggactcaggcgggacagtgctgcagctccctggcttctgtggggcccctcacctacttacccaggtgggtcccggctctgtgggtgatggggaggggcattgctgactgtgtatataggataattatgaaaagcagttctggatggtgtgccttccagatcctctctggggctgtgttttgagcagcaggtagcctgctggttttatctgagtgaaatactgtacaggggaataaaagagatcttatttttttttttatacttggcgttttttgaataaaaaccttttgtcttaaaac

SEQ ID NO: 849 - DNA, 1400 bp, Homo sapiens
gctcgcgggctgagtgtctgtcgctgctgccgcctccacccagcctccgccatggacctcttcggggacctgccggagcccgagcgctcgccgcgcccggctgccgggaaagaagctcagaaaggacccctgctctttgatgacctccctccggccagcagtactgactcaggatcagggggacctttgctttttgatgatctcccacccgctagcagtggcgattcaggttctcttgccacatcaatrtcccagatggtaaagactgaagggaaaggagcaaagagaaaaacctccgaggaagagaagaatggcagtgaagagcttktkgwwmwswwagttystwaagcctcttcggtgatctttggtctgaagggctatgtggctgagcggaagggtgagagggaggagatgcaggatkcccmyktcatcctgaacgmymtcwcygwggasyrtmgryycsmatcgkccswcaktactcgggtttcatattttgctgtktttgatggacatggaggaattcgagcctcaaaatttgctgcacagaatttgcatcaaaacttaatcagaaaattksctaaaggrgatgtaatcagtgtagmgvmmrccgtgaagagatgccttttggacactttcaagcatactgatgaagagttccttaaacaagctkycagccagaascytgcctggaaagatgggtccactgccacgtgtgttctggctgtaracaacattctttatattgccaacctcggagatagtcgggcaatcttgtgtcgttataatgaggagagtcaaaaacatgcagccttaagcctcagcaaagagcataatccaactcagtatgaagagcggatgargatacagaargctggaggaaacgtmagggatgggcgtgttttgggcgtgctagaggtgtcacgctmcattggggacgggcagtacaagcgctgcggtgtcacctytgtgcccgacatcagacgctgccagctgacccccaatgacaggttcattttgttggcctgtkatgggctcttcaaggtctttaccccagaagaagccgtgaacttcatcttgtcctgtctcgaggatgaaaagatccagacccgggaagggaartccgmagccgackcccgytmcraascagcytgcaacargctggccaacaaggcggtgcagcggggctcrgccgacaacgtcactgtgatggtggtgcggatagggcactgaggggtggcgcgcggccaggagcacgcatggtattgacttaaaaggttcattttgtgtgtgtgcacattgtgtgttttgtgtactcctgtgggactcccatggttgtaaataaaggtttctcttttttttcctaaaaaaaaaaaaaaaaaaaaaaaaaaaaaaaaaaaaaa

SEQ ID NO: 850 - DNA, 1400 bp, Homo sapiens; identical to SEQ ID NO: 849

SEQ ID NO: 851 - DNA, 600 bp, Homo sapiens
attgcagacggcatggcctaccttgctgccaacaagtttgtgcaccgagatctagcagcccgcaactgcatggtgtcccaggacttcaccgtcaagatcggggacttcgggatgactcgggacgtgtatgagacagactattaccgcaagggtgggaaggggctgctgcccgtgcgctggatggcccccgagtccctcaaagatgggatcttcaccacccactcggatgtctggtcctttggcgtggtactctgggagattgtgaccctggcagaacaaccctaccagggcctgtccaatgagcaggtgctgaagttcgtcatggatggcggggtcctggaggagctggagggctgtccccttcagctgcaggagctgatgagccgctgctggcagccgaacccacgcctgcgcccatctttcacacacattctggacagcatacaggaggagctgcggccctccttccgcctcctctccttctactacagcccggaatgccggggggcccggggctccctgcctaccaccgatgcagagcctgactcctcacccactccaagagactgcagccctcaaaatgggggtccagggcactga

SEQ ID NO: 852 - DNA, 600 bp, Homo sapiens
gggaactgaacccttgtggacccccgaacctggctctgacaagaagtctgccaccaagctggagcctgagggagaggcacagccccaggcacagcctgagacaaaacccgaggggacagcaatgcaaatgtccaggcagtcggagatcctgggtttccccagcaagccgtcgactatggagacagaggaagggcccccccaacagcctccagagacgcgggcccagtgagcttcttgcggcccagggaatgagatggagctcacggcttaaagcccaagctctgaagaagtcaagggtggagccagagaaggaaggcagtcccagatgagcctctattttcatcagcttcttctctctccccttgaacttggtaacccacatggttctcccgtggcccctaggtggatgaggccaaagtcaaatccaaggctgagacagtcgtgcgactcctactcccccagagcgtgacccggagcaggtgctggacacagagcctgtctcagcagagggtccccactggccgcaacggctcagtgacagcaagagcaggaagagcagcaggaaggcaccgctgtccaccttgggcaccatttatcctc

SEQ ID NO: 853 - DNA, 600 bp, Homo sapiens
  misc_feature (540)..(540): n is a, c, g, or t
aggacaacgtgatgaagatcgcagacttcgggctggcccgggacgtgcacaacctcgactactacaagrwgacraccaacggccggctgcccgtgmmgtgratggmgcctgaggccttgtttgaccgagtctacactcaccagagtgacgtctggtcctttggggtcctgctctgggagatcttcacgctggggggctccccgtaccccggcatccctgtggaggagctcttcaagctgctgaaggagggccaccgcatggacaagcccgccaactgcacacacgacctgtacatgatcatgcgggagtgctggcatgccgcgccctcccagaggcccaccttcaagcagctggtggaggacctggaccgtgtccttaccgtgacgtccaccgacgagtacctggacctgtcggcgcctttcgagcagtactccccgggtggccaggacacccccagctccagctcctcaggggacgactccgtgtttgcccacgacctgctgcccccggccccacccagcagtgggggctcgcggacgnkmagggccactggtccccaacaatgtgaggggtcctagcagccaccctgctgctggtgca

SEQ ID NO: 854 - DNA, 600 bp, Homo sapiens
ctgtgggcagggccatgtccctttctcmtctcccctcaacctcttactgctgttctccctttctccgtcyttcatggaagccctggsagataacctgscttcctggagttgatggaataaaggttggggtggccmtaatggtttgttgggggtgaggraaaaaacccrcaggkrccagaatgttttgttgttcttttgttttcttttttgtaccaaagtcaactgcacgtgttttatatttttaagagatcgtaggcaattagagatcgaagcctcctatctccacatctctgaagaagttgaggggtgggggagagaatgacttctgccttcatctgcagtaacggggggacctatactgacctcttccccagccatttagaaacaagttctagggtgggttggaaaatctccaagagccctgacctcatcttccacctcagcaaccatgacctgaaacctcagcgtgaatttgggggatttttcagtggaacccttgcccccaaatgtcgaccagcccccaaatgtcgaagaattttcttcttgccaattttgttgtttaaaaaaaaaattcagggaaaattaaaaacctggaactcc

SEQ ID NO: 855 - DNA, 600 bp, Homo sapiens
acaagttggagtcactcttatgctgtacccagtttctaaactggagactgtgtgtgccctctgggctctgagtacccctgctttgggcttgggcctaggctgcattgaaaagagctgaaggttgtggcctttgcgctcctggcccagcctttgttccccactggagcagaaggggagatggacgacacggtgggggcatctggcctggccagtgccctgatcccagagagcccgaggaggtgtctcaggctgcctgagtcgtgacctgctaggccagagcccactccatctggtagaagggaaagcccatatgctaccaccagctgtgtccaaaaccgccagctctgttcttcctcagccagcctcgcccatccccttgaggtctcagcccctttcccttgtagctcctcccctggagggggaatggcagcaggggttggggaaacagcatctccaagcagcttagagttggccatatttacctcagcctgggcgctggtcctttcttccggcccctcccctccaaaatgtgcctattgctagagctcctccctctcaacacccagtttccttgggagttgtcattaaaggaaaaaaaaa

SEQ ID NO: 856 - DNA, 600 bp, Homo sapiens; identical to SEQ ID NO: 855

SEQ ID NO: 857 - DNA, 600 bp, Homo sapiens
tgtggcggaggatccaggaagctacggagagaagcagccagcatggtgttccgtgcctcccggacgtttttcaggaggcctggttggacttgggttcctggatggtgggattgttgtacagcctctcaggagaccctgctgtcaagactgtgtgtgtggatttctcacccttagaagctctactaagacatcaacggaattagggccttcctttttgccttgtgagcgccaaggaaaagaaactatctcggtcacgtgagcgccagcgaaaagaaactgtatcagtcatccagagaccgtttattgcccaacacgttattcttgctgttggtggggtaactagccgaggaagacacagcgccttcccttcaggagttgcgtctcctctgcaggccacgatggtctgctctggagcattgggtgaacacacaggctggctgctctgggcagcgccttcactctgaccctggagaaccatttcatttcatcctggtcagtctagagtctgtgcaccaggcagtccatccactgaaggctgtgtttattcttttcctgtgcccctcataatggaagaaagtaaactgcttatcccgagcctta

SEQ ID NO: 858 - DNA, 600 bp, Homo sapiens
aaatgctggaaagcragtgagttgcccattaattatgattaaaattctcacctttcacagacagacaataagccagacaacacaatcaaagctcaatagatgatttcttgcttttttcagtcatttataaatataggtgtaatttttcatggatcagttaagtacacttgaaggaagtaaatgattgtatcagtttatttctagtataaatgggtacctgtaataatactgagctcttggaagcgaatcatgcatgcaattagctccctcctcctcacctactccactcccatctttatgacatttcaaatgtttatttggaaacaacagcctagatcactgttgaaggtgttcatggcatagttggagtctctgactgtttaaagaaatcacagaacagtacttttcttttagtgtttcattaagcctatgatgtaaaatgaaatgcttctgagcagtcttgtaatattgttcattcatattgacctgcatctcatcattgcatgttttatgttttcaaacatgccataaggaaaacgagtgcctgaactgcatgatttattagtttctctccactctgcattaaagtgctaatgattt

SEQ ID NO: 859 - DNA, 600 bp, Homo sapiens; identical to SEQ ID NO: 858

SEQ ID NO: 860 - DNA, 600 bp, Homo sapiens
caccagtctttctgggaactcacacctgcccgccatcttggtactttaggttaatccctcaagcatgaaagctggatcttttggggtttaagaagcccaagccttgttcctgccctggcctagggagcactcaggagggttccttggtcctcatctctcccacctccgttccctctgggccccacactagccacagcgcgggccttgtgctggagtttgagcctgggacagggagagggaggcttggagacagtctgacccagtgccctctaggccacccacttctaggcctgccctgccgccgtggagccctgggcaagctctttcccctttctgggcctgggtctccccatctcttcaatggggctgataccttcacagcccacagcatgggcacttatgaggacaaagtgaatttaacctggaaaagaatgtatttgagagtttcttttaaataatcagcgggtgttggtgatttgtagcccttctgcccttaaatgcttccttgggcaagagctgtctgtcctccctgcaggaggctgagtgtraagagtatcattcattgtttctytattaaattattttctctaaaaaaaaaaa

SEQ ID NO: 861 - DNA, 1400 bp, Homo sapiens
gtcgccgtcaagtgcattaagaacgacgccactgcccaggccttcctggctgaagcctcagtcatgacgcaactgcggcatagcaacctggtgcagctcctgggcgtgatcgtggaggagaagggcgggctctacatcgtcactgagtacatggccaaggggagccttgtggactacctgcggtctaggggtcggtcagtgctgggcggagactgtctcctcaagttctcgctagatgtctgcgaggccatggaatacctggagggcaacaatttcgtgcatcgagacctggctgcccgcaatgtgctggtgtctgaggacaacgtggccaaggtcagcgactttggtctcaccaaggaggcgtccagcacccaggacacgggcaagctgccagtcaagtggacagcccctgaggccctgagagagaagaaattctccactaagtctgacgtgtggagtttcggaatccttctctgggaaatctactcctttgggcgagtgccttatccaagaattcccctgaaggacgtcgtccctcgggtggagaagggctacaagatggatgcccccgacggctgcccgcccgcagtctatgaagtcatgaagaactgctggcacctggacgccgccatgcggccctccttcctacagctccgagagcagcttgagcacatcaaaacccacgagctgcacctgtgacggctggcctccgcctgggtcatgggcctgtggggactgaacctggaagatcatggacctggtgcccctgctcactgggcccgagcctgaactgagccccagcgggctggcgggcctttttcctgcgtcccagcctgcacccctccggccccgtctctcttggacccacctgtggggcctggggagcccactgaggggccagggaggaaggaggccacggagcgggmggcagcgccccaccacgtcgggcttccctggcctcccgccactcgccttcttagagttttattcctttccttttttgagattttttttccgtgtgtttattttttattatttttcaagataaggagaaagaaagtacccagcaaatgggcattttacaagaagtacgaatcttatttttcctgtcctgcccgtgagggtgggggggaccgggcccctctctagggacccctcgccccagcctcattccccattctgtgtcccatgtcccgtgtctcctcggtcgccccgtgtttgcgcttgaccatgttgcactgtttgcatgcgcccgaggcagacgtctgtcaggggcttggatttcgtgtgccgctgccacccgcccacccgccttgtgagatggaatygtaataaaccacgccatgaggamammrccgcccgcctcggcgcttcctccaccgaaaaaaaaaaaaaaaaaa

SEQ ID NO: 862 - DNA, 1400 bp, Homo sapiens; identical to SEQ ID NO: 861

SEQ ID NO: 863 - DNA, 1400 bp, Homo sapiens
ggcagccgcctctacacacaccaggtggccaccaggtctgtgggctgcatcatgggggagctgttgaatgggtccccccttttcccgggcaagaacgatattgaacagctttgctatgtgcttcgcatcttgggcaccccaaaccctcaagtctggccggagctcactgagctgccggactacaacaagatctccyttaaggagcaggtgcccatgcccctggaggaggtgctgcctgacgtctctccccaggcattggatctgctgggtcaattccttctctaccctcctcaccagcgcatcgcagcttccaaggctctcctccatcagtacttcttcacagctcccctgcctgcccatccatctgagctgccgattcctcagcgtctagggggacctgcccccaaggcccatccagggcccccccacatccatgacttccacgtggaccggcctcttgaggagtcgctgttgaacccagagctgattcggcccttcatcctggagrggtgagawsytggmmctggtcccgtctgcctgctcctcaggaccactcagtccacctgttcctctgccacctgcctggcttcaccctccaaggcctccccatggccacagtgggcccacaccacaccytgccccttagcccttgcgagggttggtctcgaggcagaggtcatgttcccagccaagagtatgagaacatccagtcgagcagaggagattcatggcctgtgctcggtgagccttaccttctgtgtgctactgacgtacccatcaggacagtgagctctgctgccagtcaaggcctgcatatgcagaatgacgatgcctgccttggtgctgcttccccgagtgctgcctcctggtcaaggagaagtgcagagagtaaggtgtccttatgttggaaactcaagtggaaggaagatttggtttggttttattctcagagccattaaacactagttcagtatgtgagatatagattctaaaaacctcaggtggctctgccttatgtctgttcctccttcatttctctcaagggaaatggctaaggtggcattgtctcatggctctcgtttttggggtcatggggagggtagcaccaggcatagccacttttgccctgagggactcctgtgtrcttcacatcactgagcactcatttagaagtgagggagacagaagtctaggcccagggatggctccagttggggatccagcaggagaccctctgcacatgaggctggtttaccaacatctactccctcaggatgagcgtgagccagaagcagctgtgtatttaaggaaacaagcgttcctggaattaatttataaatttaataaatcccaatataatcccaaaaaaaaaaaaaaaaaaattcctgcggccgcaagga

SEQ ID NO: 864 - DNA, 1400 bp, Homo sapiens
cattttttgttttgagttccctcattcttattaccagaaagagcttgcaaatagttttactttcttggcactggaagggtagttctggaaagctactttgttgagagtctcattcttccctggagttaatagagtgattcacaatctttggggttttctcctcatcaaaagcatttcttaagtgcctatctaaaagcaattaaagactgtgtctgccctttagaagctaagaatttgattcatgatgcaaattaactagataatttgcaaagtacccttgagattgaattttctctattatatatttcccatatttcaggtgaataatttaatttaaatgacaaaaccctatctagtcaactgggcataatgacattttctttaaattagactctattttgaattaaaagagttttattataaaccgtgtgtttttggtttttctaagtatatagaaagcttgtataattcagatttatcaatttcctgatttaatgtagactttgacttttttattaaaaacctttgtattaaagcaagttatgttatttttcttttatgcatttattactaacatagctttaaatctttaaatgtattgaagcattgtgctgtctgaaaataaggaattgcttataaaccagccacttctgaatacaatatgtagctgatttaataagctagttagtgaatggaaaataagtgtggagtattaaaaatgttctttggttggtaaggcctaagatagggtttcatttatttctatactttttctgttttttaaacacctgcatatttttatgtaaatctctaaatttaaaatattttaagtacatttatttttggtgttttattgtataaaaccttagacaatcaatcagtcagtctttactgacaggagcagcagctatctgtcttttgctgatctacaaataaatgaattgagaatttagtccatagaggtccctggctaccaaacacattctcctttgaattgttaaaattcagaacattcaaaataactgttttgctacaacccatgattattttcctgttgtgtttatttaaatttactttctctttagaagtgcacttatttctgaaaaatcttaatgaaacaaacgcttagaacaaatataaatatgagacacttgggactactagagatattttagatttttatgaaaaaaatgtgaggggatattgctgctttaaaaaggaataaagtaataaaaatatatctcagctatttttttaaagcaatataattcagcaattgtctagaaaagtaatcatgaggctactgagtttggtgttcagttactgagtttcaaaaatgttttggtggcatgaggacaaaatttcattgaaggtaagataagaataaaaactatgtttac

SEQ ID NO: 865 - DNA, 1400 bp, Homo sapiens
gattaattaaggcagcctcatagtcaatcccagttgcttttccccagatttggtgactcatcaatggatatgtgttttggatgtatgatatgcttggtttaaattctctttgtccaggtcaaaaatttggaacttgtttcttattttactatgtctaggtttgcaagaattgacataatgtttgtttcactgatttaaaaaattttgcatgtaagaatgtactttaggaaacatacccaggaagtacagttgataaatataacatcaactgaaatagtcaattagcaattttgtgtttctaaatatctatggtcccctgaaattttgacttagtatataggtgcagagacacccacttagaaagttaactgtttggaaaaacatttctctttagtttcaaaaaccatatataattaaatttgtaaggatatactgagtaccctaggccaacttttttttctttgcagagaaccttttttgttttattcttcagtgttcatatagcacctggcccattacatatctaggcaactaaaaacaaacattgtaagaatgaatatttttaatgtagtaattcctagttacaatagatacataaagtaatgaactcagcattctgtacttttgcttcaggtttgaagtaaaaattatctagttaaattttttttatttcacgttaccatgccatttcacattaccataccatcagatagcatggcttattgtgggcatttctgcagtgaatacattttccaaaacagttaaattgtctgtttggatttgctttaaagtcttgtgtaagagagaagaaactatttctataataaaaagcactctcatcagatatctgacataattagatacaatataacattttactaagttcagtattcatgttttaaaggtgtttatactgatttgattgtgctggcaaatatactgtattgttaatattgaactgtttatttttctcttagtcttcttatttaattaacttcattgccgctggattctgttcagcctttaaaaatatttcttagtggtcattgctctgcagaactcaaaaagaaaattgtacttgttcatagacatttttaaagggttaatttattgttcagccttatcccttggcacgtaaacagactactagacttattgtaggttcgtttgagctttgtgttgtaaaattaaaaatgcttctgtaaagttttcaaggtagggagtgattttattattgtgtatatctaatatattaagtatgtgtgatactaaggtttgactgctataattatttgtactgttgatcacatgtacttaaaacatctgatactgtattctaagacaggttgtttttgcaattaaatttattttaataagacgatcatgaataaaactttaaa

SEQ ID NO: 866 - DNA, 1400 bp, Homo sapiens
gagcagaagattgaagaggagctggctgcccttcagaaggaacgcagcgagagaataaagaacctattggaaaggcaagagcgagagattgaaacttttgacatggagagcctcagaatgggatttgggaatttggttacattagattttcctaaggaggactacagatgagattaaattttttgccatttacaaaaaaaaaaaaaaaaaagaaaacaraaaaaaattcagaccctgcaaaaccacattccccattttaacgggcgttgctctcactctctctctctcttactcttactgacatcgtgtcggactagtgcctgtttattcttactccatcaggggcccccttcctccccccgtgtcaactttcagtgctggccaaaacctggccgtctcttctattcacagtacacgtcacagtattgatgtgattcaaaatgtttcagtgaaaactttggagacagttttaacaaaaccaataaaccaacaacaaaaaaagtggatgtatattgctttaagcaatcactcattaccaccaatctgtgaaagtaaagcaaaaaataataataataaatgccaagggggagagagacacaatatccgcagccttacaccttaactagctgctgcattattttattttattttatttttttggtatttattcatcaggaataaaaaaaacaaagttttattaaagattgaaaatttgatacattttacagaaactaattgtgatgtacatatcagtggtgacatattattacttttttggggacggggggtgggtggggtgaagagatcttgtgatttttaagaacctgctggcaagagtttaacttgtcttcagcatattctgattgtatcataatcattttctgctgttgcagaggakgtgaatacacttarggagctcacagaatcccagtagcacaaattgggctttggcaaatsgtgtattttgtgtatagaaggaatttaaggagaggtattacttattttcatattgtattttaactgtttctckgatcaaattttttwacttcytcytcstgttcytccccacctccytccttttccagttcagtatttggagttcaacactgtctctcaatcagatcatctkgatctttttctttatctcccttccccttcctaagtcccatttcttggtcataaatattgcattattcacactttcaaactgtgtattttcttacaataaaaaatgatgaaaaaaaaaaarrmwwwamttcttttgcatgcactttaaaaacaaaacaaaacatttttcaggttccaaggaagagcatgataactgtcagagcttttaattatatttgtaaataaaagtgttcatcacaaaaaaaaaaaaaaaaaaaaaaaaaccggaattc

SEQ ID NO: 867 - DNA, 1400 bp, Homo sapiens; identical to SEQ ID NO: 866

SEQ ID NO: 868 - DNA, 600 bp, Homo sapiens
ggacacggactttgaggaggaagatgacaaccccgactgggtgtcagagctgaagaagcgagctggatggcaaggcctgtgcgacagataatgcctgaggaaatgttcctgagtcacgctgaggagagscttcactcaggagttcatgctgagatgatcatgagttcatgcgacgtatattttcctttggaaacagaatgaagcagaggaaactcttaatacttaaaatcgttcttgattagtatcgtgagtttgaaaagtctagaactcctgtaagtttttgaactcaagggagaaggtatagtggaatgagtgtgagcatcgggctttgcagtcccatagaacagaaatgggatgctagcgtgccactacctacttgtgtgattgtgggaaattacttaacctcttcaagccccaatttcctcaaccataaaatgaagataataatgcctacctcagagggatgctgaccacagacctttatagcagcccgtatgatattattcacattatgatatgtgtttattattatgtgactctttttacatttcctaaaggtttgagaattaaatatatttaattatgaaaaaaaaaaaaaaa

SEQ ID NO: 869 - DNA, 600 bp, Homo sapiens
tggatatagctttgagaaactcttccctgatgtccttttcccagctgactcagaacacaacaaacttaaagccagtcaggcaagggatttgttatccaaaatgctggtaatagatgcatctaaaaggatctctgtagatgaagctctccaacacccgtacatcaatgtctggtatgatccttctgaagcagaagctccaccaccaaagatccctgacaagcagttagatgaaagggaacacacaatagaagagtggaaagaattgatatataaggaagttatggacttggaggagagaaccaagaatggagttatacgggggcagccctctcctttagcacaggtgcagcagtgatcaatggctctcagcatccatcatcatcgtcgtctgtcaatgatgtgtcttcaatgtcaacagatccgactttggcctctgatacagacagcagtctagaagcagcagctgggcctctgggctgctgtagatgactacttgggccatcggggggtgggagggatggggagtcggttagtcattgatagaactactttgaaaacaattcagtggtcttatttttgggtgatttttcaaaaaatgta

SEQ ID NO: 870 - DNA, 600 bp, Homo sapiens; identical to SEQ ID NO: 869

SEQ ID NO: 871 - DNA, 600 bp, Homo sapiens
gcccccagcaacagggaccataggaaggctcagcctgccggggagggccgaacccacatgacaaagagtgactccctgccctccttccgggtctccaccctgcctctggagtcacaccaccccgacccaaacaccatgggcggggccagccaccgggacagggctctctcggtgactgccaccgtaggggaaaccaaagggaaggaccctgccccagcccagcctcccccagctaggaaacagaacgtgggcagagacgtgaccaagccatccccagccccaaacactgaccgccccatctctctttctaatgagaaggactttgtggtacggcagaggcgggggaaagagagtttgcgtagcagccctcacaaaaaggccttgtaacggggagggcccaggggcaggactgtggagacccgtcctgaacgggcgactgtgtcttgactacctttcaaaaccagcactgtgtgggaatgtccgccaggcagagctcggagcctcattgagacaggggagagagaaagacaaagaggggaccttcttccagatgccttcccagttgtaaccggtaaaactgttaccagatagtgtttgtac

SEQ ID NO: 872 - DNA, 1400 bp, Homo sapiens
cttcgattacatcaagcagaggaggagcatggtctcgcccaactttggcttcatgggccagctcctgcagtacgaatctgagatcctgccctccacgcccaacccccagcctccctcctgccaaggggaggcagcaggctcttcactgataggccatttgcagacactgagccctgacatgcagggtgcctactgcacattccctgcctcggtgctggcaccggtgcctacccactcaacagtctcagagctcagcagaagccctgtggcaacggccacatcctgctaaaactgggatggaggaatcggcccagccccaagagcaactgtgatttttgtttttaagactcatggacatttcatacctgtgcaatactgaagacctcattctgtcatgctgccccagtgagatagtgagtggtcaccaggcttgcaaatgaacttcagacggacctcagggtaggttctcgggactgaaggaaggccaagccattacgggagcacagcatgtgctgactactgtacttccagacccctgccctcttgggactgcccagtccttgcacctcagagttcgccttttcatttcaagcataaggcaataaatacctgcagcaacgtgggagaaagaagttgctggaccaggagaaaaggcagttatgaagccaattcattttgaaggaagcacaatttccaccttattttttgaactttggcagtttcaatgtctgtctctgttgcttcggggcataagctgatcaccgtctagttgggaaagtaaccctacagggtttgtagggacatgatcagcatcctgatttgaaccctgaaatgttgtgtagacaccctcttgggtccaatgaggtagttggttgaagtagcaagatgttggcttttctggattttttttgccatgggttcttcactgaccttggactttggcatgattcttagtcatacttgaacttgtctcattccacctcttctcagagcaactcttcctttgggaaaagagttcttcagatcatagaccaaaaaagtcataccttcgaggtggtagcagtagattccaggaggagaagggtacttgctaggtatcctgggtcagtggcggtgcaaactggtttcctcagctgcctgtccttctgtgtgcttatgtctcttgtgacaattgttttcctccctgcccctggaggttgtcttcaagctgtggacttctgggatttgcagattttgcaacgtggtactactttttttttctttttgtctgttagttatttctccaggggaaaaggcaataattttctaagacccgtgtgaatgtgaagaaaagcagtatgttactggttgttgttgttgttcttgttttttatagtgtaaaataaaaatagtaaaaggag

SEQ ID NO: 873 - DNA, 600 bp, Homo sapiens
  misc_feature (486)..(486): n is a, c, g, or t
  misc_feature (513)..(513): n is a, c, g, or t
  misc_feature (550)..(550): n is a, c, g, or t
  misc_feature (561)..(561): n is a, c, g, or t
cagaaaccacttttaaaggatagtaattattcttgtttataacagtgccttaaggtatgatgtatttctgatggaagccattttcacattcatgttcttcatggattatttgttacttgkctaarawgcaatttgattttatgaagtatataccctttacccaccagagacagtacagaatccctgccctaaaatcccaggcttaattgccctacaaagggttattaatttaaaactccattattaggattacattttaaagttttatttatgaattccctttaaaaatgatatttcaaaggtaaaacaatacaatataaagaaaaaaataaatatattaataccggcttcctgtccccatttttaacctcagccttccctactgtcaccaacaaccaagctaaataaagtcaacagcctgatgtgtatctttctgtccctttcttcctgcttatatttaggaacatatgctcatttgagaaaggntctttctgcatattattattataattntacatcatactgcaacctgctttttgcatttaatagnacaggcttccnggtcaggtatgggtctaacttacccttttacttggtggc

SEQ ID NO: 874 - DNA, 600 bp, Homo sapiens; identical to SEQ ID NO: 873
  misc_feature (486)..(486): n is a, c, g, or t
  misc_feature (513)..(513): n is a, c, g, or t
  misc_feature (550)..(550): n is a, c, g, or t
  misc_feature (561)..(561): n is a, c, g, or t

SEQ ID NO: 875 - DNA, 1400 bp, Homo sapiens
gctttatttttcaaaacctttctctgatatttttctttaatttgctgattattcaaccacagagccttatgctataaatgtcatttgtattttaaaaaataatattccactcataaaactttaaaaccatctttcaacgaactatatatgtattatagttgctgccatagagttgatggtttttaattatctggaaccagcaatcatttaaaataaaccatattaagtttagtatgctggtattgtttattcattttatatgaatattcattgaaaatatatacacaatatatgtaatacacagcacttgattacaaaatgtaatttaattatattattgctggcagcattcagttaagagggtactttaaaaaatagaagtcagctttcacatctgatttctgtatgggctgtacttggttaacttgattttagaaaaaggactaacagaattgctaaagaaatgcatccaataaatgaaaaacagtaggaagatcaaatgtttttgtcaaatatattcacaacttgaccagattagctgtcctgtttgtaatgcaatattaatatgtcttttgggaaaaagcctacatatggaataaaataagtattgaagaatttttctttgtaacaatttagtagtcactgtttattgagaaattgttttttattttgtaaaataacatgatgttagtgttgaactcttaaacagaaagaaagcttaatataacagcttatagaacttgaactactaaatatgaaaataagtcatttgaaaaaaatacagtatgtaaaatttgttcattcgttgaggtaatggtgctatgtttttacaaaattgttcctacaccttttttctacttcaggtattttatttcaaccatttccatcaattgaactgttaccattgcctttttctgttgagaaattgcctctgaaaaatagtgctatttttcagcttaagtgttcttaagtgaatgaaattttcaaagtactagatcaccttaaaattatttcacgtactgaagacaattaagtccgttatgtttagagtagaaaatgtttaggttaaagagcatctgtcaacagaatctacaaaaaagattcccttgcatttgaattagttctctattctcctattgctaaatgtgtgatatatagagaggatgtataaaaggaaatggaaatagactatgtacttgtctggtttttgtttgtttttattttggaatgcttataagcctcctttacactgaataaggaagtagtttttgttttcttttgacctgtaaaatacctcacatggttgtttttacacatgaaagaaaaaggtatatgcgaacatacctgatatcaagaggagtatgcaccaaataaattttagctttgataaaactttccat

SEQ ID NO: 876 - DNA, 600 bp, Homo sapiens
caagaacagtattatagtgaaaaataccagaagcgagaacatattaaactgcttattcaaaagttgacggatgtcgcagaagagtgtcagaacaatcagttaaagaagctcaaagaaatctgtgagaaagaaaagaaagaattaaagaagaaaatggataaaaagaggcaggagaagataacagaagctaaatccaaagacaaaagtcagatggaagaggagaagacagagatgatccggtcatatatccaggaagtggtgcagtatatcaagaggctagaagaagcgcaaagtaaacggcaagaaaaactcgtagagaaacacaaggaaatacgtcagcagatcctggatgaaaagcccaagctgcaggtggagctggagcaagaataccaagacaaattcaaaagactgcccctcgagattttggaattcgtgcaggaagccatgaaaggaaagatcagtgaagacagcaatcacggttctgcccctctctccctgtcctcagaccctggaaaagtgaaccacaagactccctccagtgaggagctgggaggagacatcccaggaaaagaatttgatactcctctgtgaatgctcctg

SEQ ID NO: 877 - DNA, 600 bp, Homo sapiens; identical to SEQ ID NO: 876

SEQ ID NO: 878 - DNA, 1400 bp, Homo sapiens
actttgtccacgtggcggagaagctgctacagctgcagaacttcaacacgctgatggcagtggtcgggggcctgagccacagctccatctcccgcctcaaggagacccacagccacgttagccctgagaccatcaagctctgggagggtctcacggaactagtgacggcgacaggcaactatggcaactaccggcgtcggctggcagcctgtgtgggcttccgcttcccgatcctgggtgtgcacctcaaggacctggtggccctgcagctggcactgcctgactggctggacccagcccggacccggctcaacggggccaagatgaagcagctctttagcatcctggaggagctggccatggtgaccagcctgcggccaccagtacaggccaaccccgacctgctgagcctgctcacggtgtctctggatcagtatcagacggaggatgagctgtaccagctgtccctgcagcgggagccgcgctccaagtcytcgccaaccagccccacgagttgcaccccaccaccccggcccccggtaytggaggagtggacctcggctgccaaacccaagctggatcaggccctcgtggtggagcacatcgagaagatggtggagtctgtgttccggaactttgacgtcgatggggatggccacatctcacaggaagaattccagatcatccgtgggaacttcccttacctcagcgcctttggggacctcgaccagaaccaggatggctgcatcagcagggaggagatggtttcctatttcctgcgctccagctctgtgttgggggggcgcatgggcttcgtacacaacttccaggagagcaactccttgcgccccgtcgcctgccgccactgcaaagccctgatcctgggcatctacaagcagggcctcaaatgccgagcctgtggagtgaactgccacaagcagtgcaaggatcgcctgtcagttgagtgtcggcgcagggcccagagtgtgagcctggaggggtctgcaccctcaccctcacccatgcacagccaccatcaccgcgccttcagcttctctctgccccgccctggcaggcgaggctccaggcctccagagatccgtgaggaggaggtacagacggtggaggatggggtgtttgacatccacttgtaatagatgctgtggttggatcaaggactcattcctgccttggagaaaatacttcaaccagagcagggagcctgggggtgtcggggcaggaggctggggatgggggtgggatatgagggtggcatgcagctgagggcagggccagggctggtgtccctaaggttgtacagactcttgtgaatatttgtattttccagatggaataaaaaggcccgtgtaattaaccttcaaaaaaaaaaaaaaaaaaaa

SEQ ID NO: 879 - DNA, 600 bp, Homo sapiens
gagaaaatcctagagaaggcaatgaagaagaaggggggaagtaattgtctcgaaatgaaaaaagaaacagaaatcaaaattcagacgctgacatcagatcacaaatctaaggtcaaagagattgtagcacagcacacaaaggaatggtcagaaatgatcaatacccacagtgctgaggagcaagaaatccgagacctgcacctcagccagcagtgtgagctgctgaaaaagctactcatcaatgcccacgagcagcaaacccagcagctgaaactgtcccatgacagggaaagcaaggaaatgcgagcacaccaggctaagatttctatggaaaatagcaaagccatcagccaagataaatctatcaagaataaagcagaacgggaaaggcgagtcagggagttaaacagcagcaacactaaaaagtttctggaagaaagaaagagacttgccatgaagcagtccaaagaaatggatcagttgaaaaaagtccagcttgaacatctagaattcctagagaaacagaatgagcaggcgaaggagatgcagcagatggtgaaattggaagccgagatggaccgcagaccagcaacagtagta

SEQ ID NO: 880 - DNA, 600 bp, Homo sapiens; identical to SEQ ID NO: 879

SEQ ID NO: 881 - DNA, 1400 bp, Homo sapiens
tagctcctgccaaatcgagaccctctgacgacttgccgactaactggccaccacaagctgcagtctgtagcactgaacaaacaaaaaacaaaacgctcaagccttacgaccagagaaggatttcagcaaaccaccacctcccactcagtgtcccctccaaacttcacacttccctgcctgcagaggatgactctgttcacacccaatccagcgcggttctaccccacgaaactgtgactttccaaatgagcctttccctagggctagacctaagaccaggaagtttgagaragcagccgcagctcaactcttccagctccgccagggttgggaagtccttaggtgcagtgcggctcccactgggtcttgcggaccctcctattagagtacgaaattcctggcaactggtayagaaccaacctagaggctttgcagttggcaagctaactcgcggccttatttctgcctttaatctcccacaaggcatctgttgctttgggtcctccacgactcttaggcccgcctcaacaacccaggcacctcctaggtaggctcaaaggtagacccgtttccaccgcagcaggtgaacatgaccgtgttttcaactgtgtccacagttcagatccctttccagattgcaacctggcctgcatcccagctccttcctgctcgtgtcttaacctaagtgctttcttgtttgaaacgcctacaaacctccatgtggtagctcctttggcaaatgtcctgctgtggcgttttatgtgttgcttggagtctgtggggtcgtactccctcccctcccgtccccagggcagatttgattgaatgtttgctgaagttttgtctcttggtccacagtatttggaaaggtcactgaaaatgggtctttcagtcttggcatttcatttaggatctccatgagaaatgggcttcttgagccctgaaaatgtatattgtgtgtctcatctgtgaactgctttctgctatatagaactagctcaaaagactgtacatatttacaagaaactttatattcgtaaaaaaaaaaagaggaaattgaattggtttctacttttttattgtaaaaggtgcatttttcaacacttacttttggtttcaatggtggtagttgtggacagccatcttcactggagggtggggagctccgtgtgaccaccaagatgccagcaggatataccgtaacacgaaattgctgtcaaaagcttattagcatcaatcaagattctaggtctccaaaagtacaggctttttcttcattaccttttttattcagaacgaggaagagaacacaaggaatgattcaagatccaccttgagaggaatgaactttgttgttgaacaattagtgaaataaagcaatgatctaaactaaaaaaaaa

SEQ ID NO: 882 - DNA, 600 bp, Homo sapiens
ggaatagtaatgtgggaagttgtgtcttatggagagagaccctactgggagatgaccaatcaagatgtgattaaagcggtagaggaaggctatcgtctgccaagccccatggattgtcctgctgctctctatcagttaatgctggattgctggcagaaagagcgaaatagcaggcccaagtttgatgaaatagtcaacatgttggacaagctgatacgtaacccaagtagtctgaagacgctggttaatgcatcctgcagagtatctaatttattggcagaacatagcccactaggatctggggcctacagatcagtaggtgaatggctagaggcaatcaagatgggccggtatacagagattttcatggaaaatggatacagttcaatggacgctgtggctcaggtgaccttggaggatttgagacggcttggagtgactcttgtcggtcaccagaagaagatcatgaacagccttcaagaaatgaaggtgcagctggtaaacggaatggtgccattgtaacttcatgtaaatgtcgcttcttcaagtgaatgattctgcactttgtaaacagcactgagatttattttaacaaaaaaa

SEQ ID NO: 883 - DNA, 1400 bp, Homo sapiens
gatcccccttctcctaagagcagtgaagaggaagagcaagatgatgaagaagttcttcagggggaacaaggagattttaatgatgatgatactgaaccagaaaatctgggtcataggcctctcctcatggattctgaagatgaggaagaagaggagaaacatagctctgattctgattatgagcaggctaaagcaaagtacagtgacatgagctctgtctacagagacagatctggcagtggaccaacccaagatcttaatacaatactcctcacctcagcccaattatcctctgatgttgcagtggagactcccaaacaggagtttgatgtatttggcgctgtccccttctttgcagtgcgtgctcaacagccccagcaagaaaagaatgaaaagaacctccctcaacacaggtttcctgctgcaggactggagcaggaggaatttgatgtattcacaaaggcgccttttagcaagaaggtgaatgtacaagaatgccatgcagtggggcctgaggcacatactatccctggttatcccaaaagtgtagatgtatttggctccactccatttcagcccttcctcacatcaacaagtaaaagtgaaagcaatgaggacctttttgggcttgtgccctttgatgaaataacggggagccagcagcaaaaagtcaaacagcgcagcttacagaaactgtcctctcgccaaaggcgcacaaagcaggatatgtccaaaagtaatgggaagcggcatcatggcacgccaactagcacaaagaagactttgaagcctacctatcgcactccagagagggctcgcaggcacaaaaaagtgggccgccgagactctcaaagtagcaatgaatttttaaccatctcagactccaaggagaacattagtgttgcactgactgatgggaaagatagggggaatgtcttacaacctgaggagagcctgttggaccccttcggtgccaagcccttccattctccagacctgtcatggcaccctccacatcagggcctgagcgacatccgtgctgatcacaatactgtcctgccagggcggccaagacaaaattcactacatgggtcattccatagtgcagatgtattgaaaatggatgattttggtgccgtgccctttacagaacttgtggtgcaaagcatcactccacatcagtcccaacagtcccaaccagtcgaattagacccatttggtgctgctccatttccttctaaacagtagatacttctgatggattctcggcattaactcctgtttcaaaaaagtgtgaacagttttatgaatttgaaagaaaatttggtagctctttatagcattcattcttaaagatcagtcagaataggtgatttctaaataaaccaaatagaagaatg

SEQ ID NO: 884 - DNA, 600 bp, Homo sapiens
tggccagtcccggactgtccggcagttccagttcacagactggccggaacagggtgtgccaaagtcgggggagggcttcatcgacttcattggccaagtgcataagactaaggagcagtttggccaggacggccccatctctgtccactgcagtgccggcgtgggcaggacgggcgtcttcatcacgcttagcatcgtgctggagcggatgcggtatgaaggcgtggtggacatctttcagacggtgaagatgctacgaacccagcggccggccatggtgcagacagaggatgagtaccagttctgttaccaggcggcactggagtacctcggaagctttgaccactatgcaacctaaagccatggtcccccccaggcccgacaccactggccccggatgcctctgcccctcccgggcggacctcctgaggcctggacccccagtgggcagggcaggaggtggcagcggcagcagctgtgtttctgcaccatttccgaggacgacgcagcccctcgagcccccccaccggccccggccgccccagcgacctccctggcacggccgccgccttcaaatacttggcacattcccccgaattc

SEQ ID NO: 885 - DNA, 600 bp, Homo sapiens
gatcacctacatgctgctgagcggcctctcccccttcctgggagatgatgacacagagaccctaaacaacgttctatctggcaactggtactttgatgaagagacctttgaggccgtatcagacgaggccaaagactttgtctccaacctcatcgtcaaggaccagagggcccggatgaacgctgcccagtgtctcgcccatccctggctcaacaacctggcggagaaagccaaacgctgtaaccgacgccttaagtcccagatcttgcttaagaaatacctcatgaagaggcgctggaagaaaaacttcattgctgtcagcgctgccaaccgcttcaagaagatcagcagctcgggggcactgatggctctgggggtctgagccctgggcgcagctgaagcctggacgcagccacacagtggccggggctgaagccacacagcccagaaggccagaaaaggcagccagatccccagggcagcctcgttaggacaaggctgtgccaggctgggaggctcggggctccccacgcccccatgcagtgaccgcttccccgatgtgagccgcctcggagtgtggcctggatccatcctgctagc

SEQ ID NO: 886 - DNA, 1400 bp, Homo sapiens
gcgaggagaccatcctgcagttcagctcagggaccttgacacttacccggcggccaaaactgcagcccgagcccctgagctacccagtgctagagtgggaggacatcacctttgaggacctcatcggggaggggaacttcggccaggtcatccgggccatgatcaagaaggacgggctgaagatgaacgcagccatcaaaatgctgaaagagtatgcctctgaaaatgaccatcgtgactttgcgggagaactggaagttctgtgcaaattggggcatcaccccaacatcatcaacctcctgggggcctgtaagaaccgaggttacttgtatatcgctattgaatatgccccctacgggaacctgctagattttctgcggaaaagccgggtcctagagactgacccagcttttgctcgagagcatgggacagcctctacccttagctcccggcagctgctgcgtttcgccagtgatgcggccaatggcatgcagtacctgagtgagaagcagttcatccacagggacctggctgcccggaatgtgctggtcggagagaacctagcctccaagattgcagacttcggcctttctcggggagaggaggtttatgtgaagaagacgatggggcgtctccctgtgcgctggatggccattgagtccctgaactacagtgtctataccaccaagagtgatgtctggtcctttggagtccttctttgggagatagtgagccttggaggtacaccctactgtggcatgacctgtgccgagctctatgaaaagctgccccagggctgaccgcatggagcagcctcgaaactgtgacgatgaagtgtacgagctgatgcgtcagtgctggcgggaccgtccctatgagcgacccccctttgcccagattgcgctacagctaggccgcatgctggaagccaggaaggcctatgtgaacatgtcgctgtttgagaacttcacttacgcgggcattgatgccacagctgaggaggcctgagctgccatccagccagaacgtggctctgctggccggagcaaactctgctgtctaacctgtgaccagtctgacccttacagcctctgacttaagctgcctcaaggaatttttttaacttaagggagaaaaaaagggatctggggatggggtgggcttaggggaactgggttcccatgctttgtaggtgtctcatagctatcctgggcatccttctttctagttcagctgccccacaggtgtgtttcccatcccactgctcccccaacacaaacccccactccagctccttcgcttaagccagcactcacaccactaacatgccctgttcagctactcccactcccggcctgtcattcagaaaaaaataaatgttctaataagctccaaaaaaa

SEQ ID NO: 887 - DNA, 1400 bp, Homo sapiens
aaaactgcagatgacgaggctgtgttacaagtaccagagttggtggtacctgaactgtatgcagctgtggccggcatcagagtggagagcctcttctacaactatagcatgctttgaagagtctcgggcaagaaacattcatgcatgagtatatgttcttggaatcaattcctctaagaacagagaatggtctttcccagggacacaaagggagaaatgggacatggattcttgatcttcctttacacatttctcgggaaatctgaaatgatgctggatgggactctacacatcctgagctaagacatactgtcagtctcacttctgctgtcccagtcctagaaatcctgggtagaagtggtggacctgtgcaaaggaggttttagaactctgcagtatttgttggggcatggcacaaataagctcatccctcccgtccgaggctagtttcctctggaaccacatttttatctagatgaaaatttggaatgaaatgaaggaatagaaatccaataaaagagttgaagggaaagaaaatttaaggttcttcttgctcaggattacagatatggaccaacacctccttcaagaaaaggtggtaggacacaaagttcttcagtcctgagccctacatgtggggytggaggagaactataacggaaaaacctctgagtttcaccttaggtatagataaaagaaagatggtccccttttatctgattctgagacaggtaaattctgtttgttactacgtttaattagaaggtggaggagtcatttcatgattaagaacattcaacatgtattgttcattaagctagcttcctagttccgattagactaaggagactaagcctagagagtcaatgttagaacagtgaaaagaattctgtgtgtgtgtgtgtgtgtgtgtgtgtgcacaataaataggaaatgtagaaaccaagcaagaaggcttagtagctcagtctttaacaagggctagaaawgaatgtaatctgatatggaaggatagcagcttctaattttcaatcatctgttgatatactgtgaaacttattttattaaattaatatttattaaatggaaatatgcttttctggtttataactactaaaaatatcatagggaggataaaagtaaataagtgaaagttaatgccaatagaaaaattcaagagataatgtacaatgtcagaaaagggattctttatgtgtaaatggggataatacctatttcacaaggttgttytgaggattgatacgttttgagtatgtatttgtacactatctggcacatatgcgctcaataaacgtgtttctccttwwaaaaaaaaaaaaaaaaaaaaaaaaaaaaaaaaaaaaaaaaaaaaaaaaaaaawaaaaaaaaagggcggccgc

SEQ ID NO: 888 - DNA, 1400 bp, Homo sapiens; identical to SEQ ID NO: 887

SEQ ID NO: 889 - DNA, 1400 bp, Homo sapiens
atattcggaacaggtgtatgatgcctgtatggagacatttgactgtcttcctcttgctgccctcttaaaccagcagtttctctgtgtacatggaggaatgtcacctgaaattacttctttagatgacattaggaaattagacaggtttacggaacctcccgcctttggacctgtgtgtgacctgctttggtctgatccctcagaggattatggcaatgagaagaccttggagcactatacccacaacactgtccgagggtgctcttatttctacagttaccctgcagtttgtgaatttttgcagaacaataatttactatcaattatcagagcccatgaagcccaagatgctgggtatcgaatgtacaggaagagccaagccacaggctttccatcacttattacaattttctctgcccccaattacctagatgtctataacaataaagctgctgtgttgaaatatgaaaacaatgtcatgaatatcaggcagtttaactgttctccacacccctactggcttccaaactttatggatgttttcacatggtctttgccttttgttggggaaaaagtcacagagatgctggtaaatgtgctcaacatatgctctgatgacgaactgatttctgatgatgaagcagaaggaagcactacagttcgtaaggagatcatcaggaataagatcagagccattgggaagatggcacgggtcttttcaattcttcggcaagaaagtgagagtgtgctgactctcaagggcctgactcccacaggcacactccctctgggcgtcctctcaggaggcaagcagactatcgagacagccacagtagaagcggtagaggcccgggaagccatcagagggttctcgcttcagcacaagatccggagttttgaagaagcgcgaggtctggaccgaattaatgagcgaatgccaccccgaaaggatagcatacacgctggtgggccaatgaaatctgtaacctcagcacactcacatgctgcgcacaggagcgaccaagggaagaaagcccattcatgacttagagtcctgccgtggctcaggtggatctaaaactcaagaacaaattctatttatttattattggaaaatgaaaagcaactcaaaacaacttcaacstggaggtgcatttataattcagtctgcatttattctgtaaaaaggtgrctgttttataaattcttttaatttatgttcaatatatataaaaagtgcatctgttttgtttttcccttttttctccataattttaagaaatgaatctgattgttgtcaacacatttgtgaagtcttgtgctataaaggggaacttcccctaataaaagggccttggaaacctcaaammwrrrwwwmwramaaaaaaaaaaaaaaaaaa

SEQ ID NO: 890 - DNA, 1400 bp, Homo sapiens; identical to SEQ ID NO: 889

SEQ ID NO: 891 - DNA, 1400 bp, Homo sapiens
tgacatgcctgctgtcaggaactcttgaggccctcggagagcagttagggaccgcaggctgccgcggggcaggggtgcagtgggtgttaccaggcaaagcactgcgcgcttcttccccaggaggtgggcaggcagctgagagcttggaagcagaggctttgagaccctagcaggacaattgggagtcccaggattcaaggtggaagatgcgtttctggtcccttgggagaggactgtgaaccgagaggtggttactgtagtgtttgttgccttgctgcctttgcactcagtccattttctcagcactcaatgctcctgtgcggattggcactccgtctgtatgaatgcctgtggttaaaaccaggagcggggctgtccttgccacgtgccaagactagctcagaaaagccggcaggccagaaggacccaccctgaggtgccaaggagcaggtgactctcccaaccggacccagaaccttcacggccagaaagtagagtctgcgctgtgaccttctgttgggcgcgtgtctgttggtcagaagtgaagcagcgtgcgtggggccgagtcccaccagaaggcaggtggcctccgtgagctggtgctgccccaggctccatgctgctgtgccctgaggttcccaggatgccttctcgcctctcactccgcagcacttgggcggtagccagtggccatgtgctcccaaccccaatgcgcagggcagtctgtgttcgtgggcacttcggctggaccccatcacgatggacgatgttccctttggactctagggcttcgaaggtgtgcaccttggttctcccttctcctccccagagttcccccggatgccataactggctggcgtcccagaacacagttgtcaacccccccaccagctggctggccgtctgtctgagcccatggatgctttctcaatcctaggctggttactgtgtaagcgtgttggagtacggcgccttgagcgggtgggagctgtgtgttgaagtacagagggaggttggggtgggtcagagccgagttaagagattttctttgttgctggaccccttcttgaaggtagacgtcccccacccggagagacgtcgcgctgtggcctgaagtggcgcaagcttgctttgtaaatatctgtggtcccgatgtagtgcccagaacgtttgtgcgaggcagctctgcgcccgggttccagcccgagcctcgccgggtcgcgtcttcggagtgcttgtgacagtccttgcccagtatctagtccccgtcgccccgtgcaggagacgtaggtaggacgtcgtgtcagctgtgcactgacggccagtctccgagctgtgcgtttgtatcgccactgtatttgtgtactttaacaatcgtgtaaataataaattcggaattc

SEQ ID NO: 892 - DNA, 600 bp, Homo sapiens
ttgctggtttcattggcccgccaatacctcagaaccagcgattcattcccatcaatggatacccaatacctcctggatatgcagcgtttccagctgcccactaccagccaacaggtcctcccagagtgattcagcactgcccacctcccaagagtcggtccccaagcagtgccagtgggtcgactagcactggccatgtgactagcttgccctcatcaggatccaatcaggaagcaaatattcctttactaccacacatgtcaattccaaatcatcctggtggaatgggtatcaccgtttttggcaacaaatctcaaaaaccctacaaaattgactcaaagcaagcatctttactaggagacgccaatattcatggacacaccgaatctatgatttctgcagaactgtaaaatgcacaacttttgtaaatgtggtatacaggacaaactagacggccgtagaaaagatttatattcaaatgtttttattaaagtaaggttctcatttagcagacatcgcaacaagtaccttctgtgaagtttcactgtgtcttaccaagcaggacagacactcggccagaaaaaagaaaaaaaaaaaaaa

SEQ ID NO: 893 - DNA, 600 bp, Homo sapiens
gccccgctcctctgatggtgcagctgagcctcttgagggcagagactgatcggctgcgcgaaatcctggcggggaaggaacgggagtaccaggccctggtgcagcgggctctacagcggctgaatgaggaagcccggacctatgtcctggccccagagcctccaactgctctttcaacggaccagggcctggtgcagtggctacaggaactgaatgtggattcaggcaccatccaaatgctgttgaaccatagcttcaccctccacactctgctcacctatgccactcgagatgacctcatctacacccgcatcaggggagggatggtatgccgcatctggagggccatcttggcacagcgagcaggatccacaccagtcacctctggaccctgagagctgaatgagggcatcataggccagacaggcccaaggatggatgaatggagaggacaaaggcagcttctgacacaccagccccaggacctggggcgactggaggaagccaggcgagtggggcccaggactggttccagtgagagaaaccaaccacaggcacccaagcactaccagacaaagcgtattaaacagaacacttttg

SEQ ID NO: 894 - DNA, 600 bp, Homo sapiens
gcctggggaagcagccctatgacttgtatgacaactcccaggtggttctgaaggtctcccagggccacaggctttaccggccccacctggcatcggacaccatctaccagatcatgtacagctgctggcacgagcttccagaaaagcgtcccacatttcagcaactcctgtcttccattgaaccacttcgggaaaaagacaagcattgaagaagaaattaggagtgctgataagaatgaatatagatgctggccagcattttcattcattttaaggaaagtagcaaggcataatgtaatttagctagtttttaatagtgttctctgtattgtctattatttagaaatgaacaaggcaggaaacaaaagattcccttgaaatttagrtcaaattagtaattttgtttatgctgcycctgatataacactttccagcctatagcagaagcacattttcagactgcaatatagagactgtgttcatgtgtaaagactgagcagaactgaaaaattacttattggatattcattcttttctttatattgtcattgtcacaacaattaaatatactaccaagtacwkwwwtktkktttttttttt

SEQ ID NO: 895 - DNA, 600 bp, Homo sapiens
tgtctggctcacctggaggaagaggtccacgacaaggtggttgcccgggacctggttggagccatgttgagcccactgccgcagccacgcccctctgccccccaggtgctggcccaccccttcttttggagcagagccaagcaactccagttcttccaggacgtcagtgactggctggagaaggagtccgagcaggagcccctggtgagggcactggaggcgggaggctgcgcagtggtccgggacaactggcacgagcacatctccatgccgctgcagacagatctgagaaagttccggtcctataaggggacatcagtgcgagacctgctccgtgctgtgaggaacaagaagcaccactacagggagctcccagttgaggtgcgacaggcactcggccaagtccctgatggcttcgtccagtacttcacaaaccgcttcccacggctgctcctccacacgcaccgagccatgaggagctgcgcctctgagagcctcttcctgccctactacccgccagactcagaggccaggaggccatgccctggggccacagggaggtgaggtgggctggatgccacacagatggtctccgtgctg

SEQ ID NO: 896 - DNA, 600 bp, Homo sapiens
cgagcacttgctgaaggcaggtgccaacatcacgccgcgcgaaggtgatgagctcgcccggctgccctacctacggacctggttccgcacccgcagcgccatcatcctgcacctcagcaacggcagcgtgcagatcaacttcttccaggatyacaccaagctcatcttgtgcccactgatggcagccgtgacctacatcgacgagaagcgggacttccgcacataccgcctgagtctcctggaggagtacggctgctgcaaggagctggccagccggctccgctacgcccgcactatggtggacaagctgytgagctcacgctcggccagcaaccgtytyaaggcctcctaatagytgscctcccytccggaytggtgccytcytcaytcccamytgcatytggggcccawaytggttggstyccgcggtgccatrtctgcagtgtgccccccagccccggtggctgggcagagctgcatcatccttgcaggtgggggttgctgtataagtkatttktgtacatgttcgggtgtgggttctacagmcttgtccccctccccctcaaccccaccatatgaattgtacagaatatttctatt

SEQ ID NO: 897 - DNA, 1400 bp, Homo sapiens
gggacagtgaccaccacgggcgtcctccggaaggcagagcgcccctcatcttcgccatgcccggatatcggggaggtgtacgcggatgkggtgctgctggtctggaagcccgtggaatcctacggccctgtgacctacattgtgcagtgcagcctagaaggcggcagctggaccacactggcctccgacatctttgactgctgctacctgaccagcaagctctcccggggtggcacctacaccttccgcacggcatgtgtcagcaaggcaggaatgggtccctacagcagcccctcggagcaagtcctcctgggagsgcccagccacctggcctctgaggaggagagccaggggcggtcagcccaacccctgcccagcacaaagaccttcgcattccagacacagatccagaggggccgcttcagcgtggtgcggcaatgctgggagaaggccagcgggcgggcgctggccgccaagatcatcccctaccaccccaaggacaagacagcagtgctgcgcgaatacgaggccctcaagggcctgcgccacccgcacctggcccagctgcacgcagcctacctcagcccccggcacctggtgctcatcttggagctgtgctctgggcccgagctgctcccctgcctggccgagagggcctcctactcagaatccgaggtgaaggactacctgtggcagatgttgagtgccacccagtacctgcacaaccagcacatcctgcacctggacctgaggtccgagaacatgatcatcaccgaatacaacctgctcaaggtcgtggacctgggcaatgcacagagcctcagccaggagaaggtgctgccctcagacaagttcaaggactacctagagaccatggctccagagctcctggagggccagggggctgttccacagacagacatctgggccatcggtgtgacagccttcatcatgctgagcgccgagtacccggtgagcagcgagggtgcacgcgacctgcagagaggactgcgcaaggggctggtccggctgagycgctgctacgcggggctgtccgggggcgccgtggccttcctgcgcagcactctgtgcgcccagccctggggccggccctgcgcgtccagctgcctgcagtgcccgtggctaacagaggagggcccggcctgttcgcggcccgcgcccgtgaccttcccwwcmgcgcggctgcgcgtcttcgtgcgcaatcgcgagaagagacgcgcgctgctgtacaagaggcacaacctggcccaggtgcgctgagggtcgccccggccacacccttggtctccccgctgggggtcgctgcagacgcgccaataaaaacgcacagccgggcgagaaaaaaaaaaaaaaaaaaaaaaaaaaaaaaaaaaaaaaaa

SEQ ID NO: 898 - DNA, 928 bp, Homo sapiens
acttacagctttttacctcagtccatttcattaacttcaaattgaaatatcgaactgcttacttgaaattgtcattatatatggccagttgtaaaaggttgtcctttcctctactacctgcctaaaacctgtttctcacctcatttttccatttcaatagatagcaacatcacctacccagttgttcaagctctagacctcaaagtcattcttaacatgtctcttggcctcatctcatatactgaacctattagcaaatcttgtctactcctcaactccaaaatagatcatgaagttacccactgtcttcatttttactactttgaccccacttgaagcaaacaatatatgttgcctaaacaatttgaatgaaacctgaaccctttattggggccttgtggcttgtccaggcaggccatttgtctgaatgtcaaaccactcctgcctcagacaagagcctttgttgttttctctttctggaaagttatttattcagatctttgcagggctgactttagttattaagttgaagttctaatggcatctctttagagaagccctttctaactccttgatctgtaataacatatctgccctcttcctccaatgctctctacttattactgtattgtttatagcacttatcactagctgaagttaccttttttgtttaattcaacaactatttattgaacagctagtagatgctgggaataccaaagttaacagaagagacagaaatccttgctctcctagagcttgttgagttcttatcatcatcttctccccttcaggatgcaagttccatgagagcaggaacctttgtccattggggttacccccatgcctctggaccttgaacaccacctagctaaagtgttcaataaatcagtgttgaattaatgatgaataaatacttctgctcttc

SEQ ID NO: 899 - DNA, 1400 bp, Homo sapiens
agacgaatcgacaccctcaactcagatggatacacccctgagccagcacgcataacgtccccagacaaaccgcggccgatgcccatggacacgagcgtgtatgagagcccctacagcgacccagaggagctcaaggacaagaagctcttcctgaagcgcgataacctcctcatagctgacattgaacttggctgcggcaactttggctcagtgcgmcagggcgtgtaccgcatgcgcaagaagcagatcgacgtggccatcaaggtgctgaagcagggcacggagaaggcagacacggaagagatgatgcgcgaggcgcagatcatgcaccagctggacaacccctacatcgtgcggctcattggcgtctgccaggccgargccctcatgctggtcatggagatggctgggggcgggccgctgcacaagttcctggtcggcaagarggargagatccctgtgagcaatgtggccgagctgctgcaccaggtgtccatggggatgaagtacctggaggagaagaactttgtgcaccgtgacctggcggcccgcaacgtcctgctggttaaccggcactacgccaagatcagcgactttggcctctccaaagcactgggtgccgacgacagctactacactgcccgctcagcagggaagtggccgctcaagtggtacgcacccgaatgcatcaacttccgcaagttctccagccgcagcgatgtctggagctatggggtcaccatgtgggaggccttgtcctacggccagaagccctacaagaagatgaaagggccggaggtcatggccttcatcgagcagggcaagcggatggagtgcccaccagagtgtccacccgaactgtacgcactcatgagtgactgctggatctacaagtgggaggatcgccccgacttcctgaccgtggagcagcgcatgmgagcctgttactacagcctggccagcaaggtggaagggcccccaggcagcacacagaaggctgaggctgcctgtgcctgagctcccgctgcccaggggagccctccacgccggctcttccccaccctcagccccaccccaggtcctgcagtctggctgagccytgcttggttgtctccacacacagctgggctgtggtagggggtgtctcaggccacaccggccttgcattgcctgcctggccccctgtcctctctggctggggagcagggaggtccgggagggtgcggctgtgcagcctgtcctgggctggtggctcccggagggccctgagctgagggcattgcttacacggatgccttcccctgggccctgacattggagcctgggcatcctcaggtggtcaggcgtagatcaccagaataaacccagcttccctcttgaaaaaaaaaaaaaaaaaaacc

SEQ ID NO: 900 - DNA, 1400 bp, Homo sapiens
ccctttggatcaagccaatacaagattcttgtgawattacgrctgatagtggcatgattgaaccagtggtcaatgctgtgtccatccatcaggtgaagaaacagtcacagctctccttgctcgattacttcctacaggagcacggcagttacaccactgaggcattcctcagtgcacagcgcaattttgtgcaaagttgtgctgggtactgcttggtctgctacctgctgcaagtcaaggacagacacaatgggaatatccttttggacgcagaaggccacatcatccacatcgactttggcttcatcctctccagctcaccccgaaatctgggctttgagacgtcagcctttaagctgaccacagagtttgtggatgtgatgggcggcctggatggcgacatgttcaactactataagatgctgatgctgcaagggctgattgccgctcggaaacacatggacaaggtggtgcagatcgtggagatcatgcagcaaggttctcagcttccttgcttccatggctccagcaccattcgaaacctcaaagagaggttccacatgagcatgactgaggagcagctgcagctgctggtggagcagatggtggatggcagtatgcggtctatcaccaccaaactctatgacggcttccagtacctcaccaacggcatcatgtgacacgctcctcagcccaggagtggtggggggtccagggcaccctccctagagggcccttgtctgagaaaccccaaaccaggaaaccccacctacccaaccatccacccaagggaaatggaaggcaagaaacacgaaggatcatgtggtaactgcgagagcttgctgaggggtgggagagccagctgtggggtccagacttgttggggcttccctgcccctcctggtctgtgtcagtattaccaccagactgactccaggactcactgccctccagaaaacagaggtgacaaatgtgagggacactggggcctttcttctccttgtaggggtctctcagaggttctttccacaggccatcctcttattccgttctggggcccaggaagtggggaagagtaggttctcggtacttaggacttgatcctgtggttgccactggccatgctgctgcccagctctacccctcccagggacctacccctcccagggaccgacccctggcccaagctccccttgctggcgggcgctgcgtgggccctgcacttgctgaggttccccatcatgggcaaggcaagggaattcccacagccctccagtgtactgagggtactggcctagccatgtggaattccctaccctgactccttccccaaacccagggaaaagagctctcaattttttatttttaatttttgtttgaaataaagtccttagttagcc

SEQ ID NO: 901 - DNA, 1400 bp, Homo sapiens; identical to SEQ ID NO: 900

SEQ ID NO: 902 - DNA, 1400 bp, Homo sapiens
atattctagcgctcccaaaaaagcactatggccttatatgcagggaaggcacataccaccaagttcaatgagaaatattagagctaaccgtactctcttctctgcgtacgttcgagtatacgttgcccatatccctcccatattttctttttgctgcttttgctctggaactttgcttttagcagggaaagcagctgtcccctgagtgctttgaattgggaatatacccagtgtgtgttctcccccctcttacgaggctacataacacatctatgatgctgctttaagtttttagaggctatacctcaaagtagctgcggattttgtctcctgcactgccaatatgcaactgatcccgcttttattaattttttgaagaagtacacagaatttttacagaatgtagtattttgatatcattaagtaaaccaatcagaaaactccttgagcaatagttgtttctttgtcagtttcagttacaatcatctttacccattaagacttacattaacattccttttatataaagagttgtatatgtccacctaaattcctatgtccacacttaacctttaaagatgtacattgagggaatatcaaaaaatagcgttcatggctacgaatatgtagaatgttaaaagcacagcaaactgcactgcacttataaagcaaatctattagaaaaaaagcatttttctaaatgctcaaatgttatcaaaatactatatttatagaagtaatcttctctgttaacagccaagatttgctgttagaaataactcttgtgagttttatattgtgctttttggaggttctaatcatttcagcagtagcgtcttaaacagcagtattactataagcagttgcttcaaaatgtgaattaacttgttgaaactgtggctttaacatccatgtgactagtgtatatggtatttgctctccattagcaaaataattcattgttaggtaaacttcaytagtgcaaattgcagatctgtgagcaatgtttcctattgaatataaactactgtctaaaatatacatatcagcagcccagcctttatcaggaaaattatacttggcaagttgctgaaaatgcacaaagttatgaaagttaaaggtatgctgcaaataactagccattattctatgtattattaaatatttactagttctgttaaaagcagagcagaagttagacactaaggatctctttgtgaactctgtgttctctatattagattgctgtttatatgtaagaattttattgcttatgtggcatacaatatttataactataaactttatagaagtacagtattaaagtcagtggtacacagacattctgtacatatcctgtgaaacgtgctgtcatatgaaataaatatatctgtctttac

SEQ ID NO: 903 - DNA, 600 bp, Homo sapiens
cctggatgggctacggcagctgaagtggacgcctcacttagyggataaccccagaaagttggctgcctcagagcattcagaattctgtcctcactgataggggttctgtgtctgcagaaattttgtttcctgtacttcatagctggagaatggggaaagaaatctgcagcaaaggggtctcactctgttgccaggctggtctcaaacttctggactcaagtgatcctcccgcctcggccttccaaagtgctgggatatcaggcactgagccactgcgcccagycaacaatccgctctgaggaaagcgtaagcaggaagacctcttaatggcatagcaccaataaaaaaatgactcctagttgtgtttggaaagggagagaagagatgtctgaggaaggtcatgttctttcagcttatggcatttcctagagttttgttgaagcaagaagaaaaactcagagaatataaaatcaacttttaaaattgtgtgctctcttcttcacgtaggctcctgttaaaaacaaagtgcagtcagattctaagccctgttcagagacttcgyggatcacagctgcagctcaccgccacatcacaggatcc

SEQ ID NO: 904 - DNA, 600 bp, Homo sapiens; identical to SEQ ID NO: 903

SEQ ID NO: 905 - DNA, 600 bp, Homo sapiens
aacagacaggtgcagagcctgctggagctgcgggaggcccaggtggacgcagaggcccagcggaggctggaacacctgagacaggctctgcagcggctcagggaggtcgtccttgatgcaaacacaactcagttcaagaggctgaaagagatgaacgagagggagaagaaggagctgcagaagatcctggacagaaagcgccataacagcatctcggaggccaagatgagggacaagcataagaaggaggcggaactgacggagattaaccgtcggcacatcactgagtcagtcaactccatccgtcggctggaggaggcccagaagcagcggcatgaccgtcttgtggctgggcagcagcaggtcctgcaacagctggcagaagaggagcccaagctgctggcccagctggcccaggagtgtcaggagcagcgggcgaggctcccccaggagatccgccggagcctgctgggcgagatgccggaggggctgggggacgggcctctggtggcctgtgccagcaacggtcacgcacccgggagcagcgggcacctgtcgggcgctgactcggagagccaggaggagaacacgcagctctga

SEQ ID NO: 906 - DNA, 600 bp, Homo sapiens; identical to SEQ ID NO: 905

SEQ ID NO: 907 - DNA, 1400 bp, Homo sapiens
cccaaaagagagaccattgtccagctcattgatgacttcaggatctcaggagtcaatggagtccatgtgtgcatggtgctggaggtgctgggccaccagctcctcaaatggatcatcaagtccaactaccagggcctgcccgtgccctgcgtgaagagcatcgtgaggcaggtgctgcacggcctggactacctccacaccaagtgcaagatcatccacacggacatcaagcccgagaacatcttgctgtgtgtgggggacgcttacatcaggcgcctggctgccgaggccacggagtggcaacaggcaggggcgccgcccccctcccgctccatagtcagcactgccccccaggaggtcttgaccggtaagctgtccaaaaacaagaggaagaagatgaggcgcaaacggaaacagcagaagcggctgctggaggagcggctgcgggacctgcagaggctggaggccatggaggctgccacccaggctgaggactctggcttgagactagacgggggcagcggctccacatcctcttcaggcttctccggctccctcttctctcctgcctcctgctccatcctctccggctcgtccaatcagcgagagaccgggggcctcctgtcgcctagcacaccattcggtgcctcgaacctcctggtgaaccccctggagccccaaaatgcagataagatcaagatcaagatcgcagacctgggcaacgcctgctgggtgcacaagcacttcacggaagacatccagactcggcagtaccgggccgtcgaggtgctgatcggcgccgaatacggccccccggcagacatctggagcacagcctgcatggccttcgagctggccactggtgactacctgttcgagccgcattctggagaagactacagtcgtgatgaggaccacatcgctcacatagtggagcttctgggggacatccccccagccttcgccctctcaggccgctattcccgggagttcttcaaccggagaggagagctgcggcacatccacaatctcaagcactggggcctgtacgaggtactcatggaaaagtacgagtggcccctagagcaggccacacagttcagcgcctttctgctgcccatgatggagtacatccccgaaaagcgggccagtgccgctgactgcctccagcacccctggctcaacccctaggcccggctgtggctccacctccagctctccgtgccttaagggaaaagcgggacagctcccaccaccctgctgggcgccagttctccacaaccacagggcagagagacgctggagccaggcccggctctcagagcgtgttctgcctgagacccccgtgagggctctcggagaaagtgtgtgtattcctttcttaataaagtgtggactga

SEQ ID NO: 908 - DNA, 1400 bp, Homo sapiens
tgcagagccggctggagtgcctgcgggagcagcagaatggcgacagcaagcccgagctcaacatcattgccctgagccaccgcaaaaccatgaagaagcggaacaagaagatcctggacaactggatcaccatccaggagatgctggcccacggcgcgcgctccgccgatggcaagcgggtctacaaccctcttctctcagtcaccaccgtgtgagctgcccgggcgggtacacggcccaggcccagggaaccccctggggccccggccctcactctcctatagagattgtgtgtgtgtgtgtgtgcgcgcgcgcgtgctcgctgtgcgcacgcacacatctcctcgtctgggtgtgcgcacagggctttgttagcagagagaagcccctgaggagaagggacgcttttcttccttctgcccaagtaaagtgaccatgccagtggccagcactgggggcacacctgtgatgggcaccccttcagctgtgcgtgtgcattccccatcccccatgctcttgcgtgtgcttgcacgtgcacgcacacacacacccagtgctctctccacccgacccgtgtacttgcagacagggaagctgagctgaaaggagcacaagagagtgtccggcttcgctgctgagcgcggcctctccccgccgctgcgcactgcagttatttgtagacaaaggcacccctgatttttgtggtttttctccctttctgtgcttgccaatagttgttttgttttgtggacctgccctgggggctggcagctccttcaggcagcctggcagaagtggaactcccctctccactgatggctgggaagggagttggggaggaagagtgggagggagggctggggatggatgggagggaaggggagggaaaggtgggaggaatgggaagcagctgttctggtggcttccactctgaggtgtgggaacggggagcctctggggggcacctgtttccccagtgactcagagagagcaagactgcaggaacggaggggtcctgcagggtgtccaccaagaagtcacagagcccgttctgcgccccacaccatctggagcaggggcttctcttctgagtgaactgaggaaggtgcttagatggtgagggctctagaaaccaagccccatgagcagcagtggaagacctcgggccatgcggcctggggaggacttggtggcgatccgcaacctggaccccagtgagaggcggtgggctgactgggaaggagaggcccccaacctcctcaggatttgcacgtgtgaactacgctgcctgtggggtgccccttaggcttggagagccccagattggaggcagacagactgcaccaccccttccccccctgcatctcaagaataaagcaagctgcctttgtacttggttg

SEQ ID NO: 909 - DNA, 577 bp, Homo sapiens
tcaagttttacaggttgagcttcaagatggtttttttggttttttttttttctctcatccaggctgaaggattttttttttctttacaaaatgagttcctcaaattgaccaatagctgctgctttcatattttggataagggtctgtggtcccggcgtgtgctcacgtgtgtatgcacgtgtgtgtgtccattagacacggctgaygtgtgtgcaaagtatccatgcggagttgatgctttgggaattggctcatgaaggttcttctcaagggtgcgagctcatccccctctctccttccttcttattgactgggagactgtgctctcgacagattcttcttgtgtcagaagtctagcctcaggtttctaccctcccttcacattggtggccaagggaggagcatttcatttggagtgattatgaatcttttcaagaccaaaccaagctaggacattaaaaaaaaaaaaaagaaaaagaaagaaaaaacaaaatggaaaaaggaaaaaaaaaaagaactgagatgacagagttttgagaatatatttgtaccatatttaaaaaaaaaaaaaaaaaaa

SEQ ID NO: 910 - DNA, 1400 bp, Homo sapiens
cgaagaaagtgatgaatttcagagctgatgtgttcacctgggcagatcccccaaatccggaagtcaaagttctcatggtcagaagttctcatggtgcacgagtcctcagcactctgccggcagtgggggtgggggcccatgcccgcgggggagagaaggaggtggccctgctgttctaggctctgtgggcataggcaggcagagtggaaccctgcctccatgccagcatctgggggcaaggaaggctggcatcatccagtgaggaggctggcgcatgttgggaggctgctggctgcacagacccgtgaggggaggagaggggctgctgtgcaggggtgtggagtagggagctggctcccctgagagccatgcagggcgtctgcagcccaggcctctggcagcagctctttgcccatctctttggacagtggccaccctgcacaatggggccgacgaggcctagggccctcctacctgcttacaatttggaaaagtgtggccgggtgcggtggctcacgcctgtaatcccagcactttgggaggccaaggcaggaggatcgctggagcccagtaggtcaagaccagccagggcaacatgatgagaccctgtctctgccaaaaaattttttaaactattagcctggcgtggtagcgcacgcctgtggtcccagctgctggggaggctgaagtaggaggatcatttatgcttgggaggtcgaggctgcagtgagtcatgattgtatgactgcactccagcctgggtgacagagcaagaccctgtttcaaaaagaaaaaccctgggaaaagtgaagtatggctgtaagtctcatggttcagtcctagcaagaagcgagaattctgagatcctccagaaagtcgagcagcacccacctccaacctcgggccagtgtcttcaggctttactggggacctgcgagctggcctaatgtggtggcctgcaagccaggccatccctgggcgccacagacgagctccgagccaggtcaggcttcggaggccacaagctcagcctcaggcccaggcactgattgtggcagaggggccactacccaaggtctagctaggcccaagacctagttacccagacagtgagaagcccctggaaggcagaaaagttgggagcatggcagacagggaagggaaacattttcagggaaaagacatgtatcacatgtcttcagaagcaagtcaggtttcatgtaaccgagtgtcctcttgcgtgtccmaaagtagcccagggctgtagcacaggcttcacagtgattttgtgttcagccgtgagtcacactacatgcccccgtgaagctgggcattggtgacgtccaggttgtccttgagtaataaaaacgtatgttccctaaaaaaaaaaaaaggaattc

SEQ ID NO: 911 - DNA, 1400 bp, Homo sapiens; identical to SEQ ID NO: 910

SEQ ID NO: 912 - DNA, 1400 bp, Homo sapiens
ccaccatgtcgggagacaaacttctgagcgaactcggttataagctgggccgcacaattggagagggcagctactccaaggtgaaggtggccacatccaagaagtacaagggtaccgtggccatcaaggtggtggaccggcggcgagcgcccccggacttcgtcaacaagttcctgccgcgagagctgtccatcctgcggggcgtgcgacacccgcacatcgtgcacgtcttcgagttcatcgaggtgtgcaacgggaaactgtacatcgtgatggaagcggccgccaccgacctgctgcaagccgtgcagcgcaacgggcgcatccccggagttcaggcgcgcgacctctttgcgcagatcgccggcgccgtgcgctacctgcacgatcatcacctggtgcaccgcgacctcaagtgcgaaaacgtgctgctgagcccggacgagcgccgcgtcaagctcaccgacttcggcttcggccgccaggcccatggctacccagacctgagcaccacctactgcggctcagccgcctacgcgtcacccgaggtgctcctgggcatcccctacgaccccaagaagtacgatgtgtggagcatgggcgtcgtgctctacgtcatggtcaccgggtgcatgcccttcgacgactcggacatcgccggcctgccccggcgccagaaacgcggcgtgctctatcccgaaggcctcgagctgtccgagcgctgcaaggccctgatcgccgagctgctgcagttcagcccgtccgccaggccctccgcgggccaggtagcgcgcaactgctggctgcgcgccggggactccggctagaagccgggtggttccagccattcctgcagccaagggcactgggccagggcggcgcacgcgcaagaggcgcgcttcgagggaatatgcgaagctgccgcgtgctgctgcacatgcgctttttcccttccgcttccctccctttcttcccacgggggagtccgcagttgcccttgttcggaatccacgttccccgcgatcccgggagctggaggcgcatgcgcatccgcgattccctgcgaccaggccccgagagggcgagaccagaggggacggaagcattgcgcctgcgcggaactctcagcctctgcgcggagggcgtcccttcccaaccagccgtgggtgccaggttcccggttggaacctgcaataaactcgctgttcctcgcacctggctctaacggtggcccccatttgcggactagtggagaagcgatcgctccatccggggaagtcatgcatttcttgagcacctactgtctgccaggccccagagctcatggcgaagagacttgggcccatccctgccgaaaacgagacaattgaaaagtcaagtaaaataaaagaatgacatgg

SEQ ID NO: 913 - DNA, 1400 bp, Homo sapiens; identical to SEQ ID NO: 912

SEQ ID NO: 914 - DNA, 1400 bp, Homo sapiens
aaatgcagcctagtcttgagaacataattttatataatcaattactaaatgttaaactattaccacacagcccataaaacagcatttgcgtttattgagagagaggatgtgccatcatgattaatgaaaactatcttttgagtttgaaaagaaattaatttgcagtgtttggattgtatatatggtgctaaaaataaattaatttactttataaaccttatctgtacattatacgatgtgatgaaatttgctttttatccaaatattttgtatcttgtaaatatggctaattataggaatgcctataatacatcttagattccttatatctaataagagttcaaagagttatgagttgaagtcttgaatgcaggaaactatctgatagtgttctaaaatttggttacttgggtttggatacccttagtgggatgatgtaaatagaggctagctacctaggcttgtctatagcaaccataatgttgatgtaagtaatgcggttactgaatcataagaaaatgccatctctttttagttgaaggaaaactctggaagtaggtgccattggtcattctgcagtgcactgcaaccattgtttcccctagtgccctcttttccctagggcattgctctcctattcccacgccttaacacagctctatacctagaagcagccagcccaggcatgcagtcacatttaatcacatcccccttctagagtgcttcaaaatgatgtagtccctcaacttggctaaagaatctcaatctcttgaaatttatttttttaatgtcatattcatctggtaaatatctactgtttgccaggcatttaagaatatggcaaagaacataaaagatggtgtcaccagattttggtcaccaatgagtacccgacccgttgccatgattaagagagaatgctttctattggagtttcaggaaatataatttgagaatactttaaagggaagtggaagtataagtgaatgatatttttcttttacatgtaaacaatgaagttatttcaaagttaagttttaaacaaaatccatgaagtagtgtctgccatacatgttaatattctacattcttgcttcccttaaattaatatgtttgtgtgtatatatgtgcctcacacctgaattgaaaattaaagactggtttaaaagtggtttaaaagtgacatttaatgtttctccattacgtttggggtaaccagcctaagtggaatcttggaaggaaagtaagggaaaaacttgtatttgccttcaatgaattaaaccagtgatatgtttaacgtatgaatgaaaggattgatggtgattttataattatatatattgccgcagtaaccagttaataaattgatagctaccatttaaaaaaaaaaaaaaaaaaaa

SEQ ID NO: 915 - DNA, 600 bp, Homo sapiens
ctagatgcagtttcttcctttcgcatccgccaccgaccccatgaccagctgaggctacgcataggggtccatactgggccagtctgtgctggggttgttggcctgaagatgccccgttattgtctttttggagacacagtgaacactgcttctcgaatggagtctaatggtcaagcgctgaagatccatgtctcctctaccaccaaggatgccctagatgagctaggatgcttccagctagagcttcggggggatgtggaaatgaagggaaaaggaaagatgcgaacatactggctcttaggagagcggaaaggacctcctggactcctgtaaacccccattctttccaagtcagatagtcttctgctgctggtacctgggtgggcaatggccaccatgtctgcacacaccagaaatggacattttcatatgcaatggaaaacagccacaaaaaaacctaccttatatggaagttgtagccctctgcagctcagccctgtacatatacctgtccctctctggcttggtccccttcctccctactttctgtaaatatctgtatctaaaccagaatattttggtcaaatataaaacaataat

SEQ ID NO: 916 - DNA, 600 bp, Homo sapiens; identical to SEQ ID NO: 915

SEQ ID NO: 917 - DNA, 600 bp, Homo sapiens
tagccagctgtgcactttcttctctttcccaaccccaggaaaggttttccttattttgtgtgctttcccagtcccattcctcagcttcttcacaggcactcctggagatatgaaggattactctccatatcccttcctctcaggctcttgactacttggaactaggctcttatgtgtgcctttgtttcccatcagactgtcaagaagaggaaagggaggaaacctagcagaggaaagtgtaattttggtttatgactcttaaccccctagaaagacagaagcttaaaatctgtgaagaaagaggttaggagtagatattgattactatcataattcagcacttaactatgagccaggcatcatactaaacttcacctacattatctcacttagtcctttatcatccttaaaacaattctgtgacatacatattatctcattttacacaaagggaagtcgggcatggtggctcatgcctgtaatctcagcactttgggaggctgaggcagaaggmttacctgaggcaaggagtttgagaccagcttagccaacatagtaagacccccatctctttaaaaaaaaaaaaaaaaaaaaaaaaaa

SEQ ID NO: 918 - DNA, 1400 bp, Homo sapiens
ccgccgttctcgcctgcctgctgcccgaccgcgcgctgcggacgcgcctggtccgcggggagctggcgcgggccgtggtgctggacgagggcagtgcctcggtggcggagctccggcccgacagcccggctcatgtgctgctggccgcgctgctgcacgagacccgcgcggggcccactgccgtgtacttcctgcgaggaggcttcgacggcttccagggctgctgtcccgatctgtgctctgaggcccccgcccctgcgctgccgccaacaggggacaaaaccagccgctccgactccagggctcctgtctacgaccagggtggccctgtggagatcttgccctacctgttcctgggcagctgcagtcactcgtcagacctgcaggggctgcaggcctgtggcatcacagccgtcctcaacgtgtccgccagctgccccaaccactttgagggccttttccgctacaagagtatccctgtggaggacaaccagatggtggagatcagtgcctggttccaggaggccataggcttcattgactgggtgaagaacagcggaggccgggtgctggtgcactgccaggcgggtatctcgcgctctgccaccatctgtctggcatacctcatgcagagtcgccgtgtgcggctggacgaggcctttgacttcgttaagcagcgccggggggtcatctcccccaacttcagtttcatggggcagctgctgcagtttgagacccaggtgctgtgtcactgaggtggtgcccctctgcctgcctgccccactgtgctggcaggagctgactgtggactggtgggctcccctctgggccagcacagtcccctcacctctggcagggctgctacctcctcagagtttcagaagcccccacatgggggctctaggaatgccggcatgctggtctttccgacctggtgctcttctgctgggggactgaggctggccctcattcggggtcgggaaccaagggtgtgtctgctctttccctccccatcctctggcagaaatcagctagacgctataccgtggactctccctggtccaccaccatgttgaagcccttggcagcctgagagctccaaggaacaagctgtgacaaccaggagccctgtctgtgggttcgtctgcccagggcctggagcccaagccctgtgttcctggggaagctggggacttgggaagtgatgggtgtgtcatgttgcgtgtgtctgtctgtgagcctttcacacctgtgctggcgctggaaaattatttgtgctcagctgacatttaacactccctcccccgcttcctcctagccctgtgggcaggggttggaaacttagcactttatatttatacagaacattcaggatatgtcaataaaatattgttatattt

SEQ ID NO: 919 - DNA, 1400 bp, Homo sapiens
atttaaatttgagcacctctgaggctctgcggattgaccctgttcctaacacccacccacttctcgtctttgtcaatcctaagagtggcgggaagcaggggcaragggtgctctggaagttccagtatatattaaaccctcgacaggtgttcaacctcctaaaggatggtcctgagatagggctccgattattcaaggatgttcctgatagccggattttggtgtgtggtggagacggcacagtaggctggattctagagaccattgacaaagctaacttgccagttttgcctcctgttgctgtgttgcccctgggtactggaaatgatctggctcgatgcctaagatggggaggaggttatgaaggacagaatctggcaaagatcctcaaggatttagagatgagtaaagtggtacatatggatcgatggtctgtggaggtgatacctcaacaaactgaagaaaaaagtgacccagtcccctttcaaatcatcaataactacttctctattggcgtggatgcctctattgctcatcgattccacatcatgcgagagaaatatccggagaagttcaacagcagaatgaagaacaagctatggtacttcgaatttgccacatctgaatccatcttctcaacatgcaaaaagctggaggagtctttgacagttgagatctgtgggaaaccgctggatctgagcaacctgtccctagaaggcatcgcagtgctaaacatccctagcatgcatggtggctccaacctctggggtgataccaggagaccccatggggatatctatgggatcaaccaggccttaggtgctacagctaaagtcatcaccgaccctgatatcctgaaaacctgtgtaccagacctaagtgacaagagactggaagtggttgggctggagggtgcaattgagatgggccaaatctataccaagctcaagaatgctggacgtcggctggccaagtgctctgagatcaccttccacaccacaaaaacccttcccatgcaaattgacggagaaccctggatgcagacgccctgtacaatcaagatcacccacaagaaccagatgcccatgctcatgggcccacccccccgctccaccaatttctttggcttcttgagctaagggggacacccttggcctccaagccagccttgaacccacctccctgtccctggactctactcccgaggctctgtacattgctgccacatactcctgccagcttgggggagtgttccttcaccctcacagtatttattatcctgcaccacctcactgttccccatgcgcacacacatacacacaccccaaaacacatacattgaaagtgcctcatctgaataaaatgacttgtgtttcccctttgggatctgctaaaaaaaa

SEQ ID NO: 920 - DNA, 1400 bp, Homo sapiens
cgctgaccgtgagaggaagaagctggtgctggagaacctggaggactcctgcgtgctgactgggccagatgattccctgtgggacaagcacgcgtgcccagcctacgtgggacctgagatactcagctcamgggcctcatactcgggcaaggcagccgatgtctggagcctgggcgtggcgctcttcaccatgctggccggccactaccccttccaggactcggagcctgtcctgctcttcggcaagatccgccgcggggcctacgccttgcctgcaggcctctcggcccctgcccgctgtctggttcgctgcctccttcgtcgggagccagctgaacggctcacagccacaggcatcctcctgcacccctggctgcgacaggacccgatgcccttagcyccaacccgatcccatctctgggaggctgcccaggtggtccctgatggactggggctggacgaagccagggaagaggagggagacagagaagtggttctgtatggctaggaccaccctactacacgctcagctgccaacagtggattgagtttgggggtagctccaagccttctcctgcctctgaactgagccaaaccttcagtgccttccagaagggagaaaggcagaagcctgtgtggagtgtgctgtgtacacatctgctttgttccacacacatgcagttcctgcttgggtgcttatcaggtgccaagccctgttctcggtgctgggagtacagcagtgagcaaaggagacaatattccctgctcacagagatgacaaactggcatccttgagctgacaacacttttccatgaccataggtcactgtctacactgggtacactttgtaccagtgtcggcctccactgatgctggtgctcaggcacctctgtccaaggacaatccctttcacaaacaaaccagctgcctttgtatcttgtaccttttcagagaaagggaggtatccctgtgccaaaggctccaggcctctcccctgcaactcaggacccaagcccagctcactctgggaactgtrttcccagcatctctgtcctcttgattaagagattctccttccaggcctaagcctgggatttgggccagagataagaatccaaactatgaggctagttcttgtctaactcaagactgttctggaatgagggtccaggcctgtcaaccatggggcttctgacctgagcaccaaggttgagggacaggattaggcagggtctgtcctgtggccacctggaaagtcccaggtgggactcttctggggacacttggggtccacaatcccaggtccatactctaggttttggataccatgagtatgtatgtttacctgtgcctaataaaggagaattatgaaataaaaaaaaaaaaaaaaaaactcgac

SEQ ID NO: 921 - DNA, 1400 bp, Homo sapiens
tcaccccttggacctctggcaggctcaccagtgattgctgctgccaacccccttgggatgcctgttccagctgccgctggcgctcagcagtaacggccctatctgtctcctgatgcctgagcagaggtgggggagtccaccctctccttgatgcagcttgcgcctggcggggaggggtgaaacacttcagaagcaccgtgtctgaaccgttgcttgtggatttatagtagttcagtcataaaaaaaaaattataataggctgattttcttttttctttttttttttaactcgaacttttcataactcaggggattccctgaaaaattacctgcaggtggaatatttcatggacaaatttttttttctcccctcccaaatttagttcctcatcacaaaagaacaaagataaaccagcctcaatcccggctgctgcatttaggtggagacttcttcccattcccaccattgttcctccaccgtcccacactttagggggttggtatctcgtgctcttctccagagattacaaaaatgtagcttctcaggggaggcaggaagaaaggaaggaaggaaagaaggaagggaggacccaatctataggagcagtggactgcttgctggtcgcttacatcactttactccataagcgcttcagtggggttatcctagtggctcttgtggaagtgtgtcttagttacatcaagatgttgaaaatctacccaaaatgcagacagatactaaaaacttctgttcagtaagaatcatgtcttactgatctaaccctaaatccaactcatttatacttttatttttagttcagtttaaaatgttgataccttccctcccaggctccttaccttggtcttttccctgttcatctcccaacatgctgtgctccatagctggtaggagagggaaggcaaaatctttcttagttttctttgtcttggccattttgaattcatttagttactgggcataacttactgctttttacaaaagaaacaaacattgtctgtacaggtttcatgctagagctaatgggagatgtggccacactgacttccattttaagctttctaccttcttttcctccgaccgtccccttccctcacatgccatccagtgagaagacctgctcctcagtcttgtaaatgtatcttgagaggtaggagcagagccactatctccattgaagctgaaatggtagacctgtaattgtgggaaaactataaactctcttgttacagccccgccaccccttgctgtgtgtatatatataatactttgtccttcatatgtgaaagatccagtgttggaattctttggtgtaaataaacgtttggttttatttatcaaaaaaaaaaaaaaaaaaaaaaaaaaaaaaaaaaaaaaaaac

SEQ ID NO: 922 - DNA, 1400 bp, Homo sapiens; identical to SEQ ID NO: 921

SEQ ID NO: 923 - DNA, 600 bp, Homo sapiens
  misc_feature (397)..(397): n is a, c, g, or t
  misc_feature (538)..(538): n is a, c, g, or t
  misc_feature (561)..(561): n is a, c, g, or t
ttttaaattatgttctaaacctmktkycagytyaggtscckmawtmaaaattgctgctgcttmawwtayctatgggctgtatgaaaagggtgggaatgtccactggaaagaagggacacccacgggccctggggctaggtctgtcccgagggcaccgcatgctcccggcgcaggttccttgtaacctcttcttcctaggtcctgcacccagacctcacgacgcacctcctgcctctccgctgcttttggaaagtcagaaaaagaagatgtctgcttcgagggcaggaaccccatccatgcagtagaggcgctgggcagagagtcaaggcccagcagccatcgaccatggatggtttcctccaaggaaaccggtggggttgggytggggagggggcanctacctaggawtagccacggggtagagytacagtgattaagaggaaagcaagggcgcggttgytcamgsctgtaatcccagcactttgggacaccgaggtgggcagatcacttcaggtcaggagtttgagaccagcctggncaacttagtgaacccccatcttntacttaaaaatgcaaaaattatccaggcatggtggcaca

SEQ ID NO: 924 - DNA, 600 bp, Homo sapiens; identical to SEQ ID NO: 923
  misc_feature (397)..(397): n is a, c, g, or t
  misc_feature (538)..(538): n is a, c, g, or t
  misc_feature (561)..(561): n is a, c, g, or t

SEQ ID NO: 925 - DNA, 839 bp, Homo sapiens
gtggtgagttacttggctcggagcgggcgaggggacgcgtgggcggagcggggctggccagcctcggcccccrtgrcccgswgkccygkgccmkktmsswgcgatgggcgtgcagccccccaacttctcctgggtgcttccgggccggctggcgggactggcgctgccgcggctccccgcccactaccagttcctgttggacctgggcgtgcggcacctggtgtccctgacggagcgcgggccccctcacagcgacagctgccccggcctcaccctgcaccgcctgcgcatccccgacttctgcccgccggcccccgaccagatcgaccgcttcgtgcagatcgtggacgaggccaacgcacggggagaggctgtgggagtgcactgtgctctgggctttggccgcactggcaccatgctggcctgttacctggtgaaggagcggggcttggctgcaggagatgccattgctgaaatccgacgactacgacccggctccatcgagacctatgagcaggagaaagcagtcttccagttctaccagcgaacgaaataaggggccttagtacccttctaccaggccctcactccccttccccatgttgtcgatggggccagagatgaagggaagtggactaaagtattaaaccctctagctcccattggctgaagacactgaagtagcccacccctgcaggcaggtcctgattgaaggggaggcttgtactgctttgttgaataaatgagttttacgaaccarraaaaaaaaaaaaaaarrmrgccgcaagcttattccctttagtgagggttaattttagcttggcactggccgtcgtata

SEQ ID NO: 926 - DNA, 839 bp, Homo sapiens; identical to SEQ ID NO: 925

SEQ ID NO: 927 - DNA, 600 bp, Homo sapiens
gcttgagctgccaaagaagggtcacaaagtgttcttcctcatggaagaagtgcctcggggttgcagggctgcaaagtgacaactgcactgaatgacactttattttttggctttggcttattatttagcactgggaggcccaggggaattggtgattacagtagcactttgggaagttaaagccccctttgggcttgctttggagagatgatggcatgcttggtattccatttggataatcaggaagcctccctagtccatccatattgtgtcagagtgggattaacaaccctggaagagtccactgccaaaagagtagttgctttcctggaatttccaaagcttttggattttctggatcaagtaacccactttttaaaacctgaggtcaggagttcgagaccagcctggtaacatggtgaaaccccgtctctattaaaaatagaaaaaattagccaggcatggtggcgggcacctatagtcccagctactcaggaggctgaggtaggagaattgcttgaacccaggagacagaggctgcattgagccaagatcacaccactgcactccagcctgggcagcagagcaagactccatctc

SEQ ID NO: 928 - DNA, 600 bp, Homo sapiens
ggcgtgagccaccgcgccccacctaacccttccttatttagcctaggagtaagagaacacaatctctgtttcttcaatggttctcttcccttttccatcctccaaacctggcctgagcctcctgaagttgctgctgtgaatctgaaagacttgaaaagcctccgcctgctgtgtggacttcatctcaaggggcccagcctcctctggactccaccttggacctcagtgactcagaacttctgcctctaagctgctctaaagtccagactatggatgtgttctctaggccttcaggactctagaatgtccatatttatttttatgttcttggctttgtgttttaggaaaagtgaatcttgctgttttcaataatgtgaatgctatgttctgggaaaatccactatgacatctaagttttgtgtacagagagatatttttgcaactatttccacctcctcccacaaccccccacactccactccacactcttgagtctctttacctaatggtctctacctaatggacctccgtggccaaaaagtaccattaaaaccagaaaggtgattggaaaaaaaaaaaaaaaaaaaaaaaaaaaaaaaa

SEQ ID NO: 929 - DNA, 600 bp, Homo sapiens
agaagctattgaactctgacctgggtgagctcatcaacaagatgaaactggcccagcagtatgtcatgaccagcctccagcaagagtacaaaaagcaaatgctgactgctgctcacgccctggctgtggatgccaaaaacttactcgatgtcattgaccaagcaagactgaaaatgcttgggcagacgagaccacactgagcctcccctaggagcacgtcttgctaccctcttttgaagatgttctctagccttccaccagcagcgaggaattaaccctgtgtcctcagtcgccagcacttacagctccaacttttttgaatgaccatctggttgaaaaatctttctcatataagtttaaccacactttgatttgggttcattttttgttttgtttttttcaatcatgatattcagaaaaatccaggatccaaaatgtggcgtttttctaagaatgaaaattatatgtaagcttttaagcatcatgaagaacaatttatgttcacattaagatacgttctaaagggggatggccaaggggtgacatcttaattcctaaactaccttagctgcatagtggaagaggagagcwwgaagcaaa

SEQ ID NO: 930 - DNA, 600 bp, Homo sapiens
acactgaaatttcctaactacatctatttctataatttttaaggactcttcataaggactcttaaaataatcctgaacattagaaccctaatgttcaggaagattttaatctaagcatttttatggaaatatttttaatgcagcagctattgcacttcagccaaatgtttatttcacacaaaacggatgtaacatttcatgtgatcgtgcaccactggaacaaaaccaaaatgtgaccataactgtttaggcttctgtgtgtttgtaatatgctctaataatctgagtagaaatgcgtaatttcaattactgtataaagtttatgtttttttaagtgtgcagaatctgagagcaatggtttttacttctctgtgttaattgtaatattgactctattttgtaacttaagtttctgacctgtcgtacatttgtttgagtcgtttatgtactactgaactgtaccagttgcacatgcttgaactgtagtaatgttagcttgttctaaagctatccattgtgtcatatttactctaaaaattaaagagactctcaacaaaaaaaaaraaaaaaaaaaaccatggtacccggatcctcgaattc

SEQ ID NO: 931 - DNA, 1400 bp, Homo sapiens
acattgtcaaccgggtgaaccaagggacgtagccatctcccagcccctatggtttcacatagacgtgcagtgtgaaccaaagcaagactgaatgtgactgtaaataattctgttcatcatttcactccgtgcagttctctgaattgagagatgtacctcttaaacctcgtcagtggttattcagggtctgagcagcagtaaaagtcaccctaaatcaaggggcttttcagaaggtcattctgaagaaataaagaggcaaagggtcacagaagtgttcagaagaagggcaaagataagaacaatattagctgttacgaaattttaactgtatcttccaaaatgagtggttaactgggcaaaccttaagctcacaagagtataaaagatctctggctttgctgaaattttaagcaagaagttctatttaatggagatgtcatgtatatcaactattctggtttagataacttagatatagtttcttrataggatagatacccacatacagtataatatatcccattcaggtttcagagtttttctaatatagagatatatatattaaatcaatcacaagtaattttgagtgctccagttaagacagtaatttatttaccgaatcattacattgttttgactaagcacaattagatgacaagtttttttagagcattttatagatcttgtatagaaatcttttaccagaacctgtgcattaagagaaagcaatgttgcccttttgaatgagaaaattttttctgtcaatcgcaggttatttgattaagataggttctttctgtatatgaaacgctccccgcaaattcactggcagctcagaattattctggaaagaaagcctgccaggaaataaattcaaatacagtatgagctgcggggatatttttgtgtctacaccaggtttgaaataagtaaacaaatacaagaggttcatataaaagggcaaatgaaaacctttcctacagttcctatgaacaacgtaccaacactttctgatttcttctacagctgtagaataccatctttcagaaagttggctggctttatttctaactccttattgaagctaaggggtgcttactaaaaggaggcagccatataggccttttaaaggcctggttctaagtcctttttaaagccatggaacaaaacctgatacatcaccctaacagagcattaagttgtaactgagattgcaatacctgtcaccatgcagccgctgatagttctctgaactaaaaggactaattgtactttgaggccaatgctgctttctggtgtatattctccatacaagattattattaactgctctttttccctctggtggaaaaaaaattaaacctgggcatttcatgggaaaaaaaaaaaaaaaaaaaaaa

SEQ ID NO: 932 - DNA, 1400 bp, Homo sapiens
ctctcaaaagggccccctgcgcctgctctcccttgccccggcgcgcccaccccgagccccctccccaccgtggccgcccctccacgacgaaggccgtcgtccttcgtaacggtcagagtgaagaccccccggcggacccccatcatgcccacggccaacatcaagctcccaccaggcctgccctcccacctgcctcgctgggcaccgggtgcccgggaggcggctgccccagtgcggcgccgggagccacctgcccgccgcccggaccagatacattccgtgtacatcacgcccggggcagacctgccagtgcagggcgccctggagcccctagaagaggatggccagccacctggggccaagcggaggtactcggatcccccaacgtactgcctgccccccgcctcgggccagaccaatggctgagagccacagctgacaaagtctgcatgtccgaggacggcccctgcactggagctgggcgccagagctgcagagctagtgttcggccctcagagaaggatccagaatcaaaagctcaagagtgacgtgaggtgggcaccggccccaagtgcagagtcaaggcagggagaggccggctggagccaggccccctcgcacgcagcccccaaatcatggacgcacctgtggggagcaccacatctccacctgcggcctcacatctccccactcccctttttgtacgtttaactgtttctttgtacgtggtttacgtaactttaaactgtaacagccttaatggaagaccaaatggttttttatatgtgtatgtacaaagttttctattaacgctgcccgtctcccttataacctggacgtgagctgtcagagcagaagccactaggccactgcgcgtctgaggctcagaccctgctgtggttggcttggggtggccaatgggctgggaccctccatgagagttttggacacttgggtcacctgacccgtgcctctctgacacatgtctccggggggcagccacctggccaatgtgcatttttgcacatgctggaaccttccatgggggtctgggctattggctggagccaggacatgagtcaggggcaccatggacctcacgtgccagggagacttgaatgtggctgtcactcttccggacgccaagggctgcaggaggctgcttttggcactacccaccccgtgtgacagaataggagccagcgactcaggactgctcacgggtcaggagggcaacgcctgaagtcagacctccctataggtcaacagggacaacctggggatctctggagcagggccctcctctctcaggcttggcccactcccccagacacctggacacgtggccacaaatctgggacaaggggcccccgcacagcatgaaataaaaagtgcctgag

SEQ ID NO: 933 - DNA, 1400 bp, Homo sapiens; identical to SEQ ID NO: 932

SEQ ID NO: 934 - DNA, 600 bp, Homo sapiens
attatgacaacacagcaggaatcagtcagtatctgcagaacagtaagcgaaagagccggcctgtgagtgtaaaaacatttgaagatatcccgttagaagaaccagaagtaaaagtaatcccagatgacaaccagacggacagtggtatggttcttgcctcagaagagctgaaaactttggaagacagaaccaaattatctccatcttttggkggaatggtgcccagcaaaagcagggagtctgtggcatctgaaggctcaaaccagacaagcggctaccagtccggatatcactccgatgacacagacaccaccgtgtactccagtgaggaagcagaacttttaaagctgatagagattggagtgcaaaccggtagcacagcccagattctccagcctgacwcggggaccacactgagctctcctcctgtttaaaaggaagcatccacacccccaactcccggacatcacatgagaggtctgctcagattttsaagtgttgttctttccaccagcaggaagtagccgcatttgattttcatttcgacaacagaaaaaggacctcggactgcagggagccagctcttctaggcttgtgacc

SEQ ID NO: 935 - DNA, 600 bp, Homo sapiens
  misc_feature (531)..(531): n is a, c, g, or t
  misc_feature (596)..(596): n is a, c, g, or t
ccatccctaaccggctggctgcagacccggtcctctcaggcctagctcagatgatgcgggagtgctggtacccaaacccctctgcccgactcamcgcgctgcggatcaagaagacactacaaaaaattagyaacagtccagagawgccyaaagtgattcamtagcccaggagcacctgattcctttctgcctgcagggggctgggggggtggggggcagtggatggtgccctatctgggtagaggtagtgtgagtgtggtgtgtgctggggatgggcagctgcgcctgcctgctcggcccccagcccacccagccaaaaatacagctgggctgaaacctgawmmmmwrmwrwmwggcctgctcaaagcggcaggctccctgacgcctggctctctccccacccctatggccagcatggtgcaccccctaccactcccgggacaggatgcaaaagaggctccagagtcagagtgccaagccagggaatcccagtcccagactcagagcccgggccttgcaatttgccccctnggcccttggatcaaccccactgccccaccagagctgccaaggtggcacaggggcctgttcaaccnctgg

SEQ ID NO: 936 - DNA, 600 bp, Homo sapiens; identical to SEQ ID NO: 935
  misc_feature (531)..(531): n is a, c, g, or t
  misc_feature (596)..(596): n is a, c, g, or t

SEQ ID NO: 937 - DNA, 1400 bp, Homo sapiens
gatgaatcctatcggcccctgcgcagcctcctgggccacccagagaattctgtgcgggcacacacttataggctcctgggacacttgctccaacacagcatggccctgcgtggggcactgcagagccagtctggactgctcagccttctgctgcttgggcttggagacaaggatcctgttgtgcggtgcagtgccagctttgctgtgggcaatgcagcctaccaggctggtcctctgggacctgccctggcagctgcagtgcccagtatgacccagctgcttggagatcctcaggctggtatccggcgcaatgttgcatcagctctgggcaacttgggacctgaaggtttgggagaggagctgttacagtgcgaagtaccccagcggctcctagaaatggcatgtggagacccccagccaaatgtgaaggaggctgccctcattgccctccggagcctgcaacaggagcctggcatccatcaggtrmtggtgyssctgggwgccagkgagarmckayccywgmtcwctcygssgratcmswcrctsccrcacmkcmstcctaggcctgmctctgccaaacactgcaggaaactcattcacctcctgaggccagcccatagcatgtgattccagattcctgcggtccagcctccaactttggttgccagctctttcttattctamtacacaagccgccaaytcaactgagagctaaagagactagaaaagagataagctgccaactcaactgagaacargaaactagaagagatttatatataaagcttcttccttctcccagatgcaggatgttttcaaccagtaaattttattgctgttggtgccagagaagagtcctttcttctctacatccaggggccttttctccaataatgtgcctttaactctagggacctgcctcacggaccttagggaaaaacctcaacctgaaagatctcttcctttctggagctcctttaatcttcccagcaggtttttgccttagacgtgctggccccaggacagtgatgaagacagagcctgtctcagctctaggctgtggggatcaatgccatcagtccctgttattgagggattatcccttagccaacattcctatctgtgggtgggcgtggagagtgtatctttttttggggtgtgtgtgtatatgtgtgtgtgtatgtgtgtgtgtgtttaatagttctgtttgtaaactcttttaataaaagttgtgcctcaccatacttgaagctcccaggacaagggttgagaggctcaacccctctttcagcttctatgtggtgttggaggtgctggtatcgtgttcacacaaaaaaaaaaaaaaaaaaaaaaaaaaaaaaaaaaaaaaaaaaaaaaaaaaaaaaaaaaaaaaaaaaaaa

SEQ ID NO: 938 - DNA, 1374 bp, Homo sapiens
ccagcatgatccgctgggcccccagcgcatctcctggaagagcccactcaccctggacgagctcttcggtagcctcagaccgtccttgaagaggatgactgagacattatgggccacgcgctgtgtgtctgctctcggggaactgtcatcattgacaataagcgctacctcttcatccagaaactgggggagggtgggttcagctatgtggacctagtggaagggttacatgatggacacttctacgccctgaagcgaatcctgtgtcacgagcagcaggaccgggaggaggcccagcgagaagccgacatgcatcgcctcttcaatcaccccaacatccttcgcctcgtggcttactgtctgagggaacggggtgctaagcatgaggcctggctgctgctaccattcttcaagagaggtacgctgtggaatgagatagaaaggctgaaggacaaaggcaacttcctgaccgaggatcaaatcctttggctgctgctggggatctgcagaggccttgagsyyattcatgccaagggttatgccyacagagacttgaagcccaccaatatattgcttggagatgaggggcagcywgttttawtgracttkkgtwccmtgwmtyawgcakgcayccatgtkkmgrrytcscrcsaggctctgaccctgcaggactgggcagcccagcggtgcaccatctcctaccgagccccagagctcttctctgtgcagagtcactgtgtcatcgatgagcggactgatgtctggtccytaggctgcgtgctatatgccatgatgtttggggaaggcccttatgacatggtgttccaaaagggtgacagtgtggcccttgcygtgcagaaccaactcagcatcccacaaagccccaggcattcttcagcattgcggcagctcctgaactcgatgatgaccgtggacccgcatcagcgtcctcacattcctctcctcctcagtcagctggaggcgctkcagcccccagctcctggccaacatactacccaaatctgaaaaagcagcatgttgagaagatggccccttgtgccttggaaagaggttcccatccctcattggaatcaccacccattccatccaggacttctcttacacttgggggtagcggggtcaggacaatcatctcagtcctgcatcttttcttctgctttcttccctccaagagcaaaacctgggcaaggggacttactgagtgggggtgggtgggggttgggaaaagggaaactggtgggatatggaacatggctctgagcaggactgttgagctcacatagygttytgactccaaatctgggagcaggagawtgtgtaaacaagaataaagtggaagcaggttggtgtaga

SEQ ID NO: 939 - DNA, 1400 bp, Homo sapiens
acatcaagccagacaacctgctgctggcccctgacaatgccctcaagattgtggactttggcagtgcccagccctacaacccccaggcccttaggccccttggccaccgcacgggcacgctggagttcatggctccggagatggtgaagggagaacccatcggctctgccacggacatctggggagcgggtgtgctcacttacattatgctcagtggacgctccccgttctatgagccagacccccaggaaacggaggctcggattgtggggggccgctttgatgccttccagctgtaccccaatacatcccagagcgccaccctcttcttgcgaaaggttctctctgtacatccctgswsycdgcymtscmwsmwgkamtrhmtgkcbsmsmcawggwwkmarraygscwascwgmtgaagctgcgccgccagacgctcaccttcaccaccaaccggctcaaggagttcctgggcgagcagcggcggcgccgggctgaggctgccacccgccacaaggtgctgctgcgctcctaccctggcggcccctagaggcacggaccacagccaggcctcgggcttcaactggggttcccaccaatgccacgggacattccagggcccacgctgagccaggcgggcctggggcttcggttaccaccagcagcaacatctggctgggctcttacctcatagaccttcaaggacagagaccccagggcctggacctgatgccaccccaggccaaagccagagtgggagacccattggtcaggctcagcagggtgggaacaggcagagggacaagaggggaatggagaagtggagaggaaaaggaatcgagggacaggaagggggaggctctaggaaggttctgggttgggggtcagtgcatctcagggagaaccaaggaaggtgggcatggctggagaggaggaaaaggaaggagccccaggtgtcagggcagtaggctgggagtcagtgtggcaaagcgggggcaggacacagatacagtggcaggggcccagggctgggacatgagagaaggcagcgaggcggcagagggagaagagaggactcaggtggaggtggggtgggtcagctgtcagcatccctcagaggagaaatgtggagagctggaggccagcagtcactcacactcgctctgtcctcctgtccagtggatacagccctgggcgctctgctggcccaaggatgtccccactgcccctccatggcctttggccttcttcccattcatatttatttatttattgacttttatgaagtttccccttccatccgatccctactgcccatgttgtcctgaccatccctcccagccatccagctgtctgtctgtctgccacaaggaaataaaaatggcaagcagcaaaaaaa

SEQ ID NO: 940 - DNA, 1400 bp, Homo sapiens; identical to SEQ ID NO: 939

SEQ ID NO: 941 - DNA, 600 bp, Homo sapiens
ggtatacaagacatatttgttytctrcaccagaggggaactgtcaaaatatagagtyccaaamcttctggwtytctaccagcaatgtggwattatcacccatcatcatccartcgcagatggagggactccygacatagccagctgctgtgaaataatggaagagcttacaacctgccttaaaaattaccgaaaaaccttaatacactgctatggaggacttgggagatcwtgkcttgtagctgcttgkctcctactatacctgtctgacacaatatcaccagagcaagccatagacagcctgcgagacctaagaggatccggggcaatacagaccatcaagcaatacarttatcttcatgagtttcgggacawattagctgcacatctatcatcaagagaytcacaatcaagatctgtatcaagataaaggaattcaaatagcatatatatgaccatgtctgaaatgtcagttctctagcataatttgtattgaaatgaaaccaccagtgttatcaacttgaatgtaaatgtacatgtgcagatattcctaaagttttattgacaaaaaaaaaaaggaagaaaaaaacacaacaaaaaa

SEQ ID NO: 942 - DNA, 600 bp, Homo sapiens; identical to SEQ ID NO: 941

SEQ ID NO: 943 - DNA, 1400 bp, Homo sapiens
agagatcacctggaagattgacaccaaggagaacaacatgaagtactgggagaagaaccagtccatcgccatcgagctctctgacctggttgtctactgcaaaccaaccagcaaaaccaaggacaacttagaaaatcctgacttccgagaaatccgctcctttgtggagacgaaggctgacagcatcatcagacagaagcccgtcgacctcctgaagtacaatcaaaagggcctgacccgcgtctacccaaagggacaaagagttgactcttcaaactacgaccccttccgcctctggctgtgcggttctcagatggtggcactcaatttccagacggcagataagtacatgcagatgaatcacgcattgttttctctcaaygggcgcacgggctacgttctgcagcctgagagcatgaggacagagaaatatgacccgatgccacccgagtcccagaggaagatcctgatgacgctgacagtcaaggttctcggtgctcgccatctccccaaacttggacgaagtattgcctgtccctttgtagaagtggagatctgtggagccgagtatgacaacaacaagttcaagacgacggttgtgaatgataatggcctcagccctatctgggctccaacacaggagaaggtgacatttgaaatttatgacccaaacctggcatttctgcgctttgtggtttatgaagaagatatgttcagcgatcccaactttcttgctcatgccacttaccccattaaagcagtcaaatcaggattcaggtccgttcctctgaagaatgggtacagcgaggacatagagctggcttccctcctggttttctgtgagatgcggccagtcctggagagcgaagaggaactttactcctcctgtcgccagctgaggaggcggcaagaagaactgaacaaccagctctttctgtatgacacacaccagaacttgcgcaatgccaaccgggatgccctggttaaagagttcagtgttaatgagaaccagctccagctgtaccaggagaaatgcaacaagaggttaagagagaagagagtcagcaacagcaagttttactcatagaagctggggtatgtgtgtaagggtattgtgtgtgtgcgcatgtgtgtttgcatgtaggagaacgtgccctattcacactctgggaagacgctaatctgtgacatcttttcttcaagcctgccatcaaggacatttcttaagacccaactggcatgagttggggtaatttcctattattttcatcttggacaactttcttaacttatattctttatagaggattccccaaaatgtgctcctcatttttggcctctcatgttccaaacctcattgaataaaagcaatgaaaaccttgaaaaaaaaaaaaaaaaaa

SEQ ID NO: 944 - DNA, 1400 bp, Homo sapiens
gaccccgagaagaggccatcctttgtgaagctggaacactggctggagaccctccgcatgcacctggccggccacctgccactgggcccacagctggagcagctggacagaggtttctgggagacctaccggcgcggcgagagcggactgcctgcccaccctgaggtccccgactgagccagggccactcagctgcccctgtccccacctctggagaatccacccccaccagattcctccgcgggaggtggccctcagctgggacagtggggacccaggcttctcctcagagccaggccctgacttgccttctcccaccccgtggaccgcttcccctgccttctctctgccgtggcccagagccggcccagctgcacacacacaccatgctctcgccctgctgtaacctctgtcttggcagggctgtcccctcttgcttctccttgcatgagctggagggcctgtgtgagttacgcccctttccacacgccgctgccccagcaaccctgttcacgctccacctgtctggtccatagctccctggaggctgggccaggaggcagcctccgaaccatgccccatataacgcttgggtgcgtgggagggcgcacatcagggcagaggccaagttccaggtgtctgtgttcccaggaaccaaatggggagtctggggcccgttttccccccagggggtgtctaggtagcaacaggtatcgaggactctccaaacccccaaagcagagagagggctgatcccatggggcggaggtccccagtggctgagcaaacagccccttctctcgctttgggtcttttttttgtttctttcttaaagccactttagtgagaagcaggtaccaagcctcagggtgaagggggtcccttgagggagcgtggagctgcggtgccctggccggcgatggggaggagccggctccggcagtgagaggataggcacagtggaccgggcaggtgtccaccagcagctcagcccctgcagtcatctcagagccccttcccgggcctctcccccaaggctccctgcccctcctcatgcccctctgtcctctgcgttttttctgtgtaatctattttttaagaagagtttgtattattttttcatacggctgcagcagcagctgccaggggcttgggattttatttttgtggcgggcgggggtgggagggccattttgtcactttgcctcagttgagcatctaggaagtattaaaactgtgaagctttctcagtgcactttgaacctggaaaacaatcccaacaggcccgtgggaccatgacttagggaggtgggacccacccacccccatccaggaaccgtgacgtccaaggaaccaaacccagacgcagaacaataaaataaattccgtactccccaccc

SEQ ID NO: 945 - DNA, 1400 bp, Homo sapiens; identical to SEQ ID NO: 944

SEQ ID NO: 946 - DNA, 1400 bp, Homo sapiens
tgcggactctagcggaggtcctctccagatgctcccaaaatatcacggagacccaggagagcctgagcagcctgaaccgggagctggtgaagagccgggatcaggtacatgaggacagaagcatccagcagattcagtgctgtttggacaagatgaacttcatctacaaacagttcaagaagtctaggatgaggccagggcttggctacaacgaggagcagattcacaagctggataaggtgaatttcagtcatttagccaaaagactcctgcaggtgttccaggaggagtgcgtgcagaagtatcaagcgtccttagtcacacacggcaagaggatgagggtggtgcacgagaccaggaaccacctgcgcctggttggctgttctgtggctgcctgtaacacagaagcccagggggtccaggagagtctcagcaagctcctggaagagctatctcaccagctccttcaggaccgagcaaagggggctcaggcctcgccgcctcccatagctccttaccccagccctacacgaaaggacctgcttctccacatgcaagagctctgcgaggggatgaagctgctggcatctgacctyctggacaacaaccgcatcatcgaacggctaaatagagtcccagcacctcctgatgtctgagctccatggggcacatgaggcatcctgaagcattagaatgattccaacactgctcttctgcaccatgagaccaacccagggcaagatcccatcccatcacatcagcctacctccctcctggctgctggccaggatgtcgccagcattaccttccactgcctttctccctgggaagcagcacagctgagactgggcaccaggccacctctgttgggacccacaggaaagagtgtggcagcaactgcctggctgacctttctatcttctctaggctcaggtactgctcctccatgcccatggctgggccgtggggagaagaagctctcatacgccttcccactccctctggtttataggacttcactccctagccaacaggagaggaggcctcctggggtttccccagggcagtaggtcaaacgacctcatcacagtcttccttcctcttcaagcgtttcatgttgaacacagctctctccactcccttgtgatttctgagggtcaccactgccagcctcaggcaacatagagagcctcctgttctttctatgcttggtctgactgagcctaaagttgagaaaatgggtggccaaggccagtgccagtgtcttggggcccctttggctctccctcactctctgaggctccagctggtcctgggacatgcagccaggactgtgagtctgggcacgtccaaggcctgcaccttcaagaagtggaataaatgtggcctttgcttctgtt

SEQ ID NO: 947 - DNA, 600 bp, Homo sapiens
ctcacgtaggggtaaaaagcggggtcccccaggcagcaaagactgggggacagcactgaaagggtgtgatgactacttgtttatagagttcttgaaaaggtgtcttcactgggacccctctgcccgcttgaccccagctcaagcattaagacacccttggattagcaagtctgtccccagacctctcaccaccatagacaaggtgtcagggaaacgggtagttaatcctgcaagtgctttccagggattgggttcyaagctgcctccagttgttggaatagccaataagcttaaagctaacttaatgtcagaaaccaatggtagtatacccctatgcagtgtattgccaaaactgattagctagtggacagagatatgcccagagatgcatatgtgtatatttttatgatcttacaaacctgcaaatggaaaaaatgcaagcccattggtggatgtttttgttagagtagactttttttaaacaagacaaaacatttttatatgattataaaagaattcttcaagggctaattacctaaccagcttgtattggccatctggaatatgcattaaatgactttttataggtcaaaaaaaaaa

SEQ ID NO: 948 - DNA, 1400 bp, Homo sapiens
atcagcagccgccacactataccacgtcggcactrcagcaggccctgctgtctcccacgccgccagactatacaagacaccagcaggtaccccacatccttcaaggactgctttctccccggcattcgctcaccggccactcggacatccggctgcccccaacagagtttgcacagctcattaaaaggcagcagcaacaacggcagcagcagcagcarcagcagcaacagcaagaataccaggaactgttcaggcacatgaaccaaggggatgcggggagtctggctcccagccttgggggacagagcatgacagagcgccaggctttatcttatcaaaatgctgactcttatcaccatcacaccagcccccagcatctgctacaaatcagggcacaagaatgtgtctcacaggcttcctcacccaccccgccccacgggtatgctcaccagccggcactgatgcattcagagagcatggaggaggactgctcgtgtgagggggccaaggatggcttccaagacagtaagagttcaagtacattgaccaaaggttgccatgacagccctctgctcttgagtaccggtggacctggggaccctgaatctttgctaggaactgtgagtcatgcccaagaattggggatacatccctatggtcatcagccaactgctgcattcagtaaaaataaggtgcccagcagagagcctgtcatagggaactgcatggatagaagttctccaggacaagcagtggagctgccggatcacaatgggctcgggtacccagcacgcccctccgtccatgagcaccacaggccccgggccctccagagacaccacacgatccagaacagcgacgatgcttatgtacagctggataacttgccaggaatgagtctcgtggctgggaaagcacttagctctgcccggatgtcggatgcagttctcagtcagtcttcgctcatgggcagccagcagtttcaggatggggaaaatgaggaatgtggggcaagcctgggaggtcatgagcacccagacctgagtgatggcagccagcatttaaactcctcttgctatccatctacgtgtattacagacattctgctcagctacaagcaccccgaagtctccttcagcatggagcaggcaggcgtgtaacaagaaacagagagttttgtgtacagcttgggaatgaaaaggttgattgtaaacccacagtatctagcagcgttgtgccaaattgcccttgtgtttctctccacccaaaatatcacagctgctttcctcacatttggttcatccgtgtgctgttcttttgggttctgagagggttttgccatgtttgcttgtatgaccaagtcaccaaggaaataaacaggaaggaaatccatgttctcc

SEQ ID NO: 949 - DNA, 600 bp, Homo sapiens
  misc_feature (417)..(417): n is a, c, g, or t
  misc_feature (421)..(421): n is a, c, g, or t
catcagcataaagatcactcatcccataccacccacaggtagggaggaaggatgctgtagtatatgaaaacaaaagttttcacctgagctgagagcatttagcatatcgtggttctgtaacaatatcaaggaccagtgcagaatctggctttcttttctgataggctaccagtgtgtgtttatgtgtgctcattttgtggttctaatcataatggtacatataattagggaaggatatggaagccactttagaatcttattcatttttaaatataaatatgccttgtttcaaactttgttttcttgattcaggctttctttcctgtgagggcttggtttccttattgttgactgctttgttctttgccttgtccttccctataaagcctgcatggaagacgtttaatagtgcaactnaaanagagtcagctgagtgaggcttgtcagccaaagctggaatgctgagctatctggaggagatcctaataacccaatttggggatggggcccaggaatctgcattgggaagtcggccacccttcccaggtgattgtttagtacaaactttttgacagattaatttcactcaaatgcaaagat

SEQ ID NO: 950 - DNA, 600 bp, Homo sapiens; identical to SEQ ID NO: 949
  misc_feature (417)..(417): n is a, c, g, or t
  misc_feature (421)..(421): n is a, c, g, or t

SEQ ID NO: 951 - DNA, 600 bp, Homo sapiens
agccaggattctccggtctggaatttctgagtgagtcctttttttatggtgtcctccctctgtgaatgtacaggcggaactgtacgaacagctcccttccatccatttttaactctttcggaaataacacctcacagcagcttcgtgcttttgtacagacctttgtaacaagtgtacagaaaactcattttgtttgagaaacaggagttgatgaacccatcatgctggtttttctctgagcacaaagttttaggctgtacacagccagccttgggaatctcgttgagcgttcggcgtggatccacggggccaggccaccctgcgggagcgccacacgcatccacttcggattcagtgggtgaagacagaactctgagagtctgcaggcggctcctgtgctttttatttctggctcttcggatgtcttctagacatttactatcactgcacctgaagaaaaaatcacttttaccttcctaatttaaaaagacaaaacagaaatgtacgttccttcgctagctttagtctttctgttcccatttttataaatctgagcattgataatgttctatctaaatttgtacagtgtgattttttttt

SEQ ID NO: 952 - DNA, 600 bp, Homo sapiens; identical to SEQ ID NO: 951

SEQ ID NO: 953 - DNA, 600 bp, Homo sapiens
tcagtgaaaaggataactgagagcaccggtgctatcacatctatatccaagttacctccaccttctagctcagcttccaaactgaggactaatttggcgcagatgacagatgccaatgggaatattcagcagaggacagtgttgccaaaacttgttagctgagctcacgtcccctgatgctggtaacctgaaagatacgacattgctgagccttactgggttgaaaaggagtagctcagacctgtttttatttgctcaataactctactcatttgtatcttttcagcacttaattttaatgtaagaaagttgttcattttgtttttataaaatacatgaggacaatgctttaagtttttatactttcagaaactttttgtgttctaaaagtacaatgagccttactgtatttagtgtggcagaataataacatcartggcaggccactgattacttcatgactgccacgcatttacagattggtgtcaaagacattcactatgtttttatggttcatgttatatcctccccagggtgacagccccttaaggccctccttttccctccatgctccaggtccatgcacaggtgtagcatgtc

SEQ ID NO: 954 - DNA, 1400 bp, Homo sapiens
ctcagatgattgcatttcatgatccagagctgagtaatcatctcaatsagattggyttcattccagatctctatgccatcccttggtttcttaccatgtttactcatgtatttccactacacaaaattttccacctctgggataccttactacttgggaattcctctttcccattctgtattggagtagcaattcttcagcagctgcgggaccggcttttggctaatggctttaatgagtgtattcttctcttctccgatttaccagaaattgacattgaacgctgtgtgagagaatctatcaacctgttttgttggactcctaaaagtgctacttacagacagcatgctcaacctccaaagccatcttctgacagcagtggaggcagaagttcggcaccttatttctctgctgagtgtccagatcctccaaagacagatctgtcaagagaatccatcccattaaatgacctgaagtcagaagtatcaccacggatttcagcagaggacctgattgacttgtgtgagctcacagtgacaggccacttcaaaacacccagcaagaaaacaaagtccagtaaaccaaagctcctggtggttgacatcckgaatagtgaagactttattcgtggtcacatttcaggaagcatcaacattccattcagtgctgccttcactgcagaaggggagcttacccagggcccttacactgctatgctccagaacttcaaagggaaggtcattgtcatcgtggggcatgtggcaaaacacacagctgagtttgcagctcaccttgtgaagatgaaatatccaagaatctgtattctagatggtggcattaataaaataaagccaacaggcctcctcaccatcccatctcctcaaatatgaagaaccaagagtgtgactgccaaaacttagtgtggcatcagcaccaacagcacagttcttcatatccacgccactctcagacaaaactagatgtccagattgttgcatttccgtaaagtttgtcacgagacattttttaaaatctcataacccacatgttcagttatccatgcaagaaacttgactctacatgtattgctgaaagaattttcttaacagtgaaatctgatcatatatttttaccacactgccacataaagcccaagaaattcagctgacaagacagatttagcattatcaagaaatcccatttgccctgaaaaagctgtcctccattgtactgaacagacagtcctgtcgattgtgttatttagaaacatacactgaatgtgggctgaaatcatcatctttccataatgaaaactgagaaactattcacaatgcattccttataaataaatgctacatttagtaactcatttcacccaaacaagaaaaaaaaaaaaaaaa

SEQ ID NO: 955 - DNA, 1400 bp, Homo sapiens
ggaagaggatctgaaccagaagaagcgggagcaggagatgttcttcaagctgagcgaggaggcggagtgcccaaacccctccaccccaagcaaggccgccaagttcttcccctacagytctgsggatgcttcytaacaaccgcccggggctgtggctggcagcttggtgggccccagggccttctccttcattctctgtgaacatgtaactcaggaccccttttccctcttgcgtctgtgccagctcaaatccagcccctcgccctgtgccaccccaactgtgcctgatagacctgccccagcgttcctgacttcttgctggcctgtggagggtgaggtgtaattatttgtcacctgaacctaatgtatattctccttgagccccagatcccttcaagctggaagggatggggctgttggtggggtcagggtccaagaggaatgggtgttctgtggcctcgagtcctctcctgtttgcgaaaataccagttttgctctctgtgggacaaagcactgctgatgaagtccccgtgggctcatccgggctggaattcttggtttttcagccattccctgcagagtcactcaatcatcaagtccctcacagccatttctgttcccagaggagccaggcctgcagctggctgctcaggagatggcctcattcctcctgttctcccagtttgctttccacttaagacaaagccttgtctatgtggggggcggggaccggggaaagagggaggctgaaatgtttattctgcttctcccgtgtttcatgccatctcgcgtcccccttcctgcacatgggtgtgaatgcacacacatacgcgtacacacaggacttggtctgctggcctggcctcttctgcccaggtgggttggaacacgtttgctgcctgagcctgtgccactgagcatgttaggtggagcagttggtgtggcacgtgcggggtgttggcaccggaggcatggaaaagcacaggctgtactgccaggctgcgatgcgtgctggcccccgcacaggctcctgtgtgcagggactgattcctcagcacacgaggcttccacaacccagtctgctccatagcactctggcccaccctgtctgcaggtgaaacaggagggctgtttgcctctgccccatccccccgactgtgttcaggagtcccaccttgcatttcagacctgggctggcagtctgttggacttctcttcaggaagaaaaagcatcagggggaaatggaatgcccctgccccaggaacatggcagaagcacaggttctgtacctcagatggactcctgctgggccttcggggtctcagttggcttcccccagattctgattctacagctgcagaatgtatataacgcaataaaagcaaatgtttgaaccagt

SEQ ID NO: 956 - DNA, 600 bp, Homo sapiens
gcccatctgtaaaggggcagctgacagtttgtggcatcttgccaagggtccctgtgtgtgtgtatgtgtgtgcatgtgtgcgtgtctccatgtgcgtccatatttaacatgtaaaaatgtcccccccgctccgtcccccaaacatgttgtacatttcaccatggccccctcatcatagcaataacattcccactgccaggggttcttgagccagccaggccctgccagtggggaaggaggccaagcagtgcctgcctatgaaatttcaacttttcctttcatacgtctttattacccaagtcttctcccgtccattccagtcaaatctgggctcactcaccccagcgagctctcaaatccctctccaactgcctaaggccctttgtgtaaggtgtcttaatactgtcctttttttttttttaacagtgttttgtagatttcagatgactatgcagaggcctgggggacccctggctctgggccgggcctggggctccgaaattccaaggcccagacttgcggggggtgggggggtatccagaattggttgtaaatactttgcatattgtctgattaaacacaaacagacctcagaatctg

SEQ ID NO: 957 - DNA, 600 bp, Homo sapiens
ctgcaacacctgcggcctcactgggacccccaggaggtgaccctgcagctcttcacagatggaatcacaaataaacttattggctgttacgtgggaaacaccatggaggatgtagtcctggtgagaatttatggcaataagactgagttattagtcgatcgagatgaggaagtaaagagttttcgagtgttgcaggctcatgggtgtgcaccacaactctactgtaccttcaataatggactatgctatgaatttatacaaggagaagcactggatccaaagcatgtctgcaacccagccattttcagtttatcatcgttgactctttgcaaaggaaaaactacaagatgttttggattaaccggctgcagagggtcaaggcttctgcttagttttttctagttagtgtttgagttgaagtgttatacatttcttactgccgattgcttattacttaattgttcatgttttcagagttcttgcctattaaaattttattaatttggktaacaattctttgttctttacgttgttcattatttaatttaatatattatgttttctataaagaataatgtcatatatgcttgatcatttttg

SEQ ID NO: 958 - DNA, 600 bp, Homo sapiens; identical to SEQ ID NO: 957

SEQ ID NO: 959 - DNA, 600 bp, Homo sapiens
tcacaggtagcaagaggtacttttacctggctccaaatctgtgttctttccactgacaaatgagatatgggatatggtgcatctttacagtactataataagtattggcgtataacattattttcaaggaactccaagggccacaggagctgacaggtttttcaattaatattcccaacatgaatgagatgcctcattcctcagtttcctcacgtgtactataaggctagtacctgctttgttggggtatggttggctcgtgtgcattaagtcaacaaatccctagttgatagggtttggctgtgtccccatccaaatctcatcttgaattgttcccgtaatccccacgtgacatgggagggacccagtgggaggtaatttaatcctcggggcggctacctccgtgctgttctcgtgatagcgagtgagttctcacgagatctgatggttttataaggggcttttccctcttgttcggcacttcctgctgccacgtggagaagggtgtgtttgtttccccatctgccatgattataagttttctgaggcatccccagccatgctgaactgtgagttattaaacttttcctttataaatta

SEQ ID NO: 960 - DNA, 1400 bp, Homo sapiens
gaaggaaatgatccgccaccctgagggtggtgatggtagtttctacccatacctcagcctcaggcgagtggcttatagcctccattcatggtgcactttatttatggtactaagataaagactgtcaatccattgatttatctcctcctgtcccccatctaaaatacccatgctgcttttctgagtgttgatgggggttaccagcttgatccactgttgctcttagaaggcccagaaagtctttgggcattgccaagaaatcccgrattatgtggaaaaccctcactttctcttcacggctgtaccagaaaatccctaagacagatcttgccgtggactagcaatacctgcaagtgctgccaatgggaactcaatttattcctgggaacctaacgaggagagcccaggcctaggcaggaggcctggaaccctcttggctaaggtgctgttcctgttcctgcaaggtctccagaacccctttggaaatggtgaaggaaccagcccaatagaagtacagagccagctgacaaktccttgtaaagctcactcctcagtccttggcacagccatgttttgtcttctctcttggtatttcttctctcccaactttagccattttgccttggaatcatgattacaattttttcctttgcagatgccttcctgggggatactcctccccaccctaaagggtcgcctgcaacttaggcggattgggtctctctgctgtggcgttctctcttgagagaccctctgaattttagcacaaagtgccttctgtttcacagctgccaccacctttagaggaatttcgtcagaaaaatgtggaggctccatattaatgcattattttttaaaaagttttgataactcttaaagcatcatttgcacctatgtgggaactttgcctgttgcaaagtattgtggccgagctgcagctgggagcctgctttctgccagtcttgaggttctgaagatcagctttgaaaggaaagtatgtcctagcttagccattcagaagagaaaaatggratatcagagttacagttgtcagtgaaactactttggattttaacctcttagaggaagaaaaaaggttaggraagtgtcaactctgkawgaakgkgwtgygttwgcytmtcagtctttcattcatagcctgctagtgaaaaggaagtaaatgagattcttttgtgtgactttgtagtctctttgtattaccaaatagttggggtgttgactcctgtgtgttttgcaagaatgtgtggtaagcctgggtaaagagaaggaactgcggtgttgggagagtctttgtgttggggagtggcaggggatgatttgtttcaggggaaaatgcccacattttaacttttaaacttctgaataaactgtgtaaaaac

SEQ ID NO: 961 - DNA, 1400 bp, Homo sapiens; identical to SEQ ID NO: 960

SEQ ID NO: 962 - DNA, 600 bp, Homo sapiens
gaactggggttcttattactatggaaacagccatgtgtctcattgaatgcaatcagccagtttatccactagatattgtaagaacaatgagagatcagcgagccatgatgatccaaacacctagtcaatacagatttgtatgtgaagctattttgaaagtttatgaagaaggctttgttaaacccttaacaacatcaacaaataaataagaaagcaaaaagatctgggatatgtgttggaaaactgctttcccttatgttcactgtgccataatgctgctcgcaggaaatggcattttacaaaaaaaaaatgaagaactcaaaaaaactttgaaaacttcagcactgttgcactttatgttttaaaaaatgtcactctttcaaaatctataactcatgtatttgaagactgtttcatgctttgctccgaacaaatagtaaataactgagtatgttcagggtaatttatgaaattttgtggtggtgccatgcaatccccttttggtagaattgccacaaacaaggctcaaaattctcatcatctctgttatacacctgtatcatgaaagcaaaaagaagtaaacatcaggagtcagctctg

SEQ ID NO: 963 - DNA, 600 bp, Homo sapiens; identical to SEQ ID NO: 962

SEQ ID NO: 964 - DNA, 1400 bp, Homo sapiens
tgacgctggaagacaaagaactgggctctggtaattttggaactgtgaaaaagggctactaccaaatgaaaaaagttgtgaaaaccgtggctgtgaaaatactgaaaaacgaggccaatgaccccgctcttaaagatgagttattagcagaagcaaatgtcatgcagcagctggacaacccgtacatcgtgcggatgatcgggatatgcgaggccgagtcctggatgctggttatggagatggcagaacttggtcccctcaataagtatttgcagcagaacagacatgtcaaggataagaacatcatagaactggttcatcaggtttccatgggcatgaagtacttggaggagagcaattttgtgcacagagatctggctgcaagaaatgtgttgctagttacccaacattacgccaagatcagtgatttcggactttccaaagcactgcgtgctgatgaaaactactacaaggcccagacccatggaaagtggcctgtcaagtggtacgctccggaatgcatcaactactacaagttctccagcaaaagcgatgtctggagctttggagtgttgatgtgggaagcattctcctatgggcagaagccatatcgagggatgaaaggaagtgaagtcaccgctatgttagagaaaggagagcggatggggtgccctgcagggtgtccaagagagatgtacgatctcatgaatctgtgctggacatacgatgtggaaaacaggcccggattcgcagcagtggaactgcggctgcgcaattactactatgacgtggtgaactaaccgctcccgcacctgtcggtggctgcctttgatcacaggagcaatcacaggaaaatgtatccagaggaattgattgtcagccacctccctctgccagtcgggagagccaggcttggatggaacatgcccacaacttgtcacccaaagcctgtcccaggactcaccctccacaaagcaaaggcagtcccgggagaaaagacggatggcaggatccaaggggctagctggatttgtttgttttcttgtctgtgtgattttcatacaggttatttttacgatctgtttccaaatccctttcatgtctttccacttctctgggtcccggggtgcatttgttactcatcgggcccagggacattgcagagtggcctagagcactctcaccccaagcggccttttccaaatgcccaaggatgccttagcatgtgactcctgaagggaaggcaaaggcagaggaatttggctgcttctacggccatgagactgatccctggccactgaaaagctttcctgacaataaaaatgttttgaggctttaaaaagaaaawmaarwwtgaccagtgcagtttctaagcatgtagccagttaaggaaagaaaga

SEQ ID NO: 965 - DNA, 600 bp, Homo sapiens
gccttcagatgcagcagtaagtagcaacgccactccttctcagtcttcatcgatcaatgacatttcatccatgtccactgagcagacgctggcctcagacacagacagcagtcttgatgcctcgacgggaccccttgaaggctgtcgatgataggttagaaatagcaaacctgtcagcattgaaggaactctcacctccgtgggcctgaaatgcttgggagttgatggaaccaaatagaaaaactccatgttctgcatgtaagaaacacaatgccttgccctaytcagacctgataggattgcctgcttagatgataaaatgaggcagaayatgtctgaagaaaaaaattgcaagccacacttctagagattttgttcaagatcatttcaggtgagcagttagagtaggtgaatttgtttcaaattgtactagtgacagtttctcatcatctgtaactgttgagatgtatgtgcatgtgaccacaaatgcttgcttggacttgcccatctagcactttggaaatcagtatttaaatgccaaataatcttccaggtagtgctgcttctgaagttatctctyaatcctcttaagtaatttgg

SEQ ID NO: 966 - DNA, 600 bp, Homo sapiens; identical to SEQ ID NO: 965

SEQ ID NO: 967 - DNA, 1400 bp, Homo sapiens
acactggccactcctctgcttcctctgttggccccagatggacagtaaggggaacctccaatgtctctctgaacttaaagacaggagctggcatttatgacagacaaagaaagaagcccaggtgtcctggtgttctctgagacactctttgtgagcttcagtttcctgttctataacatgaacataagtgcttagctgccatgagggaaaagtaatgagagaagtttctagaagccactccagccactccttcctggggctgacaaaagggtgattccaagatcatccttcacccgaggtcctgcccaagcacaggccagatgcaagaatggggaaaagtctggtcctgatctccaagtctcaacatcctatcagtgactctgctccctgaccacacatcggaagggctggatgaccccaatcaaaagaaagaacaaggactctggttacccttgcctccacccatgtgtcataagagtaggctacagaggtgaccaggcctggcagttgaaatctctggaagagggaacatgtggggactactcagaggcaaagaggagctgctcctgcctccatggttgctggccactcccaccaactactcttagggaggctaagcagtctctgttttgcttccatggctcaaataataccctgggtatgcaggacccactataccttgcatttgctgagtacacctagagagcttggctgtttccaaaaacaatcagggtcataaccatccatgcagacatggaggctcggctgaaccaggactcctcactgtctacctgagagaatgagcacccctcatccatctcagcatcaacacaatttccaggggacctcaggtctacctcaggactgaacgccacacctcaggattcctcctccttgaatctgagactggctgcccattctgagatggggatgaaggtaagatgccgcatcaccaggcacgccgcccctgacagctgccttgataccagctctctgtggaaacccccgaggagttggatctggagaacagctgggcctcctcactcaggacttctctcctgaagaacacgcagtgctaaaactgaggatgatttccctaatgcttctgcttggccttatggaggagctgctccttccttacagccttggggatggacttgcccacacctccacctcccctgagccctgtgagaggcacgactgtctatgccaatgaggctcggtggggggctctcaagtgcctgatcctgccctgggctcagagccagcccagagggaagcaactgcacagccccacaggccctccctggcactgtccccccaaccccatctcagagctcagagggtacaagctccagaacagtaaccaagtgggaaaataaagacttcttggatgactg

SEQ ID NO: 968 - DNA, 1400 bp, Homo sapiens
  misc_feature (1347)..(1347): n is a, c, g, or t
cagcttccttttcggcctttccaccagccagcagcacctcacgaagtctgctggcctgggccttaagggctggcactcggatatcttggccccccagacctctaccccttccctgaccagcagctggtattttgccacagagtcctcacacttctactctgcctcagccatctacggaggcagtgccagttactctgcctacagctgcagccagctgcccacttgcggagaccaagtctattctgtgcgcaggcggcagaagccaagtgacagagctgactcgcggcggagctggcatgaagagagcccctttgaaaagcagtttaaacgcagaagctgccaaatggaatttggagagagcatcatgtcagagaacaggtcacgggaagagctggggaaagtgggcagtcagtctagcttttcgggcagcatggaaatcattgaggtctcctgagaagaaagacacttgtgacttctatagacaatttttttttcttgttcacaaaaaaattccctgtaaatctgaaatatatatatgtacatacmtatatatttttggaaaatggagctatggtgtaaaagcaacaggtggatcaacccagttgttactctcttaacatctgcatttgagagatcagctaatacttctctcaacaaaaatggaagggcagatgctagaatcccccctagacggaggaaaaccattttattcagtgaattacacatcctcttgttcttaaaaaagcaagtgtctttggtgttggaggacaaaatcccctaccattttcacgttgtgctactaagagatctcaaatattagtctttgtccggacccttccatagtacaccttagcgctgagactgagccagcttgggggtcaggtaggtagaccctgttagggacagagcctagtggtaaatccaagagaaatgatcctatccaaagctgattcacaaacccacgctcacctgacagccgagggacacgagcatcactctgctggacggaccattaggggccttgccaaggtctaccttagagcaaacccagtacctcagacaggaaagtcggggctttgaccactaccatatctggtagcccattttctaggcattgtgaataggtaggtagctagtcacacttttcagaccaattcaaactgtctatgcacaaaattcccgtgggcctagatggagataatttttttttcttctcagctttatgaagagaagggaaactgtctaggattcagctgaaccaccaggaacctggcaacatcacgatttaagctaaggttgggaggctaacgagtctacctccctctttgtaaatcaaagaattgtttnaaatgggattgtcaatcctttaaataaagatgaacttggtttcaaaaaaaaaa

SEQ ID NO: 969 - DNA, 600 bp, Homo sapiens
gtgccttcttctgcgtttgtccctcctgccatgtgtaagttgtaaggattgcctttgtagttaatgtactctttggctttgtttgtttgttttcttcttcagtgaagcagccttactattcatagaagggctagaataggagaaaatgaaaggtagtgagtaattctttgataagatgaggaaataatgggaaaggttgaattaattcctgggcatggactaccagatgaccacaagttgcgttgaggccgcatctttcttcagcagcgtgcaatagctggctcctctataggagatgagcttcattgggagttcctagcaagttgactaaacagcaaaagttctttctcgtgggtaaatatacccacaggttctatgatttgtagctctaggtttcttgatgatcaaggagtgaagtaattgacagggaaaatatagacctatgataaataaccaggaagcattgcttttggacaaggaagracagagggttttgattttaaaaagaagaaaaaaaaaccttattttttctttcttggcctcaagttcaatatggagaggattgcttccctgaatcctctcttccttccccttttagag

SEQ ID NO: 970 - DNA, 600 bp, Homo sapiens; identical to SEQ ID NO: 969

SEQ ID NO: 971 - DNA, 1400 bp, Homo sapiens
gtcccaaatgactgtaagccagacttgaagcatgtcaaaaaggtgtacagctgtgaccttacgacgctcgtgaaagcacataccactaagcggccaatggtggtagacatgtgcatcagggagattgagtctagaggtcttaattctgaaggactataccgagtatcaggatttagtgacctaattgaagatgtcaagatggctttcgacagagatggtgagaaggcagatatttctgtgaacatgtatgaagatatcaacattatcactggtgcacttaaactgtacttcagggatttgccaattccactcattacatatgatgcctaccctaagtttatagaatctgccaaaattatggatccggatgagcaattggaaacccttcatgaagcactgaaactactgccacctgctcactgcgaaaccctccggtacctcatggcacatctaaagaggcaagctatagactttgaagtgaccctccacgaaaaggagaatcttatgaatgcagagaaccttggaatcgtctttggacccacccttatgagatctccagaactagacgccatggctgcattgaatgatatacggtatcagagactggtggtggagctgcttatcaaaaacgaagacattttattttaaatttttaatttgaggggaaaagaaatgttttacagatgaaggaatgttttatagtaatttaatttgctcctgtagctgcattatttcttgattagaggtttgggcatataaccagattaaagtgaaggaactttctgttgtttttgtagcaccgctcagctgtcttgtaaaacagtgaacacacgctttctggttctagtaatcctgggtgtttatcacgttcagagaaactcaagctattgcatgattagccccctatctggcaaggaaaccccatacagaagaaacaacaaacctgcgcctgcaccgcctctgcgtcctgggtagtctgtgcttgtaatccagcatgtttcacagagtaagcctgttgtgactttgcttttggggtctatgtcattggtttctgatgcttgtacaaacacgcacacacaaatggataaaacagcacctctggctgttacattaccataaaccatatcacatgcctacattttacaaatgatttctggtttctcttagttcttctctaacatagtactttctttccagcaaaagcaaaatgtgttttcagatttgttactttaataaaggttatccataccaataaaaagtgtacaacacagcattttctgttaaattattattggttttcagttgtaatttggtattttttctggcatgcgtttattaatttattaaattggcttttagaaataaaaaatattgatagcttacttttttctcataagaat

SEQ ID NO: 972 - DNA, 600 bp, Homo sapiens
tgggaggttacctttctacaaccaggaccatgagaaactttttgaattaatattaatggaagacattaaatttcctcgaacactctcttcagatgcaaaatcattgctttcagggctcttgataaaggatccaaataaacgccttggtggaggaccagatgatgcaaaagaaattatgagacacagtttcttctctggagtaaactggcaagatgtatatgataaaaagcttgtacctccttttaaacctcaagtaacatctgagacagatactagatattttgatgaagaatttacagctcagactattacaataacaccacctgaaaaatgtcagcaatcagattgtggcatgctgggtaactggaaaaaataataaaaatmrgcttycwayagcyarmarmamarwmammmawrraamwrttggctttggattaaatgtggaattgaacgactacccagaagtgttctggaaagaagcgagatgtgtggcctgcctcaccgtcctcacccatcaaaagcaccagcaggcacgttaactcgaattctcacaaggaaaaggccattaaagctcaaggtgcatttcaaactccaggctac

SEQ ID NO: 973 - DNA, 600 bp, Homo sapiens; identical to SEQ ID NO: 972

SEQ ID NO: 974 - DNA, 600 bp, Homo sapiens
acagggacacagcccctatttggaaccctgatcatcaccagaccctgggattggctatgggaaagcatgccacagccactcgccttcctacccccgcccgccatccccagttgcagggggatctggggactaccagagactctgggaaatggacaaggtggggggccccactctttctctcctgcagtcccgtagctggggcctccttccttctcagggtctccccagcccagtccccttgctcccatcccactcggtgctgttgggtaggggccctgccaggaactgaccagctcagcgaggagccataatgtgcatatgtgcacaagcagggttgggggaggggggtgtgaggggttgtgcccaggtgttgccccctatctcctggggagggtgaggcagggcagggacagtctccagggtcagtccctggatgggtggttacctccccttcctccaccctaagccctggggccctgaaatggggtgggagggcaggggtgggagccctcctagtgggtttggggggttgggttcctgaatgcaccataatcgctgtatgaaatattaaaaagtctaaagtgaaaaaaaaaaaaaaaa

SEQ ID NO: 975 - DNA, 600 bp, Homo sapiens
cgaatccgcttcccaagaggcactgccagtcgtagcactttccacggccagccccgggaacggcgaaccgcaacatataatggccctcctgcctctcccagcctgtcccatgaagccacaccattgtcccagactcgaagccgaggctccactaatctctttagtaaattaacttcaaaactcacaaggaggcttccaactgaatatgagaggaacgggagatatgagggctcaagtcgcaatgtatctgctgagcaaaaagatgaaaacaaagaagcaaagcctcgatccctacgcttcacctggagcatgaaaaccactagttcaatggatcccggggacatgatgcgggaaatccgcaaagtgttggacgccaataactgcgactatgagcagagggagcgcttcttgctcttctgcgtccacggagatgggcacgcggagaacctcgtgcagtgggaaatggaagtgtgcaagctgccaagactgtctctgaacggggtccggtttaagcggatatcggggacatccatagccttcaaaaatattgcttccaaaattgccaatgagctaaagctgtaacccagtgattatgatgta

SEQ ID NO: 976 - DNA, 1400 bp, Homo sapiens
caactgaacccatcatcaccacagccactcctgcagctgccacggtttctgccacctctaagatgtgccctggtaactggctttgggcttctatgacttttatggcycgcttctcccggagtagctcaaggtctcctgttcgaactcgagggaccctggaggagatgccaaccgttcaacatcctttcctcaatgtcttcgagttggagcggctcctctacacaggcaagacagcctgtaaccatgccgacgaggtctggccaggcctctatctcggagaccaggacatggctaacaaccgccgggagcttcgccgcctgggcatcacgcacgtcctcaatgcctcacacagccggtggcgaggcacgcccgaggcctatgaggggctgggcatccgctacctgggtgttgaggcccacgactcgccagcctttgacatgagcatccacttccagacggctgccgacttcatccaccgggcgctgagccagccaggagggaagatcctggtgcattgtgctgtgggcgtgagccgatccgccaccctggtactggcmtacctcatgctgtaccaccaccttaccctcgtggaggccatcaagaaagtcaaagaccaccgaggcatcatccccaaccggggcttcctgaggcagctcctggccctggaccgcaggctgcggcagggtctggaagcatgaggggagggggagagaggtcaggccaggcccgtgggtaggtccctggctcccagctggagataggaggcccaggtggcaggtagcaggaggcccagatcacccatcctcccctggggtcaggagaggccgagccccaggccactgtcactctttgygggaggggacggggagtgaggttgggcagtgtggtggatgggcacccaggaagggttgaccagggaaggaggcagctaggctgtagatggaagatggtcctgggattcgaacaccgctgggatctggcyagggtgctccctgggattcacagtcccttcccctctttgtgcccaagtgtttccctctctccctcaccaaaacaaaagggccatctctgccctgcacttgtgcagaaagtcagggatacggcaagcatgaatgcaatggtgtagagttgtgtgaaacccctagcatagagacagacagcgaagagatggtgtgaaaagcttgcagaaccagacagagaaccccacagactttccactccaagcacaggaggaggtagctagcgtgtgagggttggcactaggcccacggctgctgcttgggccaaaaacatacagaggtgcatggctggcagtcttgaaattgtcactcgcttactggatccaagygtctcgaggataaataaagatcatgaaaaasaaaaaaaaaaaaaaaaaaaaa

SEQ ID NO: 977 - DNA, 600 bp, Homo sapiens
catgtggagcactggcgtcatcatgtacacgctgctggccgctccccgcccttctggcaccggaagcagatgctgatgctgaggatgatcatgagcggcaactaccagtttggctcgcccgagtgggatgattactcggacaccgtgaaggacctggtctcccgattcctggtggtgcaaccccagaaccgctacacagcggaagaggccttggcacaccccttcttccagcagtacttggtggaggaagtgcggcacttcagcccccgggggaagttcaaggtgatcgctctgaccgtgctggcttcagtgcggatctactaccagtaccgccgggtgaagcctgtgacccgggagatcgtcatccgagacccctatgccctccggcctctgcgccggctcatcgacgcctacgctttccgaatctatggccactgggtgaagaaggggcagcagcagaaccgggcagcccttttcgagaacacacccaaggccgtgctcctctccctggccgaggaggactactgaggggctggccagtcagggagggctagggggcaggtggggaggggaagccatggaaatacaagtcaaaggggt

SEQ ID NO: 978 - DNA, 600 bp, Homo sapiens
cactcagaaggggccacggcctcctggctgtgttcctgagcccccgtcgtgcctctcccagacagcagctgtctggcccttgctgggtgagggcacaccactgccaggggtcagcctcgcacccaggccaggcagaagctgtgctctgaagctaggacagctggctgagaagtgggttcaggcgaagggtgaagccatgtgtagcagttcctgccagtgcagatctggagaggagctggcccggaaggcgtggttgtgaaagcgcccttcttatgttaggaggccttggcaaaattggatttcttcaaaaatacatgtaaaggtctgttgttgaattgtactctgcccctggaagcagatacagatggctgcctgctgctcggctttgcttttgcttttcccaccgtgttttcatctttgttcacttgaggctttccccagctggtgtgtgcaggacagttcatggtaatgttgccctctgaggccccgtacaccagaagggaggccctggaaaattttgtgcttccaacgtggccttcaattcttgcttttttgcccctcggaagcatggggcttttgagcacacttaaaaaaagaaaa

SEQ ID NO: 979 - DNA, 600 bp, Homo sapiens; identical to SEQ ID NO: 978

SEQ ID NO: 980 - DNA, 600 bp, Homo sapiens
cccagtacaggggtatcctggaagcctccttggagctcttcaaattcaccatcggcatgggcgagctggccttccaggagcagctgcacttccgcggcatggtgctgctgctgctgctggcctacgtgctgctcacctacatcctgctgctcaacatgctcatcgccctcatgagcgagaccgtcaacagtgtcgccactgacagctggagcatctggaagctgcagaaagccatctctgtcctggagatggagaatggctattggtggtgcaggaagaagcagcgggcaggtgtgatgctgaccgttggcactaagccagatggcagccccgatgagcgctggtgcttcagggtggaggaggtgaactgggcttcatgggagcagacgctgcctacgctgtgtgaggacccgtcaggggcaggtgtccctcgaactctcgagaaccctgtcctggcttcccctcccaaggaggatgaggatggtgcctctgaggaaaactatgtgcccgtccagctcctccagtccaactgatggcccagatgcagcaggaggccagaggacagagcagaggatctttccaaccacatctgctggctct

SEQ ID NO: 981 - DNA, 600 bp, Homo sapiens; identical to SEQ ID NO: 980

SEQ ID NO: 982 - DNA, 1400 bp, Homo sapiens
gcttcacctaccacaatgtgcgcctctgggatgaggagtcggcccagctgctgccgcactggaaggagacgcaccgcttcattgaggctgcaagagcacagggcacccacgtgctggtccactgcaagatgggcgtcagccgctcagcggccacagtgctggcctatgccatgaagcagtacgaatgcagcctgragcaggccctgcgccacgtgcaggagctccggcccatcgcccgccccaaccctggcttcctgcgccagctgcagatctaccagggcatcctgacggccagaacctgagggtggtggggaggagaaggttgtaggcatggaagagagccaggcagccccgaaagaagagcctgggccacggccacgtataaacctccgaggggtcatgaggtccatcagtcttctggagccctccttggagctggagagcacctcagagaccagtgacatgccagaggtcttctcttcccacgagtcttcacatgaagagcctctgcagcccttcccacagcttgcaaggaccaagggaggccagcaggtggacagggggcctcagcctgccctgaagtcccgccagtcagtggttaccctccagggcagtgccgtggtggccaaccggacccaggccttccaggagcaggagcaggggcaggggcaggggcagggagagccctgcatttcctctacgcccaggttccggaaggtggtgagacaggccagcgtgcatgacagtggagaggagggcgaggcctgagccctcacacatgcccacgctcccctgacactgaagaggatccacaactccttggagaaacaccctcacgtctgttgccgcacacattcctctcagctccgccccatacccgtcactacagcctcacctcccacccctgtcactacggcctcacctcccacccctgtcactacagcctcacctcctacagccttaagtcccaggcccatgtctgcctgtccaagggctcaagactttctaactgggatgtggtagagggactgaaggtacctttgggggcaacagcaccctagtttcattctcaactctagccctgcacctcctgtcctctcccagttcattcctggaaccagccaggccaggcaaccagtggcccccaaaggcaggcaggatcctcaggccccagccgcgggaggctggaagggctggcagatcgcttccctcatccacctccaccggtccaggtctttgctgctgtccccagacctcctgtgacaccacgccagatcacagggcaccaggccagagatagtcttctttttgtcctttctggcctctggctagtcagtttttcatagccttacagtatctggctttgtactgagaaataaaacacattttcatatttggtt

SEQ ID NO: 983 - DNA, 1400 bp, Homo sapiens; identical to SEQ ID NO: 982

SEQ ID NO: 984 - DNA, 600 bp, Homo sapiens
cccagagatcatcctgaacaaaggccatgacatttcagccgactactggtcactgggaatcctaatgtatgaactcctgactggcagcccacctttctcaggcccagatcctatgaaaacctataacatcatattgagggggattgacatgatagaatttccaaagaagattgccaaaaatgctgctaatttaattaaaaaactatgcagggacaatccatcagaaagattagggaatttgaaaaatggagtaaaagacattcaaaagcacaaatggtttgagggctttaactgggaaggcttaagaaaaggtaccttgacacctcctataataccaagtgttgcatcacccacagacacaagtaattttgacagtttccctgaggacaacgatgaaccaccacctgatgacaactcaggatgggatatagacttctaatgtatttctcttacctgcttctgccttgctgaagacagctttttctgagacacagctgccagcaaacctgagggaaagagagaagattagtgctcggggtcaccatgatgcctttgatcgatgctgctccagtaactacagtggcattaggacttaccgct

SEQ ID NO: 985 - DNA, 1400 bp, Homo sapiens
  misc_feature (1399)..(1399): n is a, c, g, or t
aggtggcggccactcccatggccttgtctaggactcagagaccactcggctctgagcttccaggcgcctcgtctgtgtgcatctcacgcccgacgtggcttctgaaacgtgcattcaacctcaaacttttgcataaaatagaatgaatcgttttgctctgatgaaatgtaggccttacttgtatataagactgttcctgccttcggtctgtcattttcccacctgcctcccctacccaccccccacccaccacctggggcttcctctgggggtccgagggtcttcccatcacatgaagacatcaggttgggtcctgccccactgcccctccccctgttcctgccccaagccgtcaatcagattgtggagcagtacacagtcagatgaaaatactgtaaatgcactcattgggggttttttggttttacttcatatcatgtgcaatgttgtggctttaacattttatgcaactatttatgaagacctctgttgtacctgtaataaatatatagaaaaagcacatacttcgtatggtgagctttatggttttgtgtgtgtgttggggttggcgggtgggtgggtagggtcgtagccctgtgccatcggttcaaagagacttttcgtgaaatttgttggttttgaggactgtaaaagtgatttcatactctgaatataaaactggataatagggtaatgttttaaaatttattatgctattattcagaatgccaaagtattattttttttcccaaaatcagtctggacatttactactttttagactttttgacgttgaactttctgtataaaaattggctgggttttgagcttttggtaagaaataaaagccgattaagcactggccgccccgcggctggtacccaatgcccgagtcactgtggcagcattcgcactggtgtggggagtcctttcaactcaaggaggctgggtttctgggcaccctcgaagttttctggatgtctttttatctttctcgtgtgaactgcactacaaaagagaccagcccgcttcccaagccagccagacacctgggtcttgagccataaactggcgtagttaagctttgcagcttccagtgtattttatttattcttttgttgggtttttgtttgtttcttcttgtaaaattgtacagaaactttttaaaagaaattggattcgaaactggatgtgtattcgtaacctcataatttttatttgtgtattgtttcttttattatttcagttaaatttttacattattttgcatgtatatttctttgtacagagaccttacatgtttacacagtatgatgtgatgtaaatattttattttgccatcagttattttaaaaaattaaacatatttgcctgaaaaaaaaaaaaaaaggggggcgcnc

SEQ ID NO: 986 - DNA, 1400 bp, Homo sapiens
agttctttccttggcctgggagcatccgtttctgacgcacatgttttgtacattycagaccaaggaaaacctcttttttgtgatggagtacctcaacggaggggacttaatgtaccacatccaaagctgccacaagttcgacctttccagagcgacgttttatgctgctgaaatcattcttggtctgcagttccttcattccaaaggaatagtctacagggacctgaagctagataacatcctgttagacaaagatggacatatcaagatcgcggattttggaatgtgcaaggagaacatgttaggagatgccaagacgaataccttctgtgggacacctgactacatcgccccagagatcttgctgggtcagaaatacaaccactctgtggactggtggtccttcggggttctcctttatgaaatgctgattggtcagtcgcctttccacgggcaggatgaggaggagctcttccactccatccgcatggacaatcccttttacccacggtggctggagaaggaagcaaaggaccttctggtgaagctcttcgtgcgagaacctgagaagaggctgggcgtgaggggagacatccgccagcaccctttgtttcgggagatcaactgggaggaacttgaacggaaggagattgacccaccgttccggccgaaagtgaaatcaccatttgactgcagcaatttcgacaaagaattcttaaacgagaagccccggctgtcatttgccgacagagcactgatcaacagcatggaccagaatatgttcaggaacttttccttcatgaaccccsggatggagcggctgatatcctgaatcttgcccctccagagacaggaaagaatttgccttstccctgggaactggttcaagagacactgcttgggttcctttttcaacttggaaaaagaaagaaacactcaacaataaagactgagacccgttcgcccccatgtgacttttatctgtagcagaaaccaagtctacttcactaatgacgatgccgtgtgtctcgtctcctgacatgtctcacagacgctcctgaagttaggtcattactaaccatagttatttacttgaaagatgggtctccgcacttggaaaggtttcaagacttgatactgcaataaattatggctcttcacctgggcgccaactgctgatcaaygaaatgcttgttgaatcaggggcaaacggagtacagacgtctcaagactgaaacggccccattgcctggtctagtagcggatctcactcagccgcagacaagtaatcactaacccgttttattctattcctatctgtggatgkrtaaatggctggggggccagccctggataggtttttatgggaattctttacaataaacatagcttgtaacttg

SEQ ID NO: 987 - DNA, 1292 bp, Homo sapiens
gaagcggtgaaaaaagattcagagttggataagcacttggaatcacgggttgaagagattatggagaagtctggcgaggaaggaatgcctgatcttgcccatgtcatgcgcatcttgtctgcagaaaatatcccaaatttgcctcctgggggaggtcttgctggcaagcgtaatgttattgaagctgtttatagtagactgaatccacatagagaaagtgatggggcctccgatgaagcagaggaaagtggatcacagggaaaattggtggaagctctcaggcaaatgagaattaatcataggggaaactaccgacaacttctggaggagatgctgactagttacaggctagctaaagtagagggagaagaaagccctgctgaaccagctgccacagctacttcttcgaacagtgatgctggaaacccagtgacaatgcaggaaagccatactgaatcagaaagtggtcttgctgaattagacagctctaatgaagatgcagggacaaagatgagtggtgaaaaaatatgactttcctttttggtaatatttttgtgatctttgatggtttttaacctaggaagtgtaatgtatgcatttatataactgttttgttatttgaatcttggaaaactagttttattatattcagatagccttgttttttaaaaaggcctttgcatacacctttatgagatagtgtaaaattgactatttatagtactatggatttaatgaaattatatgtcatttcacattgtatgccagaaattaggctaccaattatgaattaaagtcagtagttaaattaatactagatagaattagaaattttgattagagagattatgctatattatggaaaaacttgttaatgtagaattatactgcttcatattattttacctattagtacactcatagttagctttgtaataaatttatgttttctttaataattttagttcttcaaagaatggctgatgctggcctgtaatttttctttcaaggatgataatttgtgtgttgtttgatttgtttatattttacatctctgtagttttatttttagaagttgtgagatattggatgtgtggctatttttcctttctctgtattctttatgaaacataacttttgaaaaacctatgtattattcatacagctttggtttgtatattctgtatagcctaactacacacatcaaaatgtatgtcaaccaagtgtttagaatgaaattataagtgtttaagtccaaataaagcatgtgatgtggaataatcwaaaaaaaa

SEQ ID NO: 988 - DNA, 1292 bp, Homo sapiens; identical to SEQ ID NO: 987

SEQ ID NO: 989 - DNA, 600 bp, Homo sapiens
ccaggaggccacgggccacgggaagaaccaagcggtgccagccacgagacgtcaccaagaaaacatgcaactcaaacgacggaaaaaaaaagggaatgggaaaaaagaaaacagatcctgggagggggcgggaaatacaaggaatattttttaaagaggattctcataaggaaagcaatgactgttcttgcgggggataaaaaagggcttgggagattcatgcgatgtgtccaatcggagacaaaagcagtttctctccaactccctctgggaaggtgacctggccagagccaagaaacactttcagaaaaacaaatgtgaaggggagagacaggggccgcccttggctcctgtccctgctgctcctctaggcctcactcaacaaccaagcgcctggaggacgggacagatggacagacagccaccctgagaacccctctgggaaaatctattcctgccaccactgggcaaacagaagaatttttctgtctttggagagtattttagaaactccaatgaaagacactgtttctcctgttggctcacagggctgaaaggggcttttgtcctcctgggtcagggagaacgcggggaccccag

SEQ ID NO: 990 - DNA, 1400 bp, Homo sapiens
ttcacttctaaaacagacacatggtcctttggagtgctgctatgggaaatcttttctcttggatatatgccataccccagcaaaagcaaccaggaagttctggagtttgtcaccagtggaggccggatggacccacccaagaactgccctgggcctgtataccggataatgactcagtgctggcaacatcagcctgaagacaggcccaactttgccatcattttggagaggattgaatactgcacccaggacccggatgtaatcaacaccgctttgccgatagaatatggtccacttgtggaagaggaagagaaagtgcctgtgaggcccaaggaccctgagggggttcctcctctcctggtctctcaacaggcaaaacgggaggaggagcgcagcccagctgccccaccacctctgcctaccacctcctctggcaaggctgcaaagaaacccacagctgcagagrtctctgttcgagtccctagagggccggccgtggaagggggacacgtgaatatggcattctctcagtccaaccctycttcggagttgcacaaggtccacggatccagaaacaagcccaccagcttgtggaacccaacgtacggctcctggtttacagagaaacccaccaaaaagaataatcctatagcaaagaaggagccacacgacaggggtaacctggggctggagggaagctgtactgtcccacctaacgttgcaactgggagacttccgggggcctcactgctcctagasscctcttcgctgactgccaatatgaaggaggtacctctgttcaggctacgtcacttcccttgtgggaatgtcaattacggctaccagcaacagggcttgcccttagaagccgctactgcccctggagctggtcattacgaggataccattctgaaaagcaagaatagcatgaaccagcctgggccctgagctcggtcgcacactcacttctcttccttgggatccctaagaccgtggaggagagagaggcaatggctccttcacaaaccagagaccaaatgtcacgttttgttttgtgccaacctattttgaagtaccaccaaaaaagctgtattttgaaaatgctttagaaaggttttgagcatgggttcatcctattctttcgaaagaagaaaatatcataaaaatgagtgataaatacaaggcccagatgtggttgcataaggtttttatgcatgtttgttgtatacttccttatgcttctttyaaattgtgtgtgctctgcttcaatstagtcagaattagctgcttctatgtttcatagttggggtcatagatgtttccttgccttgttgatgtggacatgagccatttgaggggagagggaacggaaataaaggagttatttgtaatgactaaaa

SEQ ID NO: 991 - DNA, 600 bp, Homo sapiens
tttgatcatcttcagggcccacaaaaatgttgtcaagattttaaaggtttataattctgcttaagctctagtttggacttaggtatcctaactatgttggaggtatttgcattgtttaaagttaggataaaagcaagttcctcctgtgactgcaacgtcttactgattgggacagttgccaggaggataccaacttgatagcagagggggttttatgcaaacgcactcacctccgccttggggaatgaaagggtcacttctgcatcatcactagctagttttctagtgttagagaggcttacaaatgtttgccattctcataagtgttttgaacttgatctttgtgacttgtgcttttttagcttctctcttgaatcagagtatcattgtcttcctccaaggagttagaatttcccagtttaaaacaaaaagggaaatgtcctaggttttctttgtgcttctcatttttcctttgttgattcaattcctgtgatttttgttctcttccctgaagtgctttacagtgcatggaatctccatcattgttattttaacgatagtaattcacagtcctcagaagcctatttttaaagcagaagc

SEQ ID NO: 992 - DNA, 1372 bp, Homo sapiens
ggcggtcgaaagcggagtgaaagagggaggcagggagccggagagccggaaccggagtcgcagcggcggtaatagagacccctgtgcggtgcggagggggcggcggccccgactctgacccgcgccgggggtgggccatggcggagatcagcgacctggaccggcagatcgagcagctgcgtcgctgcgagctcatcaaggagagcgaagtcaaggccctgtgcgctaaggccagagagatcttggtagaggagagcaacgtgcagagggtggactcgccagtcacagtgtgcggcgacatccatggacaattctatgacctcaaagagctgttcagagtaggtggcgacgtccctgagaccaactacctcttcatgggggactttgtggaccgtggcttctatagcgtcgaaacgttcctcctgctgctggcacttaaggttcgctatcctgatcgcatcacactgatccggggcaaccatgagagtcgccagatcacgcaggtctatggcttctacgatgagtgcctgcgcaagtacggctcggtgactgtgtggcgctactgcactgagatctttgactacctcagcctgtcagccatcatcgatggcaagatcttctgcgtgcacgggggcctctccccctccatccagacctggatcagattcggacaatcgaccgaaagcaagaggtgcctcatgatgggcccatgtgtgacctcctctggtctgacccagaagacaccacaggctggggcgtgagcccccgaggagccggctacctatttggcagtgacgtggtggcccagttcaacgcagccaatgacattgacatgatctgccgtgcccaccaactggtgatggaaggttacaagtggcacttcaatgagacggtgctcactgtgtggtcggcacccaactactgctaccgctgtgggaatgtggcagccatcttggagctggacgagcatctccagaaagatttcatcatctttgaggctgctccccaagagacacggggcatcccctccaagaagcccgtggccgactacttcctgtgaccccgcccggcccctgccccctccaacccttctggccctcgcaccactgtgactctgccatcttcctcagacggaggctgggcgtggggggggctgtcctggctctgctgtcccccaagagggtgcttcgagggtgaggacttctctggagaggcctggagacctagctccatgttcctcctcctctctccccacttgaaccatgaagtttccaataatttttttttctttttttccttcttttttctgtttgtttttagataaaaattttgagaaaaaaaatgaaaaaattctaataaaagaagaaaaatg

SEQ ID NO: 993 - DNA, 600 bp, Homo sapiens
atgggccgctacaggcacagatgcaccctggcatcggtacactgctcactgggcctcctggctgcccggggcgggagccctgaaactaaacaagcttggtacccgccgggggcggggcctacattccaatggggcggagcctgagctagggggtgtggcctggctgctagagttgtggtggcaggggccctggccccgtctcaggattgcgctcgctttcatgggaccagacgtgatgctggaaggtgggcgtcgtcacggttaaagagaaatgggctcgtcccgagggtagtgcctgatcaatgagggcggggcctggcgtctgatctggggccgcccttacggggcagggctcagtcctgacgcttgccacctgctcctacccggccaggatggctgagggcggagtctattttacgcgtcgcccaatgacaggacctggaatgtactggctggggtaggcctcagtgagtcggccggtcagggcccgcagcctcgccccatccactccggtgcctccatttagctggccaatcagcccaggaggggcaggttccccggggccggcgctaggatttgcactaatgttcctctccccgc

SEQ ID NO: 994 - DNA, 600 bp, Homo sapiens; identical to SEQ ID NO: 993

SEQ ID NO: 995 - DNA, 1400 bp, Homo sapiens
tcatgctggatgtagaagaagacagacttgcttcccagggccgagggcctgtggttgtccactgcagtgcaggaataggtagaacagggtgttttattgctacatccattggctgtcaacagctgaaagaagaaggagttgtggatgcactaagcattgtctgccagcttcgtatggatagaggtggaatggtgcaaaccagtgagcagtatgaatttgtgcaccatgctctgtgcctgtatgagagcagactttcagcagagactgtccagtgagtcattgaagacttgtcagaccatcaatctcttggggtgattaatcaaattacccacccaaggcttcwwgaaggagcttcctgcaatggaaggaaggagaagctctgaagcccatgtatggcatggattgtggaagactgggcaacatatttaagatttccagctccttgtgtatatgaatgcatttgtaagcatcccccaaattattctgaaggttttttgatgatggaggtatgataggtttatcacacagcctaaggcagattttgttttgtctgtactgactctatctgccacacagaatgtatgtatgtaatattcagtaataaatgtcatcaggtgatgactggatgagctgctgaagacattcgtattatgtgttagatgctttaatgtttgcaaaatctgtcttgtgaatggactgtcagctgttaaactgttcctgttttgaagtgctattacctttctcagttaccagaatcttgctgctaaagttgcaagtgattgataatggatttttaacagagaagtctttgtttttgaaaaacaaaaatcaaaaacagtaactattttatatggaaatgtgtcttgataatattacctattaaatgtgtatttatagtccctcctatcaaacaattacagagcacaatgattgtcatysggwatwyatgtatggaaagatttactctctattattgggcataaaggtggcttctgctccagaactctatccactgtatttccacatcgtgagtcattttactttaaaagggaaaaacaaatttgtagcaactctgaagtatcaagagtttaactacttgtctctcttttgctaagaagggatttttgatatgctatctacctggaatctctctctcaacaaaaggtatatgccttcaggaatgatataatctgtcccattttcgaggctccttataaggacatttccatgtatgtccttacatttctgaaagctttcaatcttcaagagacaaaaaaaattaaaataactacccttagcaaacactagctgttctgctcatatatgaatttttaatgcagcaatgttgactttgtttcatactgccaataaactcttaatactaaataaaaaaaaaaaaa

SEQ ID NO: 996 - DNA, 1400 bp, Homo sapiens; identical to SEQ ID NO: 995

SEQ ID NO: 997 - DNA, 600 bp, Homo sapiens
ttttactgtcccaaatgtgagattgcaaccagaagctggagaaagcatgcgggcctttgggaaaaacaatagttatggcaaaagtctatcaaacagcaagcactgacaagcagcacattctcaagagcacacaggattaagwkgwcmtcwttctggraagwaaaaaaaaacattaatgaagaggccaataatatgaagggaatcatggatcagttttctttcgctccctgtggtggatttcacttacaagaaaattgaagctggcaagaccctgttttctctgcaatttatttaaaaccttgcacgcatttggataccttgtgatttccaagaactacgtgaagattaagctttgcttactgatacatggcatgtattcttttcagtcttttgtgtttgattttgtttgatttccctctgcagcacagcgtctctgtaaaggtttttatgctttcaccagccatgtcttaaatacattaagacaacacatttggtgttcacacttcttcagtaatgtctgaacttgaaagccacagagtggcataaaacaatgtgtgttttctttgagagcagtgcacattttgcaaccactaggaagga

SEQ ID NO: 998 - DNA, 600 bp, Homo sapiens; identical to SEQ ID NO: 997

SEQ ID NO: 999 - DNA, 1400 bp, Homo sapiens
agtgatggtgatggtgtgcacgtttcattaatccaaccaaaaataatgaaataaaatttgagccacagtataccactccttgggataaagttaaatatttttaaagatcacattttccatgaacgcctctagtagcaaaccattcttttgcacaccacaatgtttccctcagtgccctttctcaaatgggtacaatgttcccttgtggccaaatttccctcccagggagcaatttcagtgctaggatcattggattcagttcccaaaatagaatgtttcagtgagaccatgagaattccaggctcacaragggagaggagagaacagggcaagacgtttggtttcatttgtcaccatttttaaaactctgtatgctagcacaccaaactcttgtctatatttacctttgtaccacagtattaatcgctattgttcatgtatcgtgctggaagtctgaactgactctagaggatgaattagcaagagggtattttaccaggtatgatctgacttcagttgtgcccatgttataatgtgtttccgacataggagagtcgtgctgctgtctagatcttcttgaatgttgataaaaatgaatgactactacaatacattttgtgttgcttgttggatgaatttgcatgttaactgtaggccaatatagatttgcctttaaaactctggaagagctacatagtcatcattagtttctattaattatgcatcagacaaaagccatttgttaccaaactgggaaaacagaggcttttcttaactatttcacatactgtaacaaatatgaatttaaatttgtgatagcgctctggttgctctaagcataattaagaatttttgtaattaataggttgctaattatttatcactgctaaaaaggaaaaaaggcataaaatgaccttctactgattagattttcagttttctttcaaactggaaatgcctccataaatatgatctatgattttgcttcataaaacagcaaatcaatgttttatgtaaaatattaaagcattaatataaatatgtgagaataaaaacaatctaaatccagaaaatggcagtcctaaatgttcatgagacagattgtattaatttaaccaggactatgtagaagtagaaagaaaagaaaaagaaaatcttttttaaaccagaataaacattaaaaactattgcagaaaatagtggattttggattccaaacattttcgacagtgtaatggaaatttttctgtaattttcttaccatcgggtattttttaaagtattcattgagtttaccaaaagttactgtagcttaaaaggttttgtgagcactaactattggcagaaactgcatttgcaaataaaaataaatgtttgccttttmaaaaaaaaaaaaaaaa

SEQ ID NO: 1000 - DNA, 600 bp, Homo sapiens
taatgaaccacgtgttttgacatcatgtaaacctaagcacgtagagatgattcggatttgacaaaataacatttgagtatccgattcgccatcaccccctaccccagaaataggacaattcacttcattgaccaggatgatcacatggaaggcggcgcagaggcagctgygtgggctgcagatttcctgtgtggggttcagcgtagaaaacgcacctccatcccgcccttcccacagcattcctccatcttagatagatggtactctccaaaggccctaccagagggaacacggcctactgagcggacagaatgatgccaaaatattgcttatgtctctacatggtattgtaatgaatatctgctttaatatagctatcatttcttttccaaaattacttctctctatctggaatttaattaatcgaaatgaatttatctgaatataggaagcatatgcctacttgtaatttctaactccttatgtttgaagagaaacctccggtgtgagatatacaaatatatttaattgtgtcatattaaacttctgatttcammaaaaaaaaaaaaaaaaaaaaaaaaaaaagcggccgctgaattc

SEQ ID NO: 1001 - DNA, 600 bp, Homo sapiens; identical to SEQ ID NO: 1000

SEQ ID NO: 1002 - DNA, 1400 bp, Homo sapiens
atggaggatttaatttcactgtggcagtatgatcacctcacggctacctatcttctgcttctagccaagaaggctcggggaaaaccagttcgtttaaggctttcttctttctcctgtggacaagccagtgctaccccattcacagacatcaagtcaaataattggagtctggaagatgtgaccgcaagtgataaaaattatgtggcgggattaatagactatgattggtgtgaagatgatttatcaacaggtgctgctactccccgaacatcacagtttaccaagtactggacagaatcaaatggggtggaatctaaatcattaactccagccttatgcagaacacctgcaaataaattaaagaacaaagaaaatgtatatactcctaagtctgctgtaaagaatgaagagtactttatgtttcctgagccaaagactccagttaataagaaccagcataagagagaaatactcactacgccaaatcgttacactacaccctcaaaagctagaaaccagtgcctgaaagaaactccaattaaaataccagtaaattcaacaggaacagacaagttaatgacaggtgtcattagccctgagaggcggtgccgctcagtggaattggatctcaaccaagcacatatggaggagactccaaaaagaaagggagccaaagtgtttgggagccttgaaagggggttggataaggttatcactgtgctcaccaggagcaaaaggaagggttctgccagagacgggcccagaagactaaagcttcactataacgtgactacaactagattagtgaatccagatcaactgttgaatgaaataatgtctattcttccaaagaagcatgttgactttgtacaaaagggttatacactgaagtgtcaaacacagtcagattttgggaaagtgacaatgcaatttgaattagaagtgtgccagcttcaaaaacccgatgtggtgggtatcaggaggcagcggcttaagggcgatgcctgggtttacaaaagattagtggaagacatcctatctagctgcaaggtataattgatggattcttccatcctgccggatgagtgtgggtgtgatacagcctacataaagactgttatgatcgctttgattttaaagttcattggaactaccaacttgtttctaaagagctatcttaagaccaatatctctttgtttttaaacaaaagatattattttgtgtatgaatctaaatcaagcccatctgtcattatgttactgtcttttttaatcatgtggttttgtatattaataattgttgactttcttagattcacttccatatgtgaatgtaagctcttaactatgtctctttgtaatgtgtaatttctttctgaaataaaaccatttgtgaatat

SEQ ID NO: 1003 - DNA, 600 bp, Homo sapiens
cctgacatcggatamgtgcaccaggtggccaagcagatgcacatctggatgtccagcamctgagcgtggatgcaccgtgccttatcaaagccagcaccactttgccttacttgagtcgtcttctcttcgagtggccacctggtagcctagaacagctaagaccacagggttcagcaggttccccaaaagrctgcccagccttacagcagatgctraaggcagagcagctgagggaggggcgctggccacatgtcactgatggtcagattccaaagtcctttctttatactgttgtggacaatctcagctgggtcaataagggcagktggttcagcgagccacggcagccccctgtatctggattgtaatgtgaatctttagggtaattcctccagtgacctgtcaaggcttatgctaacaggagacttgcaggagaccgtgtgatttgtgtagtgagcctttgaaaatggttagtaccgggttcagtttagttcttagtatcttttcaatcaagctgtgtgcttaatttactctgttgtaaagggataaagtggaaatcawwaaaaaaaaaaaaaaaaaaaaaaaaaaaaaaaaaaaaaa

SEQ ID NO: 1004 - DNA, 1400 bp, Homo sapiens
tcatgatccgggatagcgagaccactaaaggaagctactctttgtccgtgcgagactacgaccctcggcagggagataccgtgaaacattacaagatccggaccctggacaacgggggcttctacatatccccccgaagcaccttcagcactctgcaggagctggtggaccactacaagaaggggaacgacgggctctgccagaaactgtcggtgccctgcatgtcttccaagccccagaagccttgggagaaagatgcctgggagatccctcgggaatccctcaagctggagaagaaacttggagctgggcagtttggggaagtctggatggccacctacaacaagcacaccaaggtggcagtgaagacgatgaagccagggagcatgtcggtggaggccttcctggcagaggccaacgtgatgaaaactctgcagcatgacaagctggtcaaacttcatgcggtggtcaccaaggagcccatctacatcatcacggagttcatggccaaaggaagcttgctggactttctgaaaagtgatgagggcagcaagcagccattgccaaaactcattgacttctcagcccagattgcagaaggcatggccttcatcgagcagaggaactacatccaccgagacctccgagctgccaacatcttggtctctgcatccctggtgtgtaagattgctgactttggcctggcccgggtcattgaggacaacgagtacacggctcgggaaggggccaagttccccatcaagtggacagctcctgaagccatcaactttggctccttcaccatcaagtcagacgtctggtcctttggtatcctgctgatggagatcgtcacctacggccggatcccttacccaggkakgkcaarscctgaagygatccgagctcwggagcgtgsataccrgrtgcctcgcccagagaactgcccagaggagctctacaacatcatgatgcgctgctggaaaaaccgtccggaggagcggccgaccttcgaatacatccagagtgtgctggatgacttctacacggccacagagagccagtaccaacagcagccatgatagggaggaccagggcagggccagggggtgcccaggtggtggctgcaaggtggctccagcaccatccgccagggcccacacccccttcctactcccagacacccaccctcgcttcagccacagtttcctcatctgtccagtgggtaggttggactggaaaatctctttttgactcttgcaatccacaatctgacattctcaggaagcccccaagttgatatttctatttcctggaatggttggattttagttacagctgtgatttggaagggaaactttcaaaatagtgaaatgaatatttaaataaaagatataaatgcc

SEQ ID NO: 1005 - DNA, 600 bp, Homo sapiens
atgtgcttttagacggtctcaatctaaaagcacttcaaggggtcaaagggcaaccagcttgggtgctacctcagtgttgtagtttctgatactttatgtctttgctcaccctcatccccaaactacttgaaaagggcatttggcaccactctctgaaacaacacagtcactctagcaaggcccccaaagggccctggttttacattacatttcaaactttatttgctttggggttttgtttctgttgttgttcaaatgcaaaaaaaagaaaaaaaaaagaaaaaaaaaggtgactcacattgttacacatgctttaaaatatgtgttcaaatgttattaaccacaatgacgacctgttttgatttaaccaagaagacggctgcggagcctagcagactcaggcctgtgggaatgggatttgttacaaatctaggtttgttactggcttcagaaagctaattaagtgctctgaaaaagacaccgtttcttgaaacaaagatggttgtattcctcactttgatgttgttttgcaagatgtttgtggaaatgttcatttgtatctggatctctgttatgtgccatttttcttctagcatcgag

SEQ ID NO: 1006 - DNA, 600 bp, Homo sapiens; identical to SEQ ID NO: 1005

SEQ ID NO: 1007 - DNA, 1300 bp, Homo sapiens
tttttttttttttttcactttttagaaaaagtttaataatagcaggttatcatcatatgtaaccataaaataaaaacaataagttaaaatcttctctcaagaaataagtatatgccacacataaaattcattacagaatcttttttgaaaacagacccctttctctgataaatcattgtttgaagggtgcaaatttcaaaaacccacattgtccacaaggcaaagcaaaaggtatcatcacagtatgagtcatttcttgttggcagacatctggaaaacctgtgacttacaagcagctcaaatctagccctaattaaatttacaggaacctttgctctttcaaraatagtcttgttggcatcatgctaggttgctaaaaagagtaatatgtgctctattcacagtaacattctctgtccagtgcttttgaatgaggataaccaaacaggttttcctgaaaaaaatcattaggaggcagattccaatgagaccaacgggaaacatttttaaaagcataaaagatcgcctcaggcatatgctgagggaataaaggtgcaatggatcactgatacactcctaccatgcctaagctactgagtccgagaactggaagagggtctccgggttattgctgtcggcaggattgctgggctgcagtgtcttggtgggtgtagttttaccgtgagaatgagaggaagaagaatgggaactctcactggaactgctgcgygtctcggtactggtgctagtctttttcatttttcttctcttagccaaaggggccttatcaacattctgaaggcaaaacccctctctcttgtatttgttaaaggcgtggaaggttgctttcacacaggtatgcacggcagctccggaagatcctagaatatccggagtcatcagaggattggaggacagctgacttccatcttgtagccattcattgtacctcaagccagacattttaagccttttgtttggatctactgtgagaagtccttggatcaaatctttagcctcttgggatacattcttccaggcttctccttcaaaggagaaatctccctttttaattttcttcatgatttccaccgcgctggtacacgtcaaacttcggtcatgagattggaagggaacctgtcctgacaacattgtgtacaaaatgacgcccaagctccacaggtcacaggactcatcgtagccgttctgattcaagagctctggggcggcataatgaagggtgaagcatggagtcttcaggggctgattatccggtggctttagccgtgcaaatccaaaa

SEQ ID NO: 1008 - DNA, 600 bp, Homo sapiens
acgccattgagttgagctggcctagcgatggagggacactctaacacaactttccctcagctattatgcaacagatcagggaaaaagatgggatgacagatggggtcagacagaaagagcttctgggaaacaagcttacatagtcttttttaaaatgcacaaagcctcccagctaagaggtcacttggtttgggcttcattaggactgagactttgttgagttctttctgggacttggagagtggatgatattcaggctctgaacattcccagcgctctcccgagggtgccactttctcaagatgaaaactgtgactgaaaaaattaataataaatgtttctgagctgcctgtgttctccctgtgtgggtgagagaagggactagactcctaagcctgcctcagatacaagaggcatcattggctccaattttagagaacttgaaagcaaggctttggacaaaattttgagaccctaatcactttaccttcctccaaattacccaacatacggtaaacaacatttgtgcagaagtatgtatgtatttagttcaggttgacttgtgtccttataaactcttactcaaatgatttgaacttt

SEQ ID NO: 1009 - DNA, 600 bp, Homo sapiens
tgaaacttcaagtattattgccttaatgtctcttaaccctgttacacgctgcttgtagacatgttaatatagtaatacctttatgatatattgagtttaaggactactctttttctgttttatcatgtatgcattattttgtatatgtacagggcaagtaggtatataatttgataaagttgcaattgaaatattattaacagaagatgtaagaaatttctgcatggtctaaatctttgtgtactttatttgtaaattatttgccctggagttttagaaaatagtttctgaattttaaacttgctggattcatgcagccagctttgcaggttatcagagatcaaagattgtaataataattttgtaaattgtaagcaaaaagttatttttatattatatacagtctaattgttcatcctaattgttcctgttttcatctagtcagagattcagtaagtgccttggaacaatattgaattctcttagcttgtgtgtgtttctttaatatttgaactcaagtgggattagaagactatcaaaatacatgtatgtttcaggatatttgacctgtcattaaaaaaaacaaacagttttacagtg

SEQ ID NO: 1010 - DNA, 600 bp, Homo sapiens; identical to SEQ ID NO: 1009

SEQ ID NO: 1011 - DNA, 600 bp, Homo sapiens
aaccgcttcctccgatcccatggacctgatgccaagctgctggctggtggggaggatgtggctccaggccccctgggtctggggcagctgctggccgtggctagccaggtcgctgcggggatggtgtacctggcgggtctgcattttgtgcaccgggacctggccacacgcaactgtctagtgggccagggactggtggtcaagattggtgattttggcatgagcagggatatctacagcaccgactattaccgtgtgggaggccgcaccatgctgcccattcgctggatgccgcccgagagcatcctgtaccgtaagttcaccaccgagagcgacgtgtggagcttcggcgtggtgctctgggagatcttcacctacggcaagcagccctggtaccagctctccaacacggaggcaatcgactgcatcacgcagggacgtgagttggagcggccacgtgcctgcccaccagaggtctacgccatcatgcggggctgctggcagcgggagccccagcaacgccacagcatcaaggatgtgcacgcccggctgcaagccctggcccaggcacctcctgtctacctggatgtcctgggctag

SEQ ID NO: 1012 - DNA, 600 bp, Homo sapiens
tagactcaagccggctgcccgtcaagtggacggcgcccgaggctctcaaacacgggaagttcaccagcaagtcggatgtctggagttttggggtgctgctctgggaggtcttctcatatggacgggctccgtaccctaaaatgtcactgaaagaggtgtcggaggccgtggagaaggggtaccgcatggaaccccccgagggctgtccaggccccgtgcacgtcctcatgagcagctgctgggaggcagagcccgcccgccggccacccttccgcaaactggccgagaagctggcccgggagctacgcagtgcaggtgccccagcctccgtctcagggcaggacgccgacggytccacctcgccccgaagccaggagccctgaccccacccggtggcccttggccccagaggaccgagagagtggagagtgcggcgtgggggcactgaccaggcccaaggagggtccaggcgggcaagtcatcctcctggtgcccacagcaggggctggcccacgtagggggctctgggcggcccgtggacaccccagacctgcgaaggatgatcgcccgataaagacggattctaaggactctaaaaaa

SEQ ID NO: 1013 - DNA, 600 bp, Homo sapiens
cggccgcctggtggactccaaagccaagacgcggagcgccggctgtgccgcctacatggcacccgagcgcattgaccccccagaccccaccaagccggactatgacatccgggccgacgtatggagcctgggcatctcgytggtggagctggcaacaggacagtttccctacaagaactgcaagacggactttgaggtcctcaccaaagtcctacaggaagagcccccgcttctgcccggacacatgggcttctcgggggacttccagtccttcgtcaaagactgccttactaaagatcacaggaagagaccaaagtataataagctacttgaacacagcttcatcaagcgctacgagacgctggaggtggacgtggcgtcctggttcaaggatgtcatggcgaagactgagtcaccgcggactagcggcgtcctgagccagccccacctgcccttcttcaggtagctgcttggcggcggccagccccacagggggccaggggcatggccacaggcccccctccccacttggccacccagctgcctgccaggggagacctgggacctggacggccacctaggactgaggacagagagtgg

SEQ ID NO: 1014 - DNA, 600 bp, Homo sapiens
agtattataaactgtactttgctgtctgagacagcacatttgtgaatgatgcttgctgcctgccattttcaacctattctctcttaagagtgctaggtaccaaattgtgaaagtttgttttcagttatattacttttgaggctggtgaaaaatttaaatgtaactttgtgggaacactgattcatatttagaaaatgtaaatgtctgtagcactttcttgcagttaatttgaaaactttggatgctgaaccttgtttgtcagtgatttagatgatttaaaaatgcatgtgtgatttgaattttataattgttttgacaagcataatttacttggacaacttcgtaggtagccttaacttctggccaagtttgttttttatataaatatatatacatatatacatattatgtatggttgtaaattcatacacttatcacatgaatgtgttactgtatacaaaactcttaatgctttattctcaaatgctgggttgaaaaatgttttgaaagccttttaaaatatatatctttataaagtaatattcaggatgatgataaaaattgtttatattgttatgataaaaatgacagtataatgtt

SEQ ID NO: 1015 - DNA, 1400 bp, Homo sapiens
accacagttgccaggtctggaacacccgcagtagaaaacaagcagcagattggggatgctattcggatgatagtcagagggactcttggcagctgtagcagcagcagtgaatgccttgaagacagtaccatgggaagtgttgcagacacagtggcaagggttcttcggggatgtctggaaaacatgccggaagctgattgcattcccaaagagcagctgagcacatcatttcagtgggtcaccaaatgggttgattactctaacaaatatggctttgggtaccagctctcagaccacaccgtcggtgtccttttcaacaatggtgctcacatgagcctccttccagacaaaaaaacagytcactattacgcagagcttggccaatgctcagttttcccagcaacagatgctcctgagcaatttattagtcaagtgacggtgctgaaatacttttctcattacatggaggagaacctcatggatggtggagatctgcctagtgttactgatattcgaagacctcggctctacctccttcagtggctaaaatctgataaggccctaatgatgctctttaatgatggcacctttcaggtgaatttctaccatgatcatacaaaaatcatcatctgtagccaaaatgaagaataccttctcacctacatcaatgaggataggatatctacaactttcaggctgacaactctgctgatgtctggctgttcatcagaattaaaaaatygaatggaatatgccctgaacatgctcttacaaagatgtaactgaaagacttttcgaatggaccctatgggactcctcttttccactgtgagatctacagggaasccaaaagaatgatctagagtatgttgaagaagatggacatgtggtggtacgaaaacaattcccctgtggcctgctggactggktggaaccagaacaggctaaggcatacagttcttgactttggacaatccaagagtgaaccagaatgcagttttccttgagatacctgttttaaaaggtttttcagacaattttgcagaaaggtgcattgattcttaaattctctctgttgagagcatttcagccagaggactttggaactgtgaatatacttcctgaaggggagggagaagggaggaagctcccatgttgtttaaaggctgtaattggagcagcttttggctgcgtaactgtgaactatggccatatataattttttttcattaatttttgaagatacttgtggctggaaaagtgcattccttgttaataaactttttatttattacagcccaaagagcagtatttattatcaaaatgtctttttytttatgttgaccattttaaaccgttggcaataaagagtatgaaaacgcaraaaaaaaaaaaaaaaa

SEQ ID NO: 1016 - DNA, 1400 bp, Homo sapiens
gacctgctgattccccagtttagagggccacaagctctggggccagttcccactgccattggggtcagcatagctatagacaagatatctgctgctgtcctcaacatggaggaatctgttacaataagctcttgtgacctcctggttgtaagtgttggycagatgtctatgtccagggccatcaacctaacccagaaactctggacagcaggcatcacagcagaaatcatgtacgactggtcacagtcccaagaggaattacaagagtactgcagacatcatgaaatcacctatgtggcccttgtctcggataaagaaggaagccatgtcaaggttaagtctttcgagaaggaaaggcagacagagaagcgtgtgctggagactgaacttgtggaccatgtactgcagaaactgaggactaaagtcactgatgaaaggaatggcagagaagcttccgataatcttgcagtgcaaaatctgaaggggtcattttctaatgcttcaggtttgtttgaaatccatggagcaacagtggttcccattgtgagtgtgctagccccggagaagctgtcagccagcactaggaggcgctatgaaactcaggtacaaactcgacttcagacctcccttgccaacttacatcagaaaagcagtgaaattgaaattctggctgtggatctacccaaagaaacaatattacagtttttatcattagagtgggatgctgatgaacaggcatttaacacaactgtgaagcagctgctgtcacgcctgccaaagcaaagatacctcaaattagtctgtgatgaaatttataacatcaaagtagaaaaaaaggtgtctgtgctatttctgtacagctatagagatgactactacagaatcttattttaaccctaaagaactgtcgttaacctcattcaaacagacagaggcttatactggaataatggaatgttgtacattcatcataatttaaaattaaattctaagaagaggctgggtgcagtggctcacacctttaatcccagcactttgggaagccaaggcaggaagactgcttgaaaccaggagtttgagaccagcctgagcaacaaagcaagaccccatctctataaaaactaaaaaaattagttgggcatggtggcacatgcctgtagtcccagctactccagaggctgagatggatcatctgagcctcaggaggttgaggctgcagtgagctgtgactgcgccactgcactccagtctgggacaacagagcaagaccctgtcttaaaaaaaaaaaraaaaaaaaaawwtttttctaagaagctgtcctacaaagttgagctttgttagtttttcatgtgtaatatattataaatttatcttttgggatataataaatgctttcatat

SEQ ID NO: 1017 - DNA, 1400 bp, Homo sapiens; identical to SEQ ID NO: 1016

SEQ ID NO: 1018 - DNA, 1400 bp, Homo sapiens
aacagcaaaaatagttcaaggtcaaagactaagtgccttttcatccaaatggaattctgtgataaagggaccttggaacaatggattgaaaaaagaagaggcgagaaactagacaaagttttggctttggaactctttgaacaaataacaaaaggggtggattatatacattcaaaaaaattaattcatagagatcttaagccaagtaatatattcttagtagatacaaaacaagtaaagattggagactttggacttgtaacatctctgaaaaatgatggaaagcgaacaaggagtargggaactttgcgatacatgagcccagaacagatttcttcgcaagactatggaaaggaagtggacctctacgctttggggctaattcttgctgaacttcttcatgtatgtgacactgcttttgaaacatcaaagtttttcacagacctacgggatggcatcatctcagatatatttgataaaaaagaaaaaactcttctacagaaattactctcaaagaaacctgaggatcgacctaacacatctgaaatactaaggaccttgactgtgtggaagaaaagcccagagaaaaatgaacgacacacatgttagagcccttctgaaaaagtatcctgcttctgatatgcagttttccttaaattatctaaaatctgctagggaatatcaatagatatttaccttttattttaatgtttcctttaattttttactatttttactaatctttctgcagaaacagaaaggttttcttctttttgcttcaaaaacattcttacattttactttttcctggctcatctctttattytttttttttttttwtaaagacagagtctcgctctgttgcccaggctggagtgcaatgacacagtcttggctcactgcaacttctgcctcttgggttcaagtgattctcctgcctcagcctcctgagtagctggattacasgcatgtgccacccacccaactaatttttgtgtttttaataaagacaggstttcaccatgttggccaggctgstctcaaactcctgacctcaagtaatccacctgcctcgscstcccaaagtgctgggattacagggatgagccaccgcgcccagcctcatctctttgttctaaagatggaaaaaccacccccaaattttctttttatactattaatgaatcaatcaattcatatctatttattaaatttctaccgcttttaggccaaaaaaatgtaagatcgttctctgcctcacatagcttacaagccagctggagaaatatggtactcattaaaaaaaaaaaaaaaagtgatgtacaaccaaaaaaaaaaaaaaaaaaaaaaaaaaaaaaaaaaaaaaaaaaaaaaaaaaaaaaaaaaaaaaaaaaaaaaaa

SEQ ID NO: 1019 - DNA, 1400 bp, Homo sapiens; identical to SEQ ID NO: 1018

SEQ ID NO: 1020 - DNA, 600 bp, Homo sapiens
ggtacctgctccgcccttgctgctgcagtgggtcaagacggatcaggctctcctcatgctgtttagtgatggcactgtccaggtgaacttctacggggaccacaccaagctgattctcagtggctgggagcccctccttgtgacttttgtggcccgaaatcgtagtgcttgtacttacctcgcttcccaccttcggcagctgggctgctctccagacctgcggcagcgactccgctatgctctgcgcctgctccgggaccgcagcccagcctaggacccaagccctgaggcctgaggcctgtgcctgtcaggctctggcccttgcctttgtggccttcccccttcctttggtgcctcactgggggctttgggccgaatcccccagggaatcaagggaccagctttactggagtttgggggcgggcttgtyttcgctggcttcctaccccatctccaagataagccttgagccttarctcccagctagggggcgttatttatggaccaayttttaatttattgtmagamactttatttattggggattktragcccamaggggggccctcctcctaggwtaawaaacaattttkyargaaa

SEQ ID NO: 1021 - DNA, 600 bp, Homo sapiens
tgaatagatctgggggcaggagatggaatgctgagggggtgggtgggggtgggaagtagcctatatactaactactagtgctgcatttaactggttatttcttgccagaggggaatgtttttaatactgcattgagccctcagaatggagagtctcccccgctccagttattggaatgggagaggaaggaaagaacagcttttttgtcaaggggcagcttcagaccatgctttcctgtttatctatactcagtaatgaggatgagggctaggaaagtcttgttcataaggaagctggagaactcaatgtaaaatcaaacccatctgtaatttcgagtgggtggagctcttgcttttggtacatgccctgaatccctcactccctcaagaatccgaaccacaggacaaaaaccacctactgggctctctcctaccctgccctcctcccttttttttacccctctcttttttattttttctttgctctttagaacccagtgaaaaataccagggtactggggtgcaactctttcttatgataggtcattagtgctttaagcaaaagatattagcagctttgactgcagcattagcaattagg

SEQ ID NO: 1022 - DNA, 600 bp, Homo sapiens
ctggagatggggaacaggagcctgagtgatgtggcccaggctcaggagctttgtgggggccccgttccaggcgaggctcctaatggccaaggctgtttgcatcccggggatccccgtctgctgaccagctaaacaccaatttcttcctgcttttctccacttggtttggaaaatcacacagttttcaggctccatctgtttggagaaaatacattctgaagcatccccaattcaccttctaaaaactcatgtgcaggtttgataaacaccagaacagaagacagtgatgctgtattattttagatttattacatagatttggaattcacttttttcatgacctagaaaaaaacattccagtgttcaactgttttatattattaaagggcttttaatttgtgaacttctgaaggcatgagtgttttctctttctacttttgtatatgtgcatgttttgtttcctctgacttggtatatgctcatctgagtgacggatatgtgaaatttgtagaactggttagtcaaatggccagactatttcattaatttatttcctcaaatgcttttcaaattaaagcacctttgttagtaaacagttaa

SEQ ID NO: 1023 - DNA, 600 bp, Homo sapiens; identical to SEQ ID NO: 1022

SEQ ID NO: 1024 - DNA, 1400 bp, Homo sapiens
gcttgatccagcgtggctgatggtggacactgtcataggagaaggagagtttggggaagtgtatcgagggaccctgaggctccccagccaggactgcaagactgtggccattaagaccttaaaagacacatccccaggtggccagtggtggaacttccttcgagaggcaactatcatgggccagtttagccacccgcatattctgcatctggaaggcgtcgtcacaaagcgaaagccgatcatgatcatcacagaatttatggagaatggagccctggatgccttcctgagggagcgggaggaccagctggtccctgggcagctagtggccatgctgcagggcatagcatctggcatgaactacctcagtaatcacaattatgtccaccgggacctggctgccagaaacatcttggtgaatcaaaacctgtgctgcaaggtgtctgactttggcctgactcgcctcctggatgactttgatggcacatacgaaacccagggaggaaagatccctatccgttggacagcccctgaagccattgcccatcggatcttcaccacagccagcgatgtgtggagctttgggattgtgatgtgggaggtgctgagctttggggacaagccttatggggagatgagcaatcaggaggttatgaagagcattgaggatgggtaccggttgccccctcctgtggactgccctgcccctctgtatgagctcatgaagaactgctgggcatatgaccgtgcccgccggccacacttccagaagcttcaggcacatctggagcaactgcttgccaacccccactccctgcggaccattgccaactttgaccccaggatgactcttcgcctgcccagcctgagtggctcagatgggatcccatatcgaaccgtctctgagtggctcgagtccatacgcatgaaacgctacatcctgcacttccactcggctgggctggacaccatggagtgtgtgctggagctgaccgctgaggacctgacgcagatgggaatcacactgcccgggcaccagaagcgcattctttgcagtattcagggattcaaggactgatccctcctctcaccccatgcccaatcagggtgcaaggagcaaggacggggccaaggtcgctcatggtcactccctgcgccccttcccacaacctgccagactaggctatcggtgctgcttctgcccactttcaggagaaccctgctctgcaccccagaaaacctctttgttttaaaagggaggtgggggtagaagtaaaaggatgatcatgggagggagctgaggggttaatatatatacatacatacacatatatatatttttgtaaataaacaggaactgattttctgcctccatcccacccatgagggctgcaggcact

SEQ ID NO: 1025 - DNA, 600 bp, Homo sapiens
gtaactttcaaccttgccagcatcactggtatgatgtatatttaattaaagcacacttttccccgaccgtatacttaaaatgacaaagccattcttttaaatatttgtgactctttcctaaagccaaagtttctgttgaattatgttttgacacacccctaagtacaaggtggtatggttgtatacacatgctgccttcttggggattcaaaaacaggtttttgattttgaatagcaattagtgatatagtgctgtttaagctactaacgataaaaggtaataacattttatacaatttccatatagtctattcattaagtaatctttttacagttgcatcaggcctgaacccgtccattcagaaagcttcaaattatagaaacaatactgttctatacgagtgaccgattatgctttctttggcctacattctttattctgcggtgaagttgaggcttataagttaaaacaaaggaactaacttactgtccaccagtttatacagaactcacagtacctatgacttttttaaactaagatctgttaaaaaagaaatctgtttcaacagatgaccgtgtacaataccgtgtggtgaaaat

SEQ ID NO: 1026 - DNA, 600 bp, Homo sapiens; identical to SEQ ID NO: 1025

SEQ ID NO: 1027 - DNA, 600 bp, Homo sapiens
aacagaaatcacttccagtcttacatcatggctgacatgtatagttttggcctcatcctttgggaggttgctaggagatgtgtatcaggaggtatagtggaagaataccagcttccttatcatgacctagtgcccagtgacccctcttatgaggacatgagggagattgtgtgcatcaagaagttacgcccctcattcccaaaccggtggagcagtgatgagtgtctaaggcagatgggaaaactcatgacagaatgctgggctcacaatcctgcatcaaggctgacagccctgcgggttaagaaaacacttgccaaaatgtcagagtcccaggacattaaactctgataggagaggaaaagtaagcatctctgcagaaagccaacaggtactcttctgtttgtgggcagagcaaaagacatcaaataagcatccacagtacaagccttgaacatcgtcctgcttcccagtgggttcagacctcacctctcagggagcgacctgggcaaagacagagaagctcccagaaggagagattgatccatgtctgtttgtaggacggagaaaccgcttgggtaacttgttcaagatatgatgcat

SEQ ID NO: 1028 - DNA, 600 bp, Homo sapiens; identical to SEQ ID NO: 1027

SEQ ID NO: 1029 - DNA, 1400 bp, Homo sapiens
  misc_feature (1387)..(1387): n is a, c, g, or t
  misc_feature (1394)..(1394): n is a, c, g, or t
  misc_feature (1397)..(1397): n is a, c, g, or t
ctgtgtctccccctggatggacatgtggacggcgctgctcatcctgcaagccttgttgctaccctccctggctgatggtgccacccctgccctgcgctttgtagccgtgggtgactggggaggggtccccaatgccccattccacacggcccgggaaatggccaatgccaaggagatcgctcggactgtgcagatcctgggtgcagacttcatcctgtctctaggggacaatttttacttcactggtgtgcaagacatcaatgacaagaggttccaggagacctttgaggacgtattctctgaccgctcccttcgcaaagtgccctggtacgtgctagccggaaaccatgaccaccttggcaatgtctctgcccagattgcatactctaagatctccaagcgctggaacttccccagccctttctaccgcctgcacttcaagatcccacagaccaatgtgtctgtggccatttttatgctggacacagtgacactatgtggcaactcagatgacttcctcagccagcagcctgagaggccccgagacgtgaagctggcccgcacacagctgtcctggctcaagaaacagctggcggcggccaggraggactacgtgctggtggctggccactaccccgtgtggtccatagccgagcacgggcctacccactgcctggtcaagcagctacggccactgctggccacatacggggtcactgcctacctgtgcggccacgatcacaatctgcagtacctgcaagatgagaatggcgtgggctacgtgctgagtggggctgggaatttcatggacccctcaaagcggcaccagcgcaaggtccccaacggctatctgcgcttccactatgggactgaagactcactgggtggctttgcctatgtggagatcagctccaaagagatgactgtcacttacatcgaggcctcgggcaagtccctctttaagaccaggctgccgaggcgagccaggccctgaactcccatgactgcccagctctgaggcccgatctccactgttgggtgggtgggccctgccgggaccctgctcacaggcaggcttttcctccaacctgtggcgctgcagcagggcaggaaggggaaacacagctgatgaactgtggtgccacatgacccttgtggcacagatgcccacgtatgtgaaacacacatggacatgtgtcccagccacagtgttatgctctgtggctggctcacctttgctgagttccggggtgcaatgggggagggagggagggaaagcttcctcctaaatcaagcatctttctgttactgatgttcaataaaagaatagttgccaaggctgaaaaaaaaaaaaaaaaaacycgrgggggggcccggwacccaattngccctanagngag

SEQ ID NO: 1030 - DNA, 600 bp, Homo sapiens
aactggcctgacctgcagtggccgccagggaggtytgggcccagcggggctcccttctgtgcagacttttggacccagctcagcaccagcacccgggcgtcctgagcactttgcaagagagatgggcccaaggaattcagaagagcttgcaggcaagccaggagaccctgggagctgtggctgtcttctgtggaggaggctccagcattcccaaagctcttaattctccataaaatgggctttcctctgtctgccatcctcagagtctggggtgggagtgtggacttaggaaaacaatataaaggacatcctcatcatcacggggtgaaggtcagastaaggcagccttcttcacaggctgagggggttcagaaccagcctggccaaaaattacaccagagagacagagtcctccccattgggaacagggtgattgaggaaagtgaaccttgggtgtgagggaccaatcctgtgacctcccagaaccatggaagccaggacgtcaggctgaccaacacctcagaccttctgaagcagcccattgctggcccgccatgttgtaattttgctcatttttattaaacttctggtttacctgaa

SEQ ID NO: 1031 - DNA, 600 bp, Homo sapiens
aaggaattaccttcagctgctaggaagagcgactcaaactaacaatggcttcaacgagaagcaggtttattttttccagcacataaaagaaaaataatgtttcggagtccaggactggcaggacaggtcatcagatactcagaggctgtatctctgccctgccaaccttgacaaatggcttccaatgttaggtttgctacaagatggttactggagctctagctgcctattttgtgtttagggaagggaaaatggaggaaaggggagaagagcaaagggcgcttttaaagagctttcccaaaagctccmcccaatgacttytgcttccatctcactaaccacccacccctacctggaatggaggctgggaratgtggcttatttgctgggtacgtgactatccctaataacaaaggggttytgacmctaagacattaggggagaatgttgggtaggcagccagcmctcttttaccakagggcctcctggtgtttggattttgatctcaatgtgtaaaatgacagagatgtaacaagctcatagggtatcaatatctcttattgttctatgttgaaaaaaaaaaaaaaaaaaaaaaaaaaa

SEQ ID NO: 1032 - DNA, 600 bp, Homo sapiens; identical to SEQ ID NO: 1031

SEQ ID NO: 1033 - DNA, 1400 bp, Homo sapiens
tattgaagttcatggtggatattgccctgggaatggagtatctgagcaacaggaattttcttcatcgagatttagctgctcgaaactgcatgttgcgagatgacatgactgtctgtgttgcggacttcggcctctctaagaagatttacagtggcgattattaccgccaaggccgcattgctaagatgcctgttaaatggatcgccatagaaagtcttgcagaccgagtctacacaagtaaaagtgatgtgtgggcatttggcgtgaccatgtgggaaatasstacgcggggaatgactccctatcctggggtccagaaccatgagatgtatgactatcttctccatggccacaggttgaagcagcccgaagactgcctggatgaactgtatgaaataatgtactcttgctggagaaccgatcccttagaccgccccaccttttcagtattgaggctgcagctagaaaaactcttagaaagtttgcctgacgttcggaaccaagcagacgttatttacgtcaatacacagttgctggagagctctgagggcctggcccagggcyccacccttgctccactggacttgaacatcgaccctgactctataattgcctcctgcactccccgcgctgccatcagtgtggtcacagcagaagttcatgacagcaaacctcatgaaggacggtacatcctgaatgggggcagtgaggaatgggaagatctgacttctgccccctctgctgcagtcacagctgaaaagaacagtgttttaccgggggagagacttgttaggaatggggtctcctggtcccattcgagcatgctgcccttgggaagctcattgcccgatgaacttttgtttgctgacgactcctcagaaggctcagaagtcctgatgtgaggagaggtgcggggagacattccaaaaatcaagccaattcttctgctgtaggagaatccaattgtacctgatgtttttggtatttgtcttccttaccaagtgaactccatggccccaaagcaccagatgaatgttgttaagkaagctgtcattaaaaatacataatatatatttatttaaagagaaaaaatatgtgtatatcatgaaaaagacaaggatattttaataaaacattacttatttcatttcacttatcttgcatatcttaaaattaagcttcagctgctccttgatattaacmtttgtacagagttgaagttgttttttcaasttcttttctttttcatkactattaaatgtaaaaatatttgtaaaatgaaatgccatatttgacttggcttctggtcttgatgtatttgataagaatgattmattywmtgwtawrgcttsyataataaawttswrataggmwwmmwaawaaaawaaaaaaaaaaaaaa

SEQ ID NO: 1034 - DNA, 1400 bp, Homo sapiens; identical to SEQ ID NO: 1033

SEQ ID NO: 1035 - DNA, 1400 bp, Homo sapiens
cagataatcatctgttgtggcattctatcttgtaggacactgtatattgcaaattgctgattatggaaggggccagttgctgttttttcatgcagtgccctgggagtcttaaaagcagtgcttagcaacattggtgatagcatgtggctgggacccagggcccttccccactcttcagccccgagtcatgtgtctgaggtgacggactgagacgcatctggtcctgtaattcagagagtgggcacatcaccaaagaactgcattgctgtggtcactgtttcttcaagtacacactgactctgctactttaggataaatatattttactcagaactctgaatttcacagtatacttactaaactaagtaaaaatgatacttaaaatacttattttactttctagacctaggctagatgttttaagctacagctctagttcattgtgatatttataatttgaaagctatgagaatagatgtgtgggtgaagccatagaacatatttgcttgaaattcttgagcagggatcttataaagggccagaaataagatgtgtggttcacatagatagtgagcgtaacatctgtattaaacataggagagaagtttataaagggcattggcaataaactctttgttgcagctgttttccaagcagtgtaaatactttttcctgtgattatgtatagccttggaatggcaccttttaactaacccatatgtgtttggtttcaatggttttttatattcagatgtatatatggkgctcactttaggatcagcagtgttgaccatttatgctgcatagctgtattatagccttattagttgtgtggttgacccttggggtatacaaatgtcagtctgagtggtgtcttactcctttgtttataagtgaatgattgtgcatgttttgtatgtcatagtatgtcgtcacataaaagggagggagcgaaaaaccattacattaagataatattggaccaaactacttacttgctctaaacagttacttgtaccccttaacctgtcttcaaaagttgcatatagttacagtagtgtataaattaaatattgtggaaaaacagtcttgtatttttctgtatgtgtgtatatatatatataattatgtacttctggcaattctatctgtatttaaagatgtgacaatcttgacaccaattttaagaatagctgtgagaccgaattaaagataatccctaccaagtgaaaattgatgtgtgttaagagggtacagaattatcaactgatttggtcagttgcttccaatgctggttgatttccctcattgtgtaaacattgacaggtatgtgacaaatgggaaaaaaaatccaaataataaagtgacatattggtgttcagcaatawaaaaaaaaaaaa

SEQ ID NO: 1036 - DNA, 1002 bp, Homo sapiens
agagcctaaggaacgacctacatttgagacactgcgttggaaacttgaagactattttgaaacagactcttcatattcagatgcaaataacttcataagatgaacactggagaagaatatcaaataataaagtagcaaaacaaattcaaataatccattccaaaatacaatgttatcaaccaactgcacaatcagtttatcctgacatattcaagtgataggataaagttggccatgtattatgaaaaagattatttgtgcattttattgactgggcaacactgcaggacagtcaaggtgatatataatttcctcactgcctggtaaaattaagcacactaaaccaagttatttttctttttaagagatacttacatttccatttattgtttgaaatgtcgatcaagagaatcaacagatgatagtccaatttttactcagtgactgttgtagcattttcctgtttactgattagagtggttattcattattcctcagattgctgaatcccatcaggctgttattatgaaggaatttgattgctttgctgcacagcaggacctgtgctttgagatttttttttctcttttaaaatatcctgtaactacaatgatggtaaagccatgttaaatgacttgattgtacttggagtaattgcacatttttttctatgcataaaaaaatgatgcagctgttgagaaaacgaagtctttttcattttgcagaaggaaatgatggaatttttctgtacttcagtatgtgtcaactgagagtcatatacattagttttaatctcttaatattgagaatcaggttgcaaaacggatgagttattatctatggaaatgtgagaaatgtctaatagcccataaagtctgagaaataggtatcaaaatagtttaggaaaatgagaggagaacagtaggattgctgtggcctagacttctgagtaattaataaagaaaaagaagtaccctttggcctacaaaaaaaaaaaaaaaa

SEQ ID NO: 1037 - DNA, 1002 bp, Homo sapiens; identical to SEQ ID NO: 1036

SEQ ID NO: 1038 - DNA, 600 bp, Homo sapiens
aggatattttaaaagagaaaaaaaaatctcaaagcacaggtcctgctgtgcagcaaagcaatcaaattccttcataataacagcctgatgggattcagcaatctgaggaataatgaataaccactctaatcagtaaacaggaaaatgctacaacagtcactgagtaaaaattggactatcatctgttgattctcttgatcgacatttcaaacaataaatggaaatgtaagtatctcttaaaaagaaaaataacttggtttagtgtgcttaattttaccaggcagtgaggaaattatatatcaccttgactgtcctgcagtgttgcccagtcaataaaatgcacaaataatctttttcataatacatggccaactttatcctatcacttgaatatgtcaggataaactgattgtgcagttggttgataacattgtattttggaatggattatttgaatttgttttgctactttattatttgatattcttctccagtgttcatcttatgaagttatttgcatctgaatatgaagagtctgtttcaaaatagtcttcaagtttccaacgcagtgtctcaaatgtaggtcgttccttaggctct

SEQ ID NO: 1039 - DNA, 600 bp, Homo sapiens; identical to SEQ ID NO: 1038

SEQ ID NO: 1040 - DNA, 1400 bp, Homo sapiens
aggcttaatgagcataggtagcttgtccaaggtctcatgaccagtcaagggcaagctggagttaataatctatatttatttgactcagcactgttttcatcacaacttgttttcccagcatcatgtagtgcatttagttttgtctttctcagggtatagtcaatatgcctgcaggagtttctatagcgagacatagaatagtattctgatcagttgccaaagaatctaggaaattagttgtattttgtgcaagctaatttaaaaacatgatgggctgttttaagaccagagtggaaattcatgagaggaactatactaccaaaagagcccaaatgaccaaatccatggataattgcttcacagccttggccatcctggctcagctctcaatttagtataatatgcagttcctgtgcctccagactatgcagctcatcaccctaggttctacaggaaatacagagatgaacaactttgccttcaaaaatgtgctgcctagaaacagacctgcattcaaccaactgtaatgcaggattggaccatgaatgatatgctagaatagaagaaagagaagtgtttttttaattgagagcctctatgtgcaaggtgatatataatcatatccagtttaatcttcacaatatccaatgaagaaggtctcattatctccatgataaagatggggaaactaaggtcagaagggttaactcaactgtctattgtcacatgatgaataaatagatgaagtgagatacaaagctgggtttgattcaaagcccttactttcctaattaaactatgatgcgtatttatttttctgcaccttcctttcttccacaaacacatattgatagatgcaagagactcttatttagaaggcgtgggggacaagaaggatacaaggtaagtttcagtggagctcagaggacggggagatagaactgtggcacttaggggagatgacatttgctttgggcagaggcagctagccaggacacatttccactataattttacaaagttaaatttataagctagcattaagtaaagtgaagtccagctcccttgctaaaaataactagaggtaataattggtattcaggtaactcatttacagtcataatgtgttgtgaaaatttaatcttaaaaattaaatttttaaactatgtgggtctgtgaatttctttaatgtctaagaaatccagcttcataatttccatgatacaaagatcttttttcaggtggatttttacctttgttccttttgctctgatagacaaaatcagtttaggactattaaagaatgttttggaataaactgtctttttcctcaatgaatgggatgtctaatgtatttcaaaatcacccaaaacttttggcaaataaaagcatttaaaaag

SEQ ID NO: 1041 - DNA, 1400 bp, Homo sapiens
tagaattggtggcaaatcaccagatacaaattacttgtttatgggagattatgttgacagaggatattattcagttgaaacagttacactgcttgtagctcttaaggttcgttaccgtgaacgcatcaccattcttcgagggaatcatgagagcagacagatcacacaagtttatggtttctatgatgaatgtttaagaaaatatggaaatgcaaatgtttggaaatattttacagatctttttgactatcttcctctcactgccttggtggatgggcagatcttctgtctacatggtggtctctcgccatctatagatacactggatcatatcagagcacttgatcgcctacaagaagttccccatgagggtccaatgtgtgacttgctgtggtcagatccagatgaccgtggtggttggggtatatctcctcgaggagctggttacacctttgggcaagatatttctgagacatttaatcatgccaatggcctcacgttggtgtctagagctcaccagctagtgatggaggsatataactggtgccatgmccggaatgtagtaacgattttcagtgctccaaactattgttatcgttgtggtaaccaagctgcaatcatggaacttkrcgatactctaaaatactctttcttgcagtttsacccagcacctcgtagaggcgagccacatgttactcgtcgtaccccagactacttcctgtaatgaaattttaaacttgtacagtattgccatgaaccatatatcgacctaatggaaatgggaagagcaacagtaactccaaagtgtcagaaaatagttaacattcaaaaaacttgttttcacatggaccaaaagatgtgccatataaaaatacaaagcctcttgtcatcaacagccgtgaccactttagaatgaaccagttcattgcatgctgaagcgacattgttggtcaagaaaccagtttctggcatagcgctatttgtagttacttttgctttctctgagagactgcagataataagatgtaaacattaacacctcgtgaatacaatttaacttccatttagctatagctttactcagcatgactgtagataaggatagcagcaaacaatcattggagcttaatgaacatttttaaaaataattaccaaggcctcccttctacttgtgagttttgaaattgttctttttattttcagggataccgtttaatttaattatatgatttgtctgcactcagtttattccctactcaaatctcagccccatgttgttctttgttattgtcagaacctggtgagttgttttgaacagaactgttttttccccttcctgtaagacgatgtgactgcacaagagcactgcagtgtttttcataataaacttgtgaactaas

SEQ ID NO: 1042 - DNA, 600 bp, Homo sapiens
tcaactccatcaagaacagctttctgggctcaccccgcttccaccgccggaaactgcaagttccgacgccggagagtatgtccaacctgacaccagagtcgtccccagagctggcgaagaagtcctggtttgggaacttcatcagcctggagaaggaggagcagatcttcgtggtcatcaaagacaaacctctgagctccatcaaggctgacatcgtgcacgccttcctgtcgattcccagtctcagccacagcgtcatctcccaaacgagcttccgggccgagtacaaggccacgggggggccagccgtgttccagaagccggtcaagttccaggttgatatcacctacacggagggtggggaggcgcagaaggagaacggcatctactccgtcaccttcaccctgctctcaggccccagccgtcgcttcaagagggtggtggagaccatccaggcccagctgctgagcacacacgacccgcctggcggcccagcacttgtcagaaccccccccaccagcgccaggactaagctggggtgctgggcttaagggccagaaggtggccaccagctacgagagtagcctctgacgctggcag

SEQ ID NO: 1043 - DNA, 600 bp, Homo sapiens; identical to SEQ ID NO: 1042

SEQ ID NO: 1044 - DNA, 1400 bp, Homo sapiens
ggacttgttttgtgggaagtggccaggcggatggtgagcaatggtatagtggaggattacaagccaccgttctacgatgtggttcccaatracccaagttttgaagatatgaggaaggtagtctgtgtsgatcaacaaaggccaaacatacccaacagatggttctcagacccgacattaacctctctggccaagctaatgaaagaatgctggtatcaaaatccatccgcaagactcacagcactgcgtatcaaaaagactttgaccaaaattgataattccctcgacaaattgaaaactgactgttgacattttcatagtgtcaagaaggaagatttgacgttgttgtcattgtccagctgggacctaatgctggcctgactggttgtcagaatggaatccatctgtctccctccccaaatggctgctttgacaaggcagacgtcgtacccagccatgtgttgggsagacatcaaaaccaccctaacctcgctcgatgactgtgaactgggcatttcacgaactgttcacactgcagagactaatgttggrcakwmastswtgyraaggtagggactggaggaacacagagaaatcctaaaagagatctgggcattaagtcagtggctttgcatagctttcacaagtctcctagacactccccacggraaactcaaggaggtggtgaatttttaatcagcaatattgcctgtgcttctcttctttattgcactaggaattctttgcattccttacttgcactgttactcttaattttaaagacccaacttgccaaaatgttggctgcgtactccactggtctgtctttggataataggaattcaatttggcaaaacaaaatgtaatgtcagactttgctgcattttacacatgtgctgatgtttacaatgatgccgaacattaggaattgtttatacacaactttgcaaattatttattacttgtgcacttagtagtttttacaaaactgcttygtgcatatgttaaagcttatttttatgtggtcttatgattttattacagaaatgtttttaacactatactctaaaatgsacattttcttttattatcagttaaaatcacattttaagtgcttcacatttgtatgtgtgtagactgtaactttttttcagttcatatgcagaacgtatttagccattacccacgtgacaccaccgaatatattayygatttagaagcaaagatttcagtagaattttagtcctgaacgctacggggaaaatgcattttcttcagaattatccattacgtgcatttaaactctgccagaaaaaaataactattttgttttaatctactttttgtatttagtagttatttgtataaattaaataaactgttttcaagtcaaaaaaaaa

SEQ ID NO: 1045 - DNA, 1400 bp, Homo sapiens; identical to SEQ ID NO: 1044

SEQ ID NO: 1046 - DNA, 600 bp, Homo sapiens
ctgctcwgataggcagcgagttggaayrtggatgcagtaggcagggtggyrgctgctcccyacrgccaggagtccagcccagcacccacctgagtccacctsagtcctgctcaaytgggtcatccgtgctctgggccctctggtcccacccacagagggagggctttggagcgaccagctgtcagctgcagtgkgggacagctgcacaaggrccmagcakgtctgtgtgtttacscagggkwctgccgcatggctcmtgcygagcagaagctgatggacgaccttctgaacaaaacccgttacmacaacctgatcygcccagccrccagctcctcacagctcatctccatcgagayrgagctctccctggcscagtgcatcagtgtggtagcttgctcaacaggtgaccttacaggctccctactykttgsgrgraataagaaccaractgsgrgaacygaygggtacagwggcccaggwgkargsrcagswscacaggmwgygmagsgcastagmgwkgygtrkgytmsamccyctctctssacagtcagmtckgaaagaagggggctttcagccaggctcgcccagactggggtctga

SEQ ID NO: 1047 - DNA, 600 bp, Homo sapiens
agytgcacaatywgattrtgttacarytcacctgcttcaagratgtggamatytytaatttyttctgtgasccwtctcaactyctcmaccttrsstgttcygacasyktcatcaatramatrktcatrtatttsatrggtgyyatatttggytktctyccyatctcagggatccttttstcttactataaaattgtytccyccattctragarttccawcatcagatgggaagtataaagccttctccacmtgtggctctcacctggcagttgtttgcttattttatggaacaggrcttgkagsstacctcagttcagctgygtymycwtyccccaggaagrgtryggtsrcytcagtgatgtacactgtggtcayccccatgctgaaccccttcatctacagcctgaggaacaaggacattcaaagtgccctgtgcaggctgcatggcagaatcatcaaatctcatcatctccatcctttttgttatatgggatagaaatggcagcaaaatttaacacctaggcctgcaaattctgcctccttggtcacattattttggttgcttgatggctttcattcctctctgggtttcgtatgtg

SEQ ID NO: 1048 - DNA, 600 bp, Homo sapiens; identical to SEQ ID NO: 1047

SEQ ID NO: 1049 - DNA, 600 bp, Homo sapiens
ctagctgtgatggcctatgaccactttgtcgccgwgtgccaccccttacattacacagcaargrtgacccatcagctctgtgccctgctggttgctggattatgggtggttgccaacctgaatgtccttctgcacaccctgctgatggctccactctcattctrtgcagacaatgccatcactcacttcttctgcgatgtgactcccctactgraactctcctgctcaracacacacctcaatgaggtcataatccttagtgagggtgccctggtcatgatcaccccattyctttgcawcctggcktcttatatgcacatcacctgcactgkcctgaaggkcccatccacaaagggaaggtggaaagccttctccacctgtggytctcacctggctgtggktctcctcttctacagcaccatcaytgctgtgtatttyaaccctctgtcctcccactcagctgmgaaagacactatrsctactgtgttgtatacagtagtgactcccatgctaaaccctttcatctacagcctgaggaacaggtacttgaaaggggctctgaaaaaagtaattggcagggtggtgttttctgtctgatga

SEQ ID NO: 1050 - DNA, 1400 bp, Homo sapiens
  misc_feature (1389)..(1389): n is a, c, g, or t
tgaccatatctgctacttcctctaccagatcctgcggggcctcaagtacatccactccgccaacgtgctccaccgagatctaaagccctccaacctgctcakcaacaccacctgcgaccttaagatttgtgatttcggcctggcccggattgccgatcctgagcatgaccacaccggcttcctgrsggagymygtrgmwmcgmgskggtaccgggccccagagatcatgctgaactccaagggctataccaagtccatcgacatctggtctgtgggctgcattctggctgagatgctctctaaccggcccatcttccctggcaagcactacctggatcagctcaaccacattctgggcatcctgggctccccatcccaggaggacctgaattgtatcatcaacatgaaggcccgaaactacctacagtctctgccctccaagaccaaggtggcttgggccaagcttttccccaagtcagactccaaagcccttgacctgctggaccggatgttaacctttaaccccaataaacggatcacagtggaggaagcgctggctcacccctacctggagcagtactatgacccgacggatgagccagtggccgaggagcccttcaccttcgccatggagctggatgacctacctaaggagcggctgaaggagctcatcttccaggagacagcacgcttccagcccggagtgctggaggccccctagcccagacagacatctctgcaccctggggcctggacctgcctcctgcctgcccctctcccgccagactgttagaaaatggacactgtgcccagcccggaccttggcagcccaggccggggtggagcatgggcctggccacctctctcctttgctgaggcctccagcttcaggcaggccaaggccttctcctccccacccgccctccccacggggcctcgggasctcaggtggscccagttcaatctcccgctgctgctgctgcgcccttaccttccccagcgtcccagtctctggcagttytggaatggaagggttctggctgccccaacctgctgaagggcagaggtggagggtggggggcgctgagtagggactcasggccatgcctgcccccctcatctcattcaaaccccaccctagtttccctgaaggaacattccttagtctcaagggctagcatccctgaggagccaggccgggccgaatcccctccctgtcaaagctgtcacttcgcgtgccctcgctgcttctgtgtgtggtgagcagaagtggagctggggggcgtggagagcccggcgcccctgccacctccctgacccgtctaatatataaatatagagatgtgtctawrrmwraaaaaaaaaaaaaaaaaaaaaaaaaaaaaaaancccgggggggg

SEQ ID NO: 1051 - DNA, 600 bp, Homo sapiens
ggctgcctgcttgagaggcttccttggtcaccggtggtgtgtgtggatcatacgcccaagtgtgggggccaaagcctgtgtgagaagttgctctgtgcctgtgaccagacggcagctgagtgcatgacctctgcctcctttaaccaaagcctcaagtccccaagcagactcgggtgccctgggcagccagcagcctgtgaagacagcctgcaccctgtgcccgcagcccccaccctgggctccagctctgaggaggacagcgaggaggaccctccacaggaggacctcggcagagccaagaggtttctgcggaagtcactgggtcccttggggatcgggcctcttcatggaagatagatgcccagagaaaatggctaacaccttcagtagcgtggctcctgctccaccttcagctctttatctctcagcctcctctgtcccttggagccttcttcccttcctttaactcagaggcggggagggaacagaggccgtgagccctgcccatgcctcatcagctgtggtcacctcacaagccaatgtacacttggagaaggcacaccatggtacctccatgctcctttagtgcactgtggaagc

SEQ ID NO: 1052 - DNA, 600 bp, Homo sapiens; identical to SEQ ID NO: 1051

SEQ ID NO: 1053 - DNA, 147 bp, Homo sapiens
tctctgggcatggtgctacgcatgaacgcccaggacgtgcgcgccctgggcatcaccctcatgggccaccagaagaagatcctgggcagcattcagaccatgcgggcccagctgaccagcacccaggggccccgccggcacctctga

SEQ ID NO: 1054 - DNA, 600 bp, Homo sapiens
gacgggctggcggtggacacgggcgtggacgtgtgggccttcggcgtgctcatcttctgcgtgctcaccggcaacttcccgtgggaggcggcgtcgggcgccgacgccttcttcgaggagttcgtgcgctggcagcggggccgcctgccggggctgccttcgcagtggcgccgcttcaccgagcccgcgctgcgcatgttccagcgcttactggccctggagcccgagcgccgcggcccagccaaggaggtgttccgcttcctcaagcacgagctcacgtccgagctgcgccgccggccctcgcaccgcgcgcgcaagccccccggggaccgcccgcccgccgccgggccactgcgcctcgaggcgcctgggccgctcaagcggacggtgctgaccgagmgcggcrgcggctcccggcccgcgccccccgcsgwcgggtcggygcccwwgcccgwgccggtgccggygccagygcccgygccggkgcckgkgcccgagcccggcswrgctccccmggggccccccggccssmccgacssccgcgcggacaagagcaaarrscagryrrtgctggccacggccatcgasmyctgygtctga

SEQ ID NO: 1055 - DNA, 600 bp, Homo sapiens
gaacaaatggaagagtgccggtgctgagacccttgaagtgcatccctgcgagcaagaagacagatccgcagaaggaccttaagcctgccccgcagcagtgtcgcctgcccaccatagtgcggaaaggcggaagataactgagcagcaccgtcgtctcgacttcggaggcaacaccaagcccgaccgggccaggcctgggtgatctgctgctgagacgccacggagggctggggatgcgcctgcgtccgtttcgcgctggccggggctctgggtgctgccctgcgccctgccgcacccgcggcccgcgcagctgcctaggatgttctgggctaatatacttgtaaaaccaccgcattctagggttttctttcattttcgttaagaatttggggcaggaaatactttgtaactttgtatatgaatcaaaacaaacgagcaggcatttctgtgatgtgttgggcgtggttggaaggtgggttctgcgtgtcccttcccagcgctgctggtcagtcgtggagcgccatcatgtcttaccagtgacgctgctgacacccctgacttttattaaagaataagctgtcgttaaaaaaaaaaaaaaaa

SEQ ID NO: 1056 - DNA, 600 bp, Homo sapiens
caacatataatggccctcctgcctctcccagcctgtcccatgaagccacaccattgtcccagactcgaagccgaggctccactaatctctttagtaaattaacttcaaaactcacaaggagtcgcaatgtatctgctgagcaaaaagatgaaaacaaagaagcaaagcctcgatccctacgcttcacctggagcatgaaaaccactagttcaatggatcccggggacatgatgcgggaaatccgcaaagtgttggacgccaataactgcgactatgagcagagggagcgcttcttgctcttctgcgtccacggagatgggcacgcggagaacctcgtgcagtgggaaatggaagtgtgcaagctgccaagactgtctctgaacggggtccggtttaagcggatatcggggacatccatagccttcaaaaatattgcttccaaaattgccaatgagctaaagctgtaacccagtgattatgatgtaaattaagtagcaagtaaagtgttttcctgaacactgatggaaatgtatagaataatatttaggcaataacgtctgcatcttctaaatcatgaaattaaagtctgaggacgagagc

SEQ ID NO: 1057 - DNA, 600 bp, Homo sapiens
ctggaagaagaggaggacttgaatgtgcttacatttgaagatcttctttgctttgcatatcaagttgccaaaggaatggaatttctggaatttaagtcgtgtgttcacagagacctggccgccaggaacgtgcttgtcacccacgggaaagtggtgaagatatgtgactttggattggctcgagatatcatgagtgattccaactatgttgtcaggggcaatgcccgtctgcctgtaaaatggatggcccccgaaagcctgtttgaaggcatctacaccattaagagtgatgtctggtcatatggaatattactgtgggaaatcttctcacttggtgtgaatccttaccctggcattccggttgatgctaacttctacaaactgattcaaaatggatttaaaatggatcagccattttatgctacagaagaaatatacattataatgcaatcctgctgggcttttgactcaaggaaacggccatccttccctaatttgacttcgtttttaggatgtcagctggcagatgcagaagaagcgatgtatcagaatgtggatggccgtgtttcggaatgtcctcacacctaccaaaacaggcga

SEQ ID NO: 1058 - DNA, 600 bp, Homo sapiens
ttgtgtgaaggctagcctaacagaacaggaggtatcaaactagctgctatgtgcaaacagcgtccattttttcatattagaggtggaacctcaagaatgactttattcttgtatctcatctcaaaatattaataatttttttcccaaaagatggtatataccaagttaaagacagggtattataaatttagagtgattggtggtatattacggaaatacggaacctttagggatagttccgtgtaagggctttgatgccagcatccttggatcagtactgaactcagttccatccgtaaaatatgtaaaggtaagtggcagctgctctatttaatgaaagcagttttaccggattttgttagactaaaatttgattgtgatacattgaacaaaatggaactcatttttttttaaggagtaaagatttttaattctgtgattgtgtgtatgtgtgttgaaactgtaaagcttttatgactctaatattaatctcttaaatgaaattaaaaggcaaaagaacatgattgagcttaaatgatcatttcttcctgcagtgattcttggattgttttctcatgtatttgaaaaaaaaaaaaaaaa

SEQ ID NO: 1059 - DNA, 1400 bp, Homo sapiens
agcgatgaggcagagcaatgtgacaagtatgacgcccaggcactctcagcccagctggtgccatcactctgctctgctgtgtttgtgatcggtgtcctggacaatctcctggttgtgcttatcctggtaaaatataaaggactcaaacgcgtggaaaatatctatcttctaaacttggcagtttctaacttgtgtttcttgcttaccctgcccttctgggctcatgctgggggcgatcccatgtgtaaaattctcattggactgtacttcgtgggcctgtacagtgagacatttttcaattgccttctgactgtgcaaaggtacctagtgtttttgcacaagggcaactttttctcagccaggaggagggtgccctgtggcatcattacaagtgtcctggcatgggtaacagccattctggccactttgcctgaattcgtggtttataaacctcagatggaagaccagaaatacaagtgtgcatttagcagaactcccttcctgccagctgatgagacattctggaagcattttctgactttaaaaatgaacatttcggttcttgtcctccccctatttatttttacatttctctatgtgcaaatgagaaaaacactaaggttcagggagcagaggtatagccttttcaagcttgtttttgccgtaatggtagtcttccttctgatgtgggcgccctacaatattgcatttttcctgtccactttcaaagaacacttctccctgagtgactgcaagagcagctacaatctggacaaaagtgttcacatcactaaactcatcgccaccacccactgctgcatcaaccctctcctgtatgcgtttcttgatgggacatttagcaaatacctctgccgctgtttccatctgcgtagtaacaccccacttcaacccagggggcagtctgcacaaggcacatcgagggaagaacctgaccattccaccgaagtgtaaactagcatccaccaaatgcaagaagaataaacatggattttcatctttctgcattatttcatgtaaattttctacacatttgtatacaaaatcggatacaggaagaaaagggagaggtgagctaacatttgctaagcactgaatttgtctcaggcaccgtgcaaggctctttacaaacgtgagctccttcgcctcctaccacttgtccatagtgtggataggactagtctcatttctctgagaagaaaactaaggcgcggaaatttgtctaagatcacataactaggaagtggcagaactgattctccagccctggtagcatttgctcagagcctacgcttggtccagaacatcaaactccaaaccctggggacaaacgacatgaaataaatgtattttaaaacatctaaaaaaaaaaaaaaaaaaaa

SEQ ID NO: 1060 - DNA, 101 bp, Homo sapiens
attgagttcctcaatgaggcctcggtcatgaagggcttcacctgccatcaygtggtgagtccagtgggggtgggacatgggctggctttcctgacccttcc

SEQ ID NO: 1061 - DNA, 600 bp, Homo sapiens
ccttttgcggtgataaccttctctggcagagtgactttacaacttaactaggaaacccatgtgaggctcctcagacaggatcttgaacagcccaaagtatcattctcagataggggcacccaagctaagggtattagccaaagatgccaggatgggtagctagcccatgtttagatccaggtctccaattcatggttatcagggcatgtgttcaacaacccccaaagtccacgcaggtggctkrtagaaacctttgggcagcctcatgtctgctaaaacagccatcttcaagacagcccctgaaaagagaccagttcaggtcctgccctgctgttctttgctggagatgaggaacaggtgctggggctaaagtttggggtagagcacaagggacaagaggaactcttggagttggctgggtgagagggctctccatttgctacctgtagtagcctgcctcttaactggttgcttctccctagttccagccctgccctggtctgatgccccaacactgcccttgctttgttttccctgtcacctccctattattaaatgttttctacagaaaaaaaaaaaaaaaaaaaaaaaaaaaaaaaa

SEQ ID NO: 1062 - DNA, 1400 bp, Homo sapiens
cgcacctgcggccagtgcctactgccctctcttgccgcccgcacctgcagccccgcacctgccgcttgcacctgcagccccgcgctctacccggttcaagcatggctgaccaggcgcccttcgacacggacgtcaacaccctgacccgcttcgtcatggaggagggcaggaaggcccgcggcacgggcgagttgacccagctgctcaactcgctctgcacagcagtcaaagccatctcttcggcggtgcgcaaggcgggcatcgcgcacctggcaaccccaggctatgacaacctgccgcttctctatggcattgctggttctaccaacgtgacaggtgatcaagttaagaagctggacgtcctctccaacgacctggttatgaacatgttaaagtcatcctttgccacgtgtgttctcgtgtcagaagaagataaacacgccatcatagtggaaccggagaaaaggggtaaatatgtggtctgttttgatccccttgatggatcttccaacatcgattgccttgtgtccgttggaaccatttttggcatctatagaaagaaatcaactgatgagccttctgagaaggatgctctgcaaccaggccggaacctggtggcagccggctacgcactgtatggcagtgccaccatgctggtccttgccatggactgtggggtcaactgcttcatgctggacccggccatcggggagttcattttggtggacaaggatgtgaagataaaaaagaaaggtaaaatctacagccttaacgagggctacgcyarggactttgaccctgccgtcactgagtacatccagaggaagaagttccccccagataattcagctccttatggggcccggtatgtgggctccatggtggctgatgttcatcgcactctggtctacggagggatatttctgtaccccgctaacaagaagagccccaatggaaaggctgagactgctgtacgaatgcaaccccatggcctacgtcatggagaaggctgggggaatggccaccactgggaaggaggccgtgttagacgtcattcccacagacattcaccagagggcgccggtgatcttgggrtcccccgacgacgtgctcgagttcctgaaggtgtatgagaagcactctgcccagtgagcacctgccctgcctgtatctggagaattgcctctacctggaccttttgtctcacacagcagtaccctgacctgctgtgcaccttacattcctagagagcagaaataaaaagcatgactatttccaccatcaaatgctgtagaatgcttggcactccctaaccaaatgctgtctccataatgccactggtgttaagatatattttgagtggatggaggagaaataaacttattcctccttaaaaaaaa

SEQ ID NO: 1063 - DNA, 600 bp, Homo sapiens
ctgctgaccgccatggcctatgaccrrytcctggscatctgycrgbccctcacctacagsacccgcatgagtcagacagtccagaggatgttggtggctgcgtcctkggcttgtgcyttcaccaacgcactgacccacactgtggscatgtccacgctcaacttctgtggscccaatgwgrtcaatcacttctactgtgacctcccacagctcttcmagctctcctgctccagcacccaactcaatgagctgctgctytttgywgyrgswkyywtmatggcwgkbrcmccywtggtyytcatyagtvwstcctayrbccaygtggyagctgcwgtbcyrcraatycgytcwgydgagggcmgraagaargccttctccacrtgtggctcccacctcacygtggtdkbyhthttctwtggdwsaggtrtcktyarctayrtgmgrctgggttcaghssarkcttcagacaaggataargsdgttggrrtyttcawsactgtbatcaaymcyatgctgaacccwmtyatctacagcytcagaaaymctgatgtkcagrgygcymtstgkmrrmtrytydyrgggrrgmgrtcactgrcytga

SEQ ID NO: 1064 - DNA, 1400 bp, Homo sapiens
gtccatctattgagccagcagctgttgtacctgttacacttgtgcagaaagattttaatgtggggggtgggagacttttacatttgagaggtaaaagtattttttttatgaagttgtgtatcttaataaaaaggactgaattagtttttattactatattaaagcatcaacatttcatgccacataaattatatttaataagaaccagattgaaatgagaacgtattggtgtttgtacagtgaacatgccaccttttttctcatggtttcagtagagcagctaccacatgttgcatgagttcatactttctacgtggcatttttctccctttctaaaatgaaagctgatgaatcttaaaaggaagaagaaaagaaaagctgtgcaaattcatagtaaagttcgttttttatatgtttccagtgtagcagatctctatataaatatataaatatatataactggcttattttcttttaatgtgcaatgatggctggatcatttaaagttctttttagaaaataacataagccaaagactcaagtgtaaatatgtctatatrrakawakmacatatatatwtaytggcttayttwcwttymwtytkygatggctaaaatactaccaccacacaatcatctttttttcctgaagaaagctttttctttagctaaaatcaattgtaaacgatttttgtagattattttttgtatgttttagtgtaagtagaagataaactttttattcataaaccaggaagcaatgttctttatagtgattctcttgtgtacatgcttgtgaattaaatttgtgtaaaatcccttggcaattgggtcttttaatataggaccaaattaaaacattttgctgaatatgtatagtttttcacaatttcattaggtaaataatggtttggtgatacattgagaaatgtacacattaaaaggccttgctgacaacttgcacaatgttgaacatagcctttaagcatcatttaaattttaaaggaatggagtttttcagcctgtggcccagcactggtcaagaaaacaagatggcaacatatatgctttcagggtcaaatttgagcaaactgtaaactgtcagggtgataaaatgtttctcttgatgtttacatgcacaagctttgcgttctgactataaaaagtgtgaacaaatcaatgccagattcctgttttgcgcattgtcatgggattcttaagtgaacctttctaaatgtggtcttgttcacatgctccacgtagctgtaacttcacatcatcagcttgcagtttgtaattgactaaagcattccagtgtcctctttctagattgccagctcatgacatggtgcttataaagatttaattaaagtaagaatgaaataaagtttttataattat

SEQ ID NO: 1065 - DNA, 600 bp, Homo sapiens
tatagatcctgagctcacagagtttatagttaaaaaaacaaacagaaacacaaacaatttggatcaaaaggagaaatgataagtgacaaaagcagcacaaggaatttccctgtgtggatgctgagctgtgatggcgggcactgggtacccaagtgaaggttcccgaggacatgagtctgtaggagcaagggcacaaactgcagctgtgagtgcgtgtgtgtgatttggtgtaggtaggtctgtttgccacttgatggggcctgggtttgttcctggggctggaatgctgggtatgctctgtgacaaggctacgctgacaatcagttaaacacaccggagaagaaccatttacatgcaccttatatttctgtgtacacatctattctcaaagctaaagggtatgaaagtgcctgccttgtttatagccacttgtgagtaaaaatttttttgcattttcacaaattatactttatataaggcattccacacctaagaactagttttgggaaatgtagccctgggtttaatgtcaaatcaaggcaaaaggaattaaataatgtacttttggctaaaaaaaaaaaaaaaaaaaaaaaaaaaaaa

SEQ ID NO: 1066 - DNA, 600 bp, Homo sapiens
gctacgaccgctacgtggccatctgccaccccctgcgctacaacgtgctcatgagcccrcggggctgcgcctgcctggtgggctgctcctgggctggtggctyggtcatggggatggtggtgacctcggccattttccamctsrcyttctgtggaymcmakgagatccascattttkywtgycatgtgccacctctgttgaagttggcctgtggarayratgtrcyrgykgtggccmwrggcgtgggcttggtrtgtatcayggcmctgctgggctgttttctcctcatcctcctctcctatgccttcatcgtggccgmcatcttgaagatcccttctgctgaaggtcggaacaaggccttctccacctgtgcctctcacctyaytgtggtsrtygtgcactatggctttgcctcygtcatytacctsaagcccaaargtccccastctcwggarggwgacaccytgatggscaycacctacrcrgtcctcacrcccttcctcagccccatcatcttcagcctcaggaacaargarctgaaggtygccatgaagargaccttcytcagyamactctatyccwsarrmammtgwaatgatg

SEQ ID NO: 1067 - DNA, 1400 bp, Homo sapiens
gaggacacactcacggaaatctcggagtggctggagcggmatccacgcsaggkggtcatcctggcctgcaraaacttcgaggggytgarcsaggacctgcacgagtacctggtcgcctgtatcaagaacatcttcggggacatgctgtgtcctcgtggggaggtgccgacactgcggcagctgtggtcccggggccaacaggtcatcgtctcctatgaagacgagagctccttgcgccggcaccacgagctgtggccaggagtcccctactggtggggaaacagggtgaagaccgaggcmctcatccgatacctggagaccatgaagagctgcggccgcycaggagggttgttcgtggccggcatcaacctcacggagaacctgcagtacgttctggcgcacccgtccgagtccctggagaagatgacgctgcccaaccttccgcggctgagcgcgtgggtccgagagcagtgcccggggccgggttcacggtgcaccaacatcatcgcgggggacttcatcggcgcagacggcttcgtcagtgacgtcatcgcgctcaatcagaagctgctgtggtgctgacgggacccttctgaagttcgggacgcggcggctgcagtttcacccccgaatttccaaatggagtttcgctctcgttgccgaggctggagtgtagtagtgtgatcctggctcactgcaacctccacctcccgggttccagcaaattctcctgcctcagcctcccaagtagctgggattgcaggcgcccgccaccacgcccggataatttttgtgtgtttagcagagacggggtttcaccatgttggccaggctggtctcgatctcctgacctcaggtgatccacccgcctcggcctcccaaagtgctgggatgacaggcgtgagccaccgcgcccggcctatacctcattttctacatgtcgcttgttggagctgctggttcaagttcccagccagccaatggatgccagcaccatttttactcccctttcccaagcaaatcgtgcatttttgtctaacgagagacatcagtttctcaggatgatcctcaagaacgttatggagtccatgttgcaataggttctctttgggacctaatgactcattttccaaaaatccgcttctacttttggtacccggttgctacggtgaaatgaaggtgccccgcatccagaaagacgcactcctggaccacaaccggcggctacctcagccccacggctctgcaggatcagggctcgggcaggccccgcggagatgaagaatttgcagggagcctccctgacttccgtcggctgtgaatccttgtctgtcaggggcgtatccacaaaatcaccaaattcatacagatcgtttaaataaatgaacatcattaaagtc

SEQ ID NO: 1068 - DNA, 600 bp, Homo sapiens
tgtcacctaccccaagtcgctttcccgggaagccgtggccatctgcaaggggttcctgaccaagcacccagggaagcgcctgggctcagggcctgatggggaacctaccatccgtgcacatggctttttccgctggattgactgggagcggctggaacgattggagatcccgcctcctttcagaccccgcccgtgtggccgcagcggcgagaactttgacaagttcttcacgcgggcggcgccagcgctgacccctccagaccgcctagtcctggccagcatcgaccaggccgatttccagggcttcacctacgtgaaccccgacttcgtgcacccggatgcccgcagccccaccagcccagtgcctgtgcccgtcatgtaatctcacccgccgccactaggtgtccccaacgtcccctccgccgtgccggcgggcagccccacttcacccccaacttcaccaccccctgtcccattctagatcctgcaccccagcattccagctctgcccccgcgggttctagacgcccctcccaagcgttcctggccttctgaactccatacagcctctacagccgtcccgcgttcaagacttgagcg

SEQ ID NO: 1069 - DNA, 600 bp, Homo sapiens
atatttaagcatggagatgatttacgtcaagatcaacttattcttcaaatcatttcactcatggacaagctgttacggaaagaaaatctggacttgaaattgacaccttataaggtgttagccaccagtacaaaacatgctggatattgcgtgatcacctatatacttggagttggagacaggcacctggataaccttttgctaacaaaaacaggcaaactcttccacatagactttggatatattttgggtcgggatccaaagcctcttcctccaccaatgaagctgaataaagaaatggtagaaggaatggggggcacacagagtgagcagtaccaagagttccgtaaacagtgttacacggctttcctccacctgcgaaggtattctaatctgattttgaacttgttttccttgatggttgatgcaaacattccagatattgcacttgaaccagataaaactgtgaaaaaggttcaggataaattccgcttagacctgtcggatgaagaggctgtgcattacatgcagagtctgattgatgagagtgtccatgctctttttgctgcagtggtggaacagattcacaagtttgcccag

SEQ ID NO: 1070 - DNA, 600 bp, Homo sapiens
  misc_feature (528)..(528): n is a, c, g, or t
  misc_feature (566)..(566): n is a, c, g, or t
  misc_feature (592)..(592): n is a, c, g, or t
ctctgacagcctttgggctgcctcggccccagcagccacagcaggaggaggtgacatcacctgtcgtgcccccctctgtcaagactccgacacctgaaccagctgaggtggagactcgcaaggtggtgctgatgcagtgcaacattgagtcggtggaggagggagtcaaacaccacctgacacttctgctgaagttggaggacaaactgaaccggcacctgagctgtgacctgatgccaaatgagaatatccccgagttggcggctgagctggtgcagctgggcttcattagtgaggctgaccagagccggttgacttctctgctagaagagaccttgaacaagttcaattttgccaggaacagtaccctcaactcagccgctgtcaccgtctcctcttagagctcactcgggccaggccctgatctgcgctgtggctgtccctggacgtgctgcagccctcctgtcccttccccccartcagtattaccctgtgaagccccttccctcagcagccgccttctagttnggggtaatcgtgatctgcggctccgcccagcctgtgtngaaaggaggccacgggaataagggancgaattta

SEQ ID NO: 1071 - DNA, 600 bp, Homo sapiens
tcctgagcatgggccatcactgccagtcaggggctgggggctgagccctcaccccccgcctcccctactgttctcatggtgttggcctcgtgtttgctatgccaactagtagaaccttctttcctaatccccttatcttcatggaaatggactgactttatgcctatgaagtccccaggagctacactgatactgagaaaaccaggctctttggggctagacagactggcagagagtgagatctccctctctgagaggagcagcagatgctcacagaccacactcagctcaggccccttggagcaggatggctcctctaagaatctcacaggacctcttagtctctgccctatacgccgccttcactccacagcctcacccctcccacccccatactggtactgctgtaatgagccaagtggcagctaaaagttgggggtgttctgcccagtcccgtcattctgggctagaaggcaggggaccttggcatgtggctggccacaccaagcaggaagcacaaactcccccaagctgactcatcctaactaacagtcacgccgtgggatgtctctgtccacattaaactaacagcattaatgc

SEQ ID NO: 1072 - DNA, 1400 bp, Homo sapiens
ccgtgatattgtacagaagctattgcagtacaaggcagacatcaatgcagtgaatgaacaygggaatgtgcccctgcactatgcctgtttttggggccaagatcaagtggcagaggacctggtggcaaatggggcccttgtcagcatctgtaacaagtatggagagatgcctgtggacaaagccaaggcacccctgagagagcttctccgagagcgggcagagaagatgggccagaatctcaaccgtattccatacaaggacacattctggaaggggaccacccgcactcggccccgaaatggaaccctgaacaaacactctggcattgacttcaaacagcttaacttcctgacgaagctcaacgagaatcactctggagagctatggaagggccgctggcagggcaatgacattgtcgtgaaggtgctgaaggttcgagactggagtacaaggaagagcagggacttcaatgaagagtgtccccggctcaggattttctcgcatccaaatgtgctcccagtgctaggtgcctgccagtctccacctgctcctcatcctactctcatcacacactggatgccrtatggatccctctacaatgtactacatgaaggcaccaatttcgtcgtggaccagagccaggctgtgaagtttgctttggacatggcaaggggcatggcyttcctacacacactagagcccctcatcccacgacatgcactcaatagccgtagtgtaatgattgatgaggacatgactgcccgaattagcatggctgatgtcaagttctctttccaatgtcctggtcgcatgtatgcacctgcctgggtagcccccgaagctctgcagaagaagcctgaagacacaaacagacgctcagcagacatgtggagttttgcagtgcttctgtgggaactggtgacacgggaggtaccctttgctgacctctccaatatggagattggaatgaaggtggcattggaaggccttcggsctaccatcccaccaggtatttcccctcatgtgtgtaagctcatgaagatctgcatgaatgaagaccctgcaaagcgacccaaatttgacatgattgtgcctatccttgagaagatgcaggacaagtaggactggaaggtccttgcctgaactccagaggtgtcgggacatggttgggggaatgcacctccccaaagcagcaggcctctggttgcctcccccgcctccagtcatggtactaccccagccatggggtccatccccttcccccatccctaccactgtggccscaagaggggcgggctcagagctttgtcacttgccacatggtgtctyccaacatgggagggatcagccccgcctgtcacaataaagtttattatgaaaamaaaaaaaarrwrwrraa

SEQ ID NO: 1073 - DNA, 600 bp, Homo sapiens
tccgtgcttggatctggaacaaatggaagagtgccggtgctgagacccttgaagtgcatccctgcgagcaagaagacagatccgcagaaggaccttaagcctgccccgcagcagtgtcgcctgcccaccatagtgcggaaaggcggaagataactgagcagcaccgtcgtctcgacttcggaggcaacaccaagcccgaccgggccaggcctgggtgatctgctgctgagacgccacggagggctggggatgcgcctgcgtccgtttcgcgctggccggggctctgggtgctgccctgcgccctgccgcacccgcggcccgcgcagctgcctaggatgttctgggctaatatacttgtaaaaccaccgcattctagggttttctttcattttcgttaagaatttggggcaggaaatactttgtaactttgtatatgaatcaaaacaaacgagcaggcatttctgtgatgtgttgggcgtggttggaaggtgggttctgcgtgtcccttcccagcgctgctggtcagtcgtggagcgccatcatgtcttaccagtgacgctgctgacacccctgacttttattaaagaataagctgtcgtt

SEQ ID NO: 1074 - DNA, 1400 bp, Homo sapiens
gctgaaagaagtggtgcttgggatgttttacctgcacgaccagaacccggtgctcctgcaccgggacctcaagccatccaacgtcctgcyggacccagagctgcacgtcaagctggcagattttggcctgtccacatttcagggaggctcacagtcagggacagggtccggggagccagggggcaccctgggctacttggccccagaactgtttgttaacgtaaaccggaaggcctccacagccagtgacgtctacagcttcgggatcctaatgtgggcagtgcttgctggaagagaagttgagttgccaaccgaaccatcactcgtgtacgaagcagtgtgcaacaggcagaaccggccttcattggctgagctgccccaagccgggcctgagactcccggcttagaaggactgaaggagctaatgcagctctgctggagcagtgagcccaaggacagaccctccttccaggaatgcctaccaaaaactgatgaagtcttccagatggtggagaacaatatgaatgctgctgtctccacggtaaaggatttcctgtctcagctcargagcagcaataggagattttctatcccagagtcaggccaaggagggacagaaatggatggctttaggagaaccatagaaaaccagcactctcgtaatgatgtcatggtttctgagtggctaaacaaactgaatctagaggagcctcccagctctgttcctaaaaaatgcccgagccttaccaagaggagcagggcacaagaggagcaggttccacaagcctggacagcaggcacatcttcagattcgatggcccaacctccccagactccagagacctcaactttcagaaaccagatgcccagccctacctcaactggaacaccaagtcctggaccccgagggaatcagggggctgagagacaaggcatgaactggtcctgcaggaccccggagccaaatccagtaacagggcgaccgctcgttaacatatacaactgctctggggtgcaagttggagacaacaactacttgactatgcaacagacaactgccttgcccacatggggcttggcaccttcgggcaaggggaggggcttgcagcaccccccaccagtaggttcgcaagaaggccctaaagatcctgaagcctggagcaggccacagggttggtataatcatagcgggaaataaagcaccttccaagcttgcctccaagagttacgagttaaggaagagtgccaccccttgaggcccctgacttccttctagggcagtctggcctgcccacaaactgactttgtgacctgtcccccaggagtcaataaacatgatggaatgctaaaaaaaaaaaaaaaaaaaaaaaaaaaaaaaaaaaaaaaaaaggggcggccgc

SEQ ID NO: 1075 - DNA, 1400 bp, Homo sapiens
gctgcgggagcaggcacagggagtgtggagcctggcggcgggacggcgggatccggtgggagccggagtcccgccgaggggggctggaggtggaggggcccggcgaggccgcgatgaagccgagcggcgaggaccaggcggcgctggcggccggcccctgggaggagtgcttccaggcggccgtgcagctggcgctgcgggcaggacagatcatcagaaaagcccttactgaggaaaaacgtgtctcaacaaaaacatcagctgcagatcttgtgacagaaacagatcaccttgtggaagatttaattatttctgagttgcgagagaggtttccttcacacaggttcattgcagaagaggccgcggcttctggggccaagtgtgtgctcacccacagcccgacgtggatcatcgaccccatcgacggcacctgcaattttgtgcacagattcccgactgtggcggttagcattggatttgctgttcgacaagagcttgaattcggagtgatttaccactgcacagaggagcggctgtacaygsrccrgyrkgstmrggrmrcctkctgcaaksrccwgsggctcygcrgwcwccsssgasmcmgatctctcaaaggccttggttctgacagaaattggccccaaacgtgaccctgcgaccctgaagctgttcctgagtaacatggagcggctgctgcatgccaaggcgcatggggtccgagtgattggaagctccacattggcactctgccacctggcctcaggggccgcggatgcctattaccagtttggcctgcactgctgggatctggcggctgccacagtcatcatcagagaagcaggcggcatcgtgatagacacttcgggtggacccctcgacctcatggcttgcagagtggttgcggccagcacccgggagatggcgatgctcatagctcaggccttacagacgattaactatgggcgggatgatgagaagtgactgcggctgaggcaaagctgctcccaaggcctccctgggctgctgtgggctcctggggaggtggccctcgtggcccacgctccatgccagtggctcacgctctgctcctggctaccccagagggagttgtcacgctacagtgagtggctggccttttaaatcgacgtctctctcaccaggatttggtgtttagctgtttctctctttaatctcacgtagcctttttcaggttagtacgtgttcttctgtcagggccaaaactcaaatctcctgtgaaatacgtattgataatccaatcttgatttttccccccagaatataaatctcaggtaataaggctttagaactgctgataaagcggatcgttctcaggccctccccccggagtacttcagaatgcaataaatcaaaataatggc

SEQ ID NO: 1076 - DNA, 600 bp, Homo sapiens
aggatggttctaggaagaacacacataaaagatgtagcagccaaaaggaaaattgagttaaacagttacttacagagtttgatgaatgcttcaacggatgtagcagagtgtgatcttgtttgtactttcttccaccctttacttcgtgatgagaaagctgaagggatagctaggtctgcagatgcaggttccttcagtcctactccaggccaaataggaggagctgtgaaattatccatctcttaccgaaatggtactcttttcatcatggtgatgcatatcaaagatcttgttactgaagatggagctgacccaaatccatatgtcaaaacatacctacttccagataaccacaaaacatccaaacgtaaaaccaaaatttcacgaaaaacgaggaatccgacattcaatgaaatgcttgtatacagtggatatagcaaagaaaccctaagacagcgagaacttcaactaagtgtactcagtgcagaatctctgcgggagaattttttcttgggtggagtaaccctgcctttgaaagatttcaacttgagcaaagagacggttaaatggtatcagctgactgcggcaacatacttgtaa

SEQ ID NO: 1077 - DNA, 1400 bp, Homo sapiens
acaagyrggagcacattamcytggrctgmracatrgwtttygacattgytgggccytcmwtccrggstgctctggtgctrggttayragggctggctggcyrgctaycagatgaattttgagamtrcaaartccvgagtgaccyagagcaacwktgyarttggctrcragactgatgaattcyrryttcacacwaawgtgaatgaygggacagagtttggyrgcyycatttacyagaargtgaacaagaagttggagacyrcygtcaatctyrcctggacagcaggaaacagtaacackmgyttygraatagcagccaagtatywgatygaccctgamgcctrcttctyrgctaaartgaacaactccagcctgakaggtttaggatacamtcaracyctaaagccaggtatyaaactgacactgtcagctctyctggatggsaagaacgtcaatgctggtggccacaagcttggtykaggactrgaatttcaagcataaatgaayacystacaattgtttaattttaaactattttgyrgcmkrgcyacyttcagaatttagtgtatcttttaatgttgtatgtctkggaygcaagtattgctaaatatgttasmccyccargttaaagwtgattcagctttaagatgttacccttycrgrggtacagaagaaacbyawttccaaaaaargyyctttcagtggtagactyggrgrgaacwtggyrgccmytytgagrtgccargtttctttttymtctagaratggctgyragtggaagckgataatatgtagryrctttgtaarttcatattgagtaaatgaatgaaattktgatttcctgagaatbgaaccwtggttycctaaccctaaytgakkagrggctyrytkcttgatkktgtgtacaarctcacctgaawgggactyttttagacagakctycatgacctkttcccascccagttcatchtyayctcttttacrccaaaaggtctgcagggtgkgktmactstktcttttstgccattttggggtggagarggtrratgtgatgaarccaataattcaggacttaytccttyytgtgttgygttttttwttgcccttgcacsagagtatgaaatagmttccaggarctccakctrtaagcwtggraghgtctgtrtgattgtaatcayatgrtkacarcactcagaatctaaaytggacttctgyyrtrttctcaccmytcratttgttttttagcartytaatggstacattttagmgtcttscattttbtgtggaattarwtcctccccttcaaatgctgtarttaayatcasttaaraaaaacttgaataaaatrttgaaacctcaaaaatccaccgccctgatccaatcacttcccaccaggaccct

SEQ ID NO: 1078 - DNA, 1400 bp, Homo sapiens
tcaagcagttcctgaggatttccaagagcaaggatgaaaaattgaagtcacagcccctcagcaccaagcagaaggtggccctatgcacccaggtagccctgggcatggagcacctgtccaacaaccgctttgtgcataaggacttggctgcgcgtaactgcctggtcagtgcccagagacaagtgaaggtgtctgccctgggcctcagcaaggatgtgtacaacagtgagtactaccacttccgccaggcctgggtgccgctgcgctggatgtcccccgaggccatcctggagggtgacttctctaccaagtctgatgtctgggccttcggtgtgctgatgtgggaagtgtttacacatggagagatgccccatggtgggcaggcagatgatgaagtactggcagatttgcaggctgggaaggctagacttcctcagcccgagggctgcccttccaaactctatcggctgatgcagcgctgctgggccctcagccccaaggaccggccctccttcagtgagattgccagcgccctgggagacagcaccgtggacagcaagccgtgaggagggagcccgctcaggatggcctgggcaggggaggacatctctagagggaagctcacagcatgatgggcaagatccctgtcctcctgggccctgaggcccctgccctagtgcaacaggcattgctgaggtctgagcagggcctggcctttcctcctcttcctcaccctcatcctttgggaggctgacttggacccaaactgggcgactagggctttgagctgggcagttttccctgccacctcttcctctatcagggacagtgtgggtgccacaggtaaccccaatttctggccttcaacttctccccttgaccgggtccaactctgccactcatctgccaactttgcctggggagggctaggcttgggatgagctgggtttgtggggagttccttaatattctcaagttctgggcacacagggttaatgagtctcttggcccactggtcccacttgggggtctagaccaggattatagaggacacagcaagtgagtcctccccactctgggcttgtgcacactgacccagacccacgtcttccccacccttctctcctttcctcatcctaagtgcctggcagatgaaggagttttcaggagcttttgacactatataaaccgccctttttgtatgcaccacgggcggcttttatatgtaattgcagcgtggggtgggtgggcatgggaggtaggggtgggccctggagatgaggagggtgggccatccttaccccacacttttattgttgtcgttttttgtttgttttgtttttttgtttttgtttttgtttttacactcgctgctctcaataaataagccttttttacaa

SEQ ID NO: 1079 - DNA, 124 bp, Homo sapiens
gctcctgaccccgccatgcatgcagcgccacctggaagccgcgcggccgctttggttttttgtttggttggttccattttctttttttctttttttttttaagaaaaaataaaaggtggatttg

SEQ ID NO: 1080 - DNA, 600 bp, Homo sapiens
cttcacgattcttaccctttcttttgaatcaatctggcttctgcattactattaactctgcatagacaaaggccttaacaaacgtaatttgttatatcagcagacactccagtttgcccaccacaactaacaatgccttgttgtattcctgcctttgatgtggatgaaaaaaagggaaaacaaatatttcacttaaactttgtcacttctgctgtacagatatcgagagtttctatggattcacttctatttatttattattattactgttcttattgtttttggatggcttaagcctgtgtataaaaaaraaaamwwrtstwsaatctgtgaagcctttatctatgggagattaaaaccagagagaaagaagatttattatgaaccgcaatatgggaggaacaaagacaaccactgggatcagctggtgtcagtccctacttaggaaatactcagcaactgttagctgggaagaatgtattcggcaccttcccctgaggacctttctgaggagtaaaaagactactggcctctgtgccatggatgattcttttcccatcaccagaaatgatagcgtgcagtagagagcaaagatggctt

SEQ ID NO: 1081 - DNA, 600 bp, Homo sapiens
ccccggagttcctggcccctgaggtgctgacggacacgtcgtacacgcgagctgtggactggtggggactgggtgtgctgctctacgagatgctggttggcgagtccccattcccaggggatgatgaggaggaggtcttcgacagcatcgtcaacgacgaggttcgctacccccgcttcctgtcggccgaagccatcggcatcatgagaaggctgcttcggaggaacccagagcggaggctgggatctagcgagagagatgcagaagatgtgaagaaacagcccttcttcaggactctgggctgggaagccctgttggcccggcgcctgccaccgccctttgtgcccacgctgtccggccgcaccgacgtcagcaacttcgacgaggagttcaccggggaggcccccacactgagcccgccccgcgacgcgcggcccctyacagccgcggagcaggcagccttcctggacttcgacttcgtggccgggggctgctagccccctcccctgcccctgcccctgcccctgcccgagagctcttagtttttaaaaaggcctttgggatttgccggaaaaaaaaaaaaaaaaaaaaaaggaattc

SEQ ID NO: 1082 - DNA, 600 bp, Homo sapiens
cataaactgtgtgcagactcaataaaatcatgtacatttctgaaatgacctcaagatgtcctccttgttctactcatatatatctatcttatatagtttactattttacttctagagatagtacataaaggtggtatgtgtgtgtatgctactacaaaaaagttgttaactaaattaacattgggaaatcttatattccatatattagcatttagtccaatgtctttttaagcttatttaattaaaaaatttccagtgagcttatcatgctgtctttacatggggttttcaattttgcatgctcgattattccctgtacaatatttaaaatttattgcttgatacttttgacaacaaattaggttttgtacaattgaacttaaataaatgtcattaaaataaataaatgcaatatgtattaatattcattgtataaaaatagaagaatacaaacatatttgttaaatatttacatatgaaatttaatatagctatttttatggaatttttcattgatatgaaaaatatgatattgcatatgcatagttcccatgttaaatcccattcataactttcattaaagcatttactttgaatttc

SEQ ID NO: 1083 - DNA, 1400 bp, Homo sapiens
ctccaccctctagtaaaggggaagaggctgctggttatgcccaggagtctcaaagggaggaggccagctgagtaggcagcctggtgagggggggcaggggatgggcaggagggtgggagagtggatgaggggcttctcactgtacatagagtcactggcatgatgccctcgctcccccatgcccccacatcccagtggggcataactaggggtcacgggagagcagtctcgtctcctgtgtgtatgtgtgtgagtggtgggcaggccagtggcagggccggccccagcccctgcatggattccttgtggcttttctgtcttttgctagcttcaccagtttctgttccttgtgggatgctgctctagggatactcagggggctcctgctctccttccccttcccttcttgcctcaccattcccctaggcaggccctgcaggtcccacactctcccaggccctaaacttgggcggccttgccctgagagctggtcctccagcgaggccctgtcagcggtcttaggctcctgcacatgaaggtgtgtgcctgtggtgtgtgggctgctctaggagcagatacaggctggtatagaggatgcagaaaggtagggcagtatgtttaagtccagacttggcacatggctagggatactgctcactagctgtggaggtcctcaggagtggagagaatgagtaggagggcagaagcttccatttttgtccttcctaagaccctgttatttgtgttatttcctgcctttccgagtcctgcagtgggctgccctgtaccctgaacctcatgagcctctaagggaaaggaggaacaattaggacgtggcaatgagacctggcagggcagagtacaagcccagcacccagtgtcccagccttamtgggtccttaccmtgggccaaacagggagggctgatacctccttgctcttcctagatgcccacctcctacaatctcagcccacaagtcctctccaccctagggggcttgctgcatggcaataactcataatytgatttggaggtttgccctttacaggggcagattttctgctcagttcaacaatgaaatgaagaggaactccctctttctacagctcacttctatcagaggcccaggtgcctcagagccacattgagttgctttttctgggatgaggaagtagggttaaactccccagtttcctgagggaggctcctgacaggtgccctttgtcagaccctaccacagcctggataggcagccacattggtcctcgcccttgctcggcactccgtggtggtcctgcccttctccctgcatgcctgtgggtctgctctggtgtgtgaaggtcggtgggttaactgtgtgcctactgaacctggcaaataaacatcaccctgcaaagcc

SEQ ID NO: 1084 - DNA, 600 bp, Homo sapiens
ttttggactaatgttactgtccaagttctttctcaagaaaccacatctggttcagaagagtgtcaagttggactctttgaactctgttgctgtctgagcaatcgtggtgcctagactttgcattccttgttctgttgacctgcatacatgtgagagctatttctttaagaactatataggctgtgaaaacgcactttctttcccccaaagagctgggaatttatgaagttatggcaatgaactgcagcatgctgggacaattatttgactacttttttttgtaatattgtcaaatgtctctatggattctgacagagatttctttttgttttgttattcttttggttgtcagtttcattttaacgagtgtaactagtaacattttattctttggattttgtataattacagtacatgattgtgtattgtgacatgaatgctgtcaaaatgacattgatggcattgtgaagcctgttactttgtgtcacttcctgataaataagaggtgatgacatggatatacaacagaaaacactttgagttgaaagtaaacacaagctggctgcttccctgtggcaactgtggctaaaaaaaaaaaaa

SEQ ID NO: 1085 - DNA, 600 bp, Homo sapiens
attgagcatgacatcttccccagcagccacctcctctgagatccctcaccttctccaaaccagatccaatcaaacctcagcccgaggaaacatgctccccmacgygytctcctgtgcttctgttttgtccccctgctggggggacaggagagggagtggtgaggccctgggcctccagagcctggctctgctttgtgctgtggcttagccggaggggacgtggccaagggtgaggtggccaaaaccagaaccagcagtctcctgccttgttccctccctggccctcaggccctccttccagggatgtctctccagctctactttatgtcctgaagctgacccgaggtcttcctatctggaatgactagagggagccaagaggatggggtgggggccagggccccccagggcctatcgtgggagagcctgggcaggatcccatcagaaaggtgctgactaaactggttgcccggacactcaacagcctccacctccctttctaccctcacagctcctggggccttcctggctctggcccagaaagtgattcatttgtaaattatcatggttttctttctgcattaaaatgctcatttccgg

SEQ ID NO: 1086 - DNA, 600 bp, Homo sapiens
ccaagtcgagaagaatccatgaactgtgaggcctttaccgtcacccttatcagcaaagacagactgtgcctctctaatgaagaacaaattatcatccatgactttatccttgaagctacacaggatgactatgtcttagaagttcggcactttcagtgtcccaaatggcctaacccagatgcccccataagtagtacctttgaacttatcaacgtcatcaaggaagaggccttaacaagggatggtcccaccattgttcatgatgagtatggagcagtttcagcaggaatgttatgtgcccttaccaccctgtcccagcaactggagaatgaaaatgctgtggatgttttccaggttgcaaaaatgatcaatcttatgaggcctggagtattcacagacattgaacaataccagttcatctataaagcaakgcttagcttggtcagcactaaagaaaatggaaatggtcccatgacagtagacaaaaatggtgctgttcttattgcagatgaatcagaccctgctgagagcatggagtccctagtgtgactggaatcctgaaagggcacttaatttgtaaacttctgaagactgagaact

SEQ ID NO: 1087 - DNA, 600 bp, Homo sapiens
gaaatggcagaaaacgggcaatgctgtgagagccattggaagactgtcctctatggcaatgatctcagggctcagtggcaggaaatcctcaacagggtcaccaaccagcccgctcaatgcagaaaaactagaatctgaagaagatgtgtcccaagctttccttgaggctgttgctgaggaaaagcctcatgtaaaaccctatttctctaagaccattcgcgatttagaagttgtggagggaagtgctgctagatttgactgcaagattgaaggatacccagaccccgaggttgtctggttcaaagatgaccagtcaatcagggagtcccgccacttccagatagactacgatgaggacgggaactgctctttaattattagtgatgtttgcggggatgacgatgccaagtacacctgcaaggctgtcaacagtcttggagaagccacctgcacagcagagctcattgtggaaacgatggaggaaggtgaaggggaaggggaagaggaagaagagtgaaacaaagccagagaaaagcagtttctaagtcatattaaaaggactatttctctaaaactcaaaaaaaaaaaaaaagggcggcc

SEQ ID NO: 1088 - DNA, 277 bp, Homo sapiens
tgaagatcttctctctggatccggaagaatcataatatttatcaactctgtaaactctcgggaaagcacttgtgctagcaaggtaacctggcctttgtgaattcatgcactagtctccatttctgggaagggcttcagcaccagcagcacataccactgtgggggcaagtgaaaaagtttcactttgggtagatggatataatcctcccgtaaagcttcatttgcaagaaaaccactatcacccttttccacctgtggaataaagatccttcttaca

SEQ ID NO: 1089 - DNA, 277 bp, Homo sapiens; identical to SEQ ID NO: 1088

SEQ ID NO: 1090 - DNA, 530 bp, Homo sapiens
aagatttcatcatcggatgcaaaaacgattccgaaacataatatcaattttatcttcagcttctgttattaattcttatgacgaaaatgacatccgtcattccaaacctctgctagttcagatggattgcaattataatggatatgttgcgggtattccaaattctcttgtgactctcagcgtatgttcaggactcaggggaacaatgcagctgaaaaacatctcatatggaattgaaccgatggaggctgtatcaggatttatacacaagatttatgaagaaaaatatgctgacactaatattctcttagaagaaaatgacacttatacttggtttaattcagagtatcaagtcagaaaaagttcagaaaaaactgactttattaagttattccctcgatatattgaaatgcatattgttgtggacaaaaatttggagtgtcagcagctatagtgaagtttcaagaagggggaatgctgtcgggactgagcaggcaatggcctaaaaacaataaaaagccctactaaaa

SEQ ID NO: 1091 - DNA, 530 bp, Homo sapiens; identical to SEQ ID NO: 1090

SEQ ID NO: 1092 - DNA, 275 bp, Homo sapiens
  misc_feature (171)..(171): n is a, c, g, or t
  misc_feature (174)..(174): n is a, c, g, or t
  misc_feature (176)..(176): n is a, c, g, or t
  misc_feature (178)..(178): n is a, c, g, or t
  misc_feature (184)..(184): n is a, c, g, or t
  misc_feature (191)..(191): n is a, c, g, or t
  misc_feature (194)..(194): n is a, c, g, or t
  misc_feature (196)..(196): n is a, c, g, or t
  misc_feature (200)..(200): n is a, c, g, or t
  misc_feature (206)..(206): n is a, c, g, or t
  misc_feature (210)..(210): n is a, c, g, or t
  misc_feature (216)..(216): n is a, c, g, or t
  misc_feature (218)..(219): n is a, c, g, or t
  misc_feature (226)..(226): n is a, c, g, or t
  misc_feature (230)..(231): n is a, c, g, or t
  misc_feature (234)..(235): n is a, c, g, or t
  misc_feature (237)..(238): n is a, c, g, or t
  misc_feature (242)..(242): n is a, c, g, or t
  misc_feature (246)..(246): n is a, c, g, or t
  misc_feature (249)..(249): n is a, c, g, or t
  misc_feature (251)..(251): n is a, c, g, or t
  misc_feature (255)..(255): n is a, c, g, or t
  misc_feature (264)..(266): n is a, c, g, or t
gtggcaaagcttcatccagtctaggtcttcaggattttgatttgctccgggtaataggaagaggaagttatgccaaagtactgttggttcgattaaaaaaaacagatcgtatttatgcaatgaaagtttgtgaaaaaagagcttgttaatgatgatgaggatattgattgngtncncnacgganaagcatngtntntganccggcntttnttcatntnntttcccncttnncgnntnntttnctcngcngncccngattttatnnncggtcctat

SEQ ID NO: 1093 - DNA, 300 bp, Homo sapiens
  misc_feature (198)..(198): n is a, c, g, or t
  misc_feature (218)..(218): n is a, c, g, or t
  misc_feature (224)..(224): n is a, c, g, or t
  misc_feature (226)..(226): n is a, c, g, or t
  misc_feature (240)..(240): n is a, c, g, or t
  misc_feature (248)..(248): n is a, c, g, or t
  misc_feature (257)..(257): n is a, c, g, or t
  misc_feature (267)..(268): n is a, c, g, or t
  misc_feature (278)..(278): n is a, c, g, or t
  misc_feature (280)..(280): n is a, c, g, or t
  misc_feature (287)..(287): n is a, c, g, or t
aatttcgttgctgtcggtggaagataaccacaaggccgacatcagctcctggttcatggaagccatagagtacatcgatgccgtgaaggactgccgtgggcgcgtgctggtgcactgccaggcgggcatctcgcggtcggccaccatctgcctggcctacctgatgatgaagaaacgggggaggtgtgggaggttttnccaagtgcttctgtagatancgtcantnggactagatattcnacaggccntaacttgantctattgccnntgtctttatnanatgtacnttttatattctgt

SEQ ID NO: 1094 - DNA, 300 bp, Homo sapiens; identical to SEQ ID NO: 1093
  misc_feature (198)..(198): n is a, c, g, or t
  misc_feature (218)..(218): n is a, c, g, or t
  misc_feature (224)..(224): n is a, c, g, or t
  misc_feature (226)..(226): n is a, c, g, or t
  misc_feature (240)..(240): n is a, c, g, or t
  misc_feature (248)..(248): n is a, c, g, or t
  misc_feature (257)..(257): n is a, c, g, or t
  misc_feature (267)..(268): n is a, c, g, or t
  misc_feature (278)..(278): n is a, c, g, or t
  misc_feature (280)..(280): n is a, c, g, or t
  misc_feature (287)..(287): n is a, c, g, or t

SEQ ID NO: 1095 - DNA, 291 bp, Homo sapiens
  misc_feature (172)..(172): n is a, c, g, or t
  misc_feature (175)..(175): n is a, c, g, or t
  misc_feature (186)..(186): n is a, c, g, or t
  misc_feature (196)..(196): n is a, c, g, or t
  misc_feature (214)..(214): n is a, c, g, or t
  misc_feature (216)..(216): n is a, c, g, or t
  misc_feature (219)..(219): n is a, c, g, or t
  misc_feature (224)..(224): n is a, c, g, or t
  misc_feature (227)..(227): n is a, c, g, or t
  misc_feature (229)..(229): n is a, c, g, or t
  misc_feature (232)..(232): n is a, c, g, or t
  misc_feature (241)..(241): n is a, c, g, or t
  misc_feature (244)..(244): n is a, c, g, or t
  misc_feature (248)..(250): n is a, c, g, or t
  misc_feature (253)..(253): n is a, c, g, or t
  misc_feature (255)..(256): n is a, c, g, or t
  misc_feature (261)..(262): n is a, c, g, or t
  misc_feature (264)..(266): n is a, c, g, or t
  misc_feature (268)..(270): n is a, c, g, or t
  misc_feature (276)..(276): n is a, c, g, or t
  misc_feature (280)..(282): n is a, c, g, or t
aattccgttgctgtcggcagtttggggaagtctggatgggttactataacaacagtaccaaggtggctgtgaaaaccctgaagccaggaactatgtctgtgcaagccttcctggaagaagccaacctcatgaagaccctgcagcatgacaagctcgtgaggctctacgctgnggncaccagggaangagcccattnacatcatcatcgattacntngtnaaggncantntgntgaattttntgnttannnatnanngccannannntnnntctacnaaannntatttctat

SEQ ID NO: 1096 - DNA, 291 bp, Homo sapiens; identical to SEQ ID NO: 1095
  misc_feature (172)..(172): n is a, c, g, or t
  misc_feature (175)..(175): n is a, c, g, or t
  misc_feature (186)..(186): n is a, c, g, or t
  misc_feature (196)..(196): n is a, c, g, or t
  misc_feature (214)..(214): n is a, c, g, or t
  misc_feature (216)..(216): n is a, c, g, or t
  misc_feature (219)..(219): n is a, c, g, or t
  misc_feature (224)..(224): n is a, c, g, or t
  misc_feature (227)..(227): n is a, c, g, or t
  misc_feature (229)..(229): n is a, c, g, or t
  misc_feature (232)..(232): n is a, c, g, or t
  misc_feature (241)..(241): n is a, c, g, or t
  misc_feature (244)..(244): n is a, c, g, or t
  misc_feature (248)..(250): n is a, c, g, or t
  misc_feature (253)..(253): n is a, c, g, or t
  misc_feature (255)..(256): n is a, c, g, or t
  misc_feature (261)..(262): n is a, c, g, or t
  misc_feature (264)..(266): n is a, c, g, or t
  misc_feature (268)..(270): n is a, c, g, or t
  misc_feature (276)..(276): n is a, c, g, or t
  misc_feature (280)..(282): n is a, c, g, or t

SEQ ID NO: 1097 - DNA, 600 bp, Homo sapiens
  misc_feature (25)..(25): n is a, c, g, or t
  misc_feature (43)..(43): n is a, c, g, or t
  misc_feature (79)..(79): n is a, c, g, or t
  misc_feature (91)..(91): n is a, c, g, or t
  misc_feature (120)..(120): n is a, c, g, or t
  misc_feature (136)..(136): n is a, c, g, or t
  misc_feature (179)..(179): n is a, c, g, or t
  misc_feature (183)..(183): n is a, c, g, or t
  misc_feature (188)..(188): n is a, c, g, or t
  misc_feature (200)..(200): n is a, c, g, or t
  misc_feature (221)..(221): n is a, c, g, or t
  misc_feature (261)..(261): n is a, c, g, or t
  misc_feature (286)..(286): n is a, c, g, or t
  misc_feature (313)..(313): n is a, c, g, or t
  misc_feature (318)..(318): n is a, c, g, or t
  misc_feature (320)..(320): n is a, c, g, or t
  misc_feature (336)..(336): n is a, c, g, or t
  misc_feature (375)..(375): n is a, c, g, or t
  misc_feature (378)..(378): n is a, c, g, or t
  misc_feature (394)..(394): n is a, c, g, or t
  misc_feature (403)..(403): n is a, c, g, or t
  misc_feature (456)..(456): n is a, c, g, or t
  misc_feature (481)..(481): n is a, c, g, or t
  misc_feature (489)..(489): n is a, c, g, or t
  misc_feature (519)..(519): n is a, c, g, or t
  misc_feature (533)..(533): n is a, c, g, or t
cctttcctttggttggggcctgcanttctttggcttttccagnacaggaaaagccaagaattggtttcttttggtttantaaggaagttantggttaaaaatggggaagggaagaacccntaaatggtttttccantaatggccaggccggaaccaaaaaggaaaaaaaccttttcccntggnaaagnaaaaccaattgnccccaagaaatttttttaacnttcttggccaagaaaaaaattcaaagttccttaagcccanttttaaaaaatttaattccttttcnattggaagcccgaaaggggaattaaanttttnantaaggaagaattttgnaaaaccttggggaccaaatggttatttaacctggggacntcntggaaaggcccaccantttaaaacntccactggacccaccggccattgtgttaaaggaaaggatttaccggccagggnaagataccaaccagcactttctggnggtacctnctaattacatgctcctggaaattttaagangagaagattatggnttcaatgttgactggtgggctcttggagtgctcatgtttgaagatgatggcaggaaggtctcctttt

SEQ ID NO: 1098 - DNA, 600 bp, Homo sapiens
  misc_feature (281)..(281): n is a, c, g, or t
  misc_feature (535)..(535): n is a, c, g, or t
  misc_feature (545)..(545): n is a, c, g, or t
  misc_feature (560)..(560): n is a, c, g, or t
  misc_feature (581)..(581): n is a, c, g, or t
tgaaaaagttggatgaagatagtttaaccaaacaaccagaagaagtatttgatgtcttagagaaacttggagaaggattactgtagatgcagtatatggaatcaggaatcttaacttcatgtgagctattggagttttccttgctatcaggatgcatagggaggtcctatggcagcgtatacaaagctattcataaagagaccggccagattgttgctattaagcaagttcctgtggaatcagacctccaggagataatcaaagaaatctctataatgcancaatgtgacagccctcatgtagtcaaatattatggcagttattttaagaacacagacttatggatcgttatggagtactgtggggctggttctgtatctgatatcattcgattaccaaataaaacgttaacagaagatgaaatagctacaatattacaatcaactcttaagggacttgaataccttcattttatgagaaaaatcaccgagatatcaaggcaggaaatattttgcttaatacagaaggacatgcnaaacttgcanattttggggtagcangtcaacttacagatccatggncaagcggaatacatgatag

SEQ ID NO: 1099 - DNA, 600 bp, Homo sapiens; identical to SEQ ID NO: 1098
  misc_feature (281)..(281): n is a, c, g, or t
  misc_feature (535)..(535): n is a, c, g, or t
  misc_feature (545)..(545): n is a, c, g, or t
  misc_feature (560)..(560): n is a, c, g, or t
  misc_feature (581)..(581): n is a, c, g, or t

SEQ ID NO: 1100 - DNA, 600 bp, Homo sapiens
ctcatcagcgcctcaggccagctcaagatagcggactttggcctggctcgagtcttttccccagacggcagccgcctctacacacaccaggtggccaccaggtggtaccgagcccccgagctcctgtatggtgcccgccagtatgaccagggcgtcgatctgtggtctgtgggctgcatcatgggggagctgttgaatgggtccccccttttcccgggcaagaacgatattgaacagctttgctatgtgcttcgcatcttgggcaccccaaaccctcaagtctggccggagcaggtgcccatgcccctggaggaggtgctgcctgacgtctctccccaggcattggatctgctgggtcaattccttctctaccctcctcaccagcgcatcgcagcttccaaggctctcctccatcagtacttcttcacagctcccctgcctgcccatccatctgagctgccgattcctcagcgtctagggggacctgcccccaaggcccatccagggcccccccacatccatgacttccacgtggaccggcctcttgaggagtcgctgttgaacccagagctgattcggcccttcatcctggaggggtga

SEQ ID NO: 1101 - DNA, 600 bp, Homo sapiens
aaccaattaaagaagggccttctgattccgaagacactgtatttgaagaaactgacacagatttacaagagcttcaggcctcaatggagcagctgcttagggagcaaccaggtgacgaatacagtgaggaggaagagtctgttttaaaaagcagcgatgtggagcagacagcaagagggacagatgccccagacgaggaggacaaccccagcagcgaaagcccctgaacgaggaatggcactcagataatagtgacgctgagaccactagtgaatgtgaatatgacagtgtctttaaccatttagaggaactaagacttcacttggagcaagaaatgggctttgaaaagttctttgaggtttatgagaaagtaaaggctattcatgaggatgaagatgaaaatattgaaatttgttcaacaatagttgagaatattttgggcaatgagcaccagcatctctatgccaagattctgcatttagtcatggcagatggagcctatcaggaagataatgatgaataatcctcaggacattctttaatagtcaactgtaagaacacatttgaacttggctcataatacaagcttcctgggaaata

SEQ ID NO: 1102 - DNA, 600 bp, Homo sapiens; identical to SEQ ID NO: 1101

SEQ ID NO: 1103 - DNA, 238 bp, Homo sapiens
  misc_feature (88)..(88): n is a, c, g, or t
  misc_feature (139)..(139): n is a, c, g, or t
  misc_feature (157)..(157): n is a, c, g, or t
  misc_feature (191)..(191): n is a, c, g, or t
  misc_feature (210)..(210): n is a, c, g, or t
  misc_feature (228)..(228): n is a, c, g, or t
  misc_feature (233)..(233): n is a, c, g, or t
aaacaacaaaaagggcctggtcactgtagaagatgagcaggcgtggatggcatcttataaatatgtaggtgctccactaatatccatncatatttgtccacaatgatcaactacgcccacctgtaaaggttcaaggttncatgtggcagaagaaccncatattcattatacatggcttcttttatgaatantcggccttggttcttgaancccttgcaatgaatttgnaattntacca

SEQ ID NO: 1104 - DNA, 269 bp, Homo sapiens
  misc_feature (40)..(40): n is a, c, g, or t
  misc_feature (88)..(88): n is a, c, g, or t
  misc_feature (119)..(119): n is a, c, g, or t
  misc_feature (124)..(124): n is a, c, g, or t
  misc_feature (148)..(148): n is a, c, g, or t
  misc_feature (227)..(227): n is a, c, g, or t
  misc_feature (244)..(244): n is a, c, g, or t
  misc_feature (262)..(262): n is a, c, g, or t
  misc_feature (265)..(265): n is a, c, g, or t
aaacaacaaaaagggcctggtcactgtagaagatgagcangcgtggatggcatcttataaatatgtaggtgctccactaatatccatncatatttgtcaccatgatcaactaccccagnctgtnaaggttcaaggtttcatgtggcanaagaaccccatattcttttacatggcttctttaatgaatcatcggcttggtactgaaaccctgccattgaattgcattntacaacggcaatgagcnatttccccagggaggccngcnttct

SEQ ID NO: 1105 - DNA, 269 bp, Homo sapiens; identical to SEQ ID NO: 1104
  misc_feature (40)..(40): n is a, c, g, or t
  misc_feature (88)..(88): n is a, c, g, or t
  misc_feature (119)..(119): n is a, c, g, or t
  misc_feature (124)..(124): n is a, c, g, or t
  misc_feature (148)..(148): n is a, c, g, or t
  misc_feature (227)..(227): n is a, c, g, or t
  misc_feature (244)..(244): n is a, c, g, or t
  misc_feature (262)..(262): n is a, c, g, or t
  misc_feature (265)..(265): n is a, c, g, or t

SEQ ID NO: 1106 - DNA, 600 bp, Homo sapiens
  misc_feature (544)..(544): n is a, c, g, or t
gctatcccctccggaccatggccgacgacgacgtgctgttcgaggatgtgtacgagctgtgcgaggtgatcggaaagggtcccttcagtgttgtacgacgatgtatcaacagagaaactgggcaacaatttgctgtaaaaattgttgatgtagccaagttcacatcaagtccagggttaagtacagaagatctaaagcgggaagccagtatctgtcatatgctgaaacatccacacattgtagagttattggagacatatagctcagatggaatgctttacatggttttcgaatttatggatggagcagatctgtgttttgaaatcgtaaagcgagctgacgctggttttgtgtacagtgaagctgtagccagccattatatgagacagatactggaagctctacgctactgccatgataataacataattcacagggatgtgaagccccactgtgttctccttgcctcaaaaaaaaaactcggcacctgttaaacttggaggctttggggtagctattcaattaggggagtctggacttgtanctggaagacgtgttggaacacctcattttatggcaccagaagtgggcaaaagaaag

SEQ ID NO: 1107 - DNA, 600 bp, Homo sapiens; identical to SEQ ID NO: 1106
  misc_feature (544)..(544): n is a, c, g, or t

SEQ ID NO: 1108 - DNA, 316 bp, Homo sapiens
  misc_feature (151)..(160): n is a, c, g, or t
ggtgactgtgaaaaagcaattattcccataattaaaatacaaactacaaaaaaacagcatcaaagaaaagaaagatgacagagtgaaagaaggtacatttctttcgtgttcaaaccacggagttcacaacacagcagcacacacagctggnnnnnnnnnntttagctttttcaaaatttctatttctgtttcaacattgagagctgggtctgcctctcttgctgaaccaatagcaaacttccttttgctgatgatctttatggctactttcttacatgttttcctctcgaaagccagctttacctctccacagtca

SEQ ID NO: 1109 - DNA, 316 bp, Homo sapiens; identical to SEQ ID NO: 1108
  misc_feature (151)..(160): n is a, c, g, or t

SEQ ID NO: 1110 - DNA, 508 bp, Homo sapiens
gcaaggggcgcaggcagagcgaggaccccgctccttctctgctctggctgagtgctgtgtgccctttgaacctggccagcgctaccaggagtttgttcaggaagtggacactgtccacagctgctcaaacccaccgactgcggcggctgcggggcccagccaagtgcagagaatgtgaagccttcatggtcagcgggacagaatgtgaagagtgctttttgacctgtcacaagcgctgcctggagaccctcctcatcctttgtggacaccggcggcttccagcccggatgtccctctttggggttgacttcctacagctccccagagatttccctgaggaggttccctttgtgattaccagatgcacagctgagatagagcaccgtgccctgggcttgcagggtatctatcgggtcagcgggtctcgggtacgtgtggagcggctgtgcaggcctttgagaatggccgagcactggtcgagctgtccgggaactctcctcacgatatc

SEQ ID NO: 1111 - DNA, 508 bp, Homo sapiens; identical to SEQ ID NO: 1110

SEQ ID NO: 1112 - DNA, 1400 bp, Homo sapiens
cctgctgttagctttcattatttttgctacactcattttatttgtatttaaatgttttaggcaacctaagaacaaatgtaaaagtaaagatgcaggaaaaatgaattgcttggtattcattacttcatgtatatcaagcacagcagtaaaacaaaaacccatgtatttaacttttttttaggatttttgcttttgtgattttttttttttttttttgatacttgcctaacatgcatgtgctgtaaaaatagttaacagggaaataacttgagatgatggctagctttgtttaatgtcttatgaaattttcatgaacaatccaagcataattgttaagaacacgtgtattaaattcatgtaagtggaataaaagttttatgaatggacttttcaactactttctctacagcttttcatgtaaattagtcttggttctgaaacttctctaaaggaaattgtacattctttgaaatttattccttattccctcttggcagctaatgggctcttaccaagtttaaacacaaaatttatcataacaaaaatactactaatataactactgtttccatgtcccatgatcccctctcttcctccccaccctgaaaaaaatgagttcctattttttctgggagagggggggattgattagaaaaaaatgtagtgtgttccatttaaaattttggcatatggcattttctaacttaggaagccacaatgttcttggcccatcatgacattgggtagcattaactgtaagttttgtgcttccaaatcactttttggtttttaagaatttcttgatactcttatagcctgccttcaattttgatcctttattctttctatttgtcaggtgcacaagattaccttcctgttttagccttctgtcttgtcaccaaccattcttacttggtggccatgtacttggaaaaaggccgcatgatctttctggctccactcagtgtctaaggcaccctgcttcctttgcttgcatcccacagactatttccctcatcctatttactgcagcaaatctctccttagttgatgagactgtgtttatctccctttaaaaccctacctatcctgaatggtctgtcattgtctgcctttaaaatccttcctctttcttcctcctctattctctaaataatgatggggctaagttatacccaaagctcactttacaaaatatttcctcagtactttgcagaaaacaccaaacaaaaatgccattttaaaaaaggtgtattttttcttttagaatgtaagctcctcaagagcagggacaatgttttctgtatgttctattgtgcctagtacactgtaaatgctcaataaatattgatgatgggaggcagtgagtcttgatgataagggtgagaaactgaaatccc

SEQ ID NO: 1113 - DNA, 1400 bp, Homo sapiens; identical to SEQ ID NO: 1112

SEQ ID NO: 1114 - DNA, 600 bp, Homo sapiens
tatttatccagcaccgtttctgggcacagggctccagcgatggtcccaacaggtacaatgacctctggggaccaagttcagttcttggtgagttctccagtgcctctcgatgtaggatgaaccgttggcatgctccactgacgctggctccttctgttgtttctcttggctccaggacccccgcagcaaacacaagtttaagatccacacgtactccagccccacgttttgtgaccactgtgggtcactgctgtatggactcatccaccaggggatgaaatgtgacagtaagtactttctctctctgggggcatctgctgatggcagaagcaatgggaagggctgcttccacttggtttggggtccaggtctgccatacattcccccctgtcctcgttggggctggtgtaccagttatctgttgctgcataatgatcctcccaccccaaaacactgtgactgaagacaataaacatttttttagctcatgactctgcaaggcagtcctttgaatctgggctggcctcagctgatgtcacgcatgttcataaagcatgaactcatggttcatggtggattagcagatggaggtgggctggg

SEQ ID NO: 1115 - DNA, 600 bp, Homo sapiens; identical to SEQ ID NO: 1114

SEQ ID NO: 1116 - DNA, 600 bp, Homo sapiens
gcccatccggatcccccggttcctgtccgtcaaagcctcccatgttttaaaaggatttttaaataaggaccccaaagagaggctcggctgccggccacagactggattttctgacatcaagtcccacgcgttcttccgcagcatagactgggacttgctggagaagaagcaggcgctccctccattccagccacagatcacagacgactacggtctggacaactttgacacacagttcaccagcgagcccgtgcagctgaccccagacgatgaggatgccataaagaggatcgaccagtcagagttcgaaggctttgagtatatcaacccattattgctgtccaccgaggagtcggtgtgatgtcatgccttcccaagagcctccaggatggctgtcctccgacctcctccacctccaggctctagatggcaaagcccacttagcaaaagccacctgctctgtgatgatgggactggctcctgcctgtgggttcggaaagcccatcccaccctctacagcctcttgctcctctgcaatgactgtgccttcacctgggggttccccagagactagtgagagtcatcgggcgtggaagctat

SEQ ID NO: 1117 - DNA, 600 bp, Homo sapiens; identical to SEQ ID NO: 1116

SEQ ID NO: 1118 - DNA, 600 bp, Homo sapiens
gaatgtcttctgtctttggtattatagttcatcttcccattcttttacttagtgcatttgtgcagatatttttaactctgtacatcagaagagagcccttggtaaccagttttgctcttcttctgccactcctccctgcttgcatctcgttgctggcagagtcctcttgtacttcaagaaagcaaagtgattttgtctgcctcctagagcaggtccataccaagtaatagaggcactttagcttccacttggtgggtaaggcctgatcatagtattctgtcagataatgcctaagaatgaccgctgggggtggagctccatcatcaaatggccaatctagaacgtggattccttctttttcaactggagctttatcatatgtagcatcacaaactcgaaccaaagtcgtcactccatacttcggtagcagtcgacagatgaattccagctgagcgccggtcgctaccattaccagttggtctggtgggggatccactagttctagagcggccgccaccgcgtggagctaattcgccctatagtgagtcgtattacaattcactggccgtcgttttacaacgtcgtgactgggaaacctgg

SEQ ID NO: 1119 - DNA, 600 bp, Homo sapiens; identical to SEQ ID NO: 1118

SEQ ID NO: 1120 - DNA, 1224 bp, Homo sapiens
atttaataaacatctctctggaaggaattgctattttgaatataccaagcatgcatggaggatccaatctttggggagagtctaagaaaagacgaagccatcgacgaatagagaaaaaagggtctgacaaaaggaccaccgtcacagatgccaaagagttgaagtttgcaagtcaagatctcagtgaccagctgctggaggtggtcggcttggaaggagccatggagatggggcaaatatacacaggcctgaaaagtgctggccggcggctggctcagtgctcctgcgtggtcatcaggacgagcaagtctctgccaatgcaaattgatggggagccatggatgcagaccccatgcacagtgagtacagagtagttgatatgctatgtcaatctcagttttgctttcctctttgactaaataaccacaataactgatttttttctttatttcttttcaacctatcagcaaatagtctttttgttgttgttgttatgtgtgtgtcagagccactacatttaggctgtagacattatatacccttggcaatgatttagctcttgaatgtttgtgctagcctaagtataaatagatcttttaaatagatcaattataaaccatagatcaattataaactatggagctaaacaaaatattaataaaagtttatctgaaacttttttgtttatttcagagcacattattagaatattatttgcgagaaatgcagacctaagcttatatgtgaacttatttctcagcttttctatgcctccatttggggatttgagggctttcttctccataagaaaaaaatttctctccagtttctaccataattaattgtgttttccagaatgaggtattatttaaggcagacactgcccctctcaaaaaaaatcagttttcatttgcatagtgaatattttattgcatttcaaaaacatgctaggaactgcttttggcactgggagtagacacatgaacaagaccaacagtgtaatttccttcaagttacttacattcctataatagaggaccgaataaataaacaactacatgataaatataacttcagactgtgagagttattaaaaaataaggtgaaatgatgataagaagctggattaggtgtggagaataaatactacttgagataagggagacctctttgaaaggacatagccaaaagcttagtataaaattaaaaaaaataaaaaaaaaa

SEQ ID NO: 1121 - DNA, 1400 bp, Homo sapiens
aatagtctaataatcagtaaaactcttaatgtactctacaagtacataaaactcttcttacaaagaatcaaaattatttcagatttaggaggactcatcagtttagggattaagatatcaaatttggtgtcatgcaatgaaatgtctcgtgccatctgtctcagtgactctaacagagttactgtgttatctgtaaacttatgtaactttactccctcaatatgtaaagttatctgcttttcatattcaaggtaaacaatattttgaaactaaattctactcctttccttcctctttatttcttcctttgctcattatccttttgccagcattctgcaaattttatctatgaattcttacagttcaaaacaattattacacagaatcttaaatgcctctcctgagatgattacataataaatctagagacttcaaaaggctacaagtgacaggaaggaagctttctaggatgaaaatataatgaagtaaattatgaattcagtttataattcaggagatgtgaccattctccaagtgacgaacttgctttaattaatttctcatgacaaaactggccccatcaatcaaaactgtttcatcaactgcttccctttccaattctccatatcccagttttggtttcatagaaaagagagaccattagttttaaaagttagctatacagtattttgttcaaatttccaacttaccactacctgtccctatttctaaccccaatatttcaggtgcctccctctacttgccaaggccaacccctcctttctctgtttttcattccattcccttctgcctccatcaccctggagggacaaacaaacaaaaattaaagaaatattttcttgtctttgtcttcccctcaaactaccagtgtctagcatatggaacataataaacatttgtagaaagaattactaaatgccctatagcaagctcatgttttaaatagtattcaaaactcatgaaattctacaagtaataagttaatacattatatgctcaatgtaaaaacttcaaacagtaacaaaatcatattgtttaagcctggtaaaatagttatagcttacaaatataacaaaaatccaagtatattaaaaattctgcacatactattctgtagtaaattgtatttttattcattcattcatattaatgcctacgatgacagtcaaagtactaagcattagaaatacaaggaagattgtgtctcagccttttagctaaggtcagtgtagaaatataaggatgaagccgcgtgcagtggctcacgcctgtaatcccaccactttgggaggccaaggcgggtgaatcacaaggtcaggagttcgagaccagcctggccaacatggtgaaaccccgtctctactaaaaatacaaagaat

SEQ ID NO: 1122 - DNA, 561 bp, Homo sapiens
tcattgcctgtgatggcatctggaatgtgatgagcagccaggaagttgtagatttcattcaatcaaaggattcagcatgtggtggaagctgtgaggcaagagaaacaagaactgtatggcaagttaagaagcacagaggcaaacaagaaggagacagaaaagcagttgcaggaagctgagcaagaaatggaggaaatgaaagaaaagatgagaaagtttgctaaatctaaacagcagaaaatcctagagctggaagaagagaatgaccggcttagggcagaggtgcaccctgcaggagatacagctaaagagtgtatggaaacacttctttcttccaatgccagcatgaaggaagaacttgaaagggtcaaaatggagtatgaaaccctttctaagaagtttcagtctttaatgtctgagaaagactctctaagtgaagaggttcaagatttaaagcatcagatagaaggtaatgtatctaaacaagctaacctagaggccaccgagaaacatgataaccaaacgaatgtcactgaagagggaacacagtctataccaggt

SEQ ID NO: 1123 - DNA, 561 bp, Homo sapiens; identical to SEQ ID NO: 1122

SEQ ID NO: 1124 - DNA, 600 bp, Homo sapiens
  misc_feature (221)..(221): n is a, c, g, or t
  misc_feature (291)..(291): n is a, c, g, or t
  misc_feature (421)..(421): n is a, c, g, or t
tagatgggggaatgtctcgaaaaatagggcaatgcgtgtgaccttcgggaaatcatgggaacaccagaatatttagctccagaaatcctgaactatgatcccattaccacagaaacagatatgtggaatattggtataatagcatatatgtcgctaactcacacatcaccatttgtgggagaagataatcaagaaacatacctcaatctctctcaagttantgtagattattcggaagaaactttcccatcagtttcacagctggccacagactttattcagagcccttcngtaacacctccagagaaacgacaccagcagagatctgcctccctcattctcgcctacagcagcgggactttgcaacattgtctcacctgaacgaacctccagttcccctcaaactcaggatcaatctgtnaggtctctaagacaagactcttaatcccctcgcatggaactcgggtgaagagaagtacgagatctcccgcggttgcagactgctcaaaccattcgtctgatatctatcccccccccccacctgtccaattggttttacatctttcttgctcaggcttcctcgacttgcttcccccctac

SEQ ID NO: 1125 - DNA, 1400 bp, Homo sapiens
tgctggacccagagctgcacgtcaagctggcagattttggcctgtccacatttcagggaggctcacagtcagggacagggtccggggagccagggggcaccctgggctacttggccccagaactgtttgttaacgtaaaccggaaggcctccacagccagtgacgtctacagcttcgggatcctaatgtgggcagtgcttgctggaagagaagttgagttgccaaccgaaccatcactcgtgtacgaagcagtgtgcaacaggcagaaccggccttcattggctgagctgccccaagccgggcctgagactcccggcttagaaggactgaaggagctaatgcagctctgctggagcagtgagcccaaggacagaccctccttccaggaatgcctaccaaaaactgatgaagtcttccagatggtggagaacaatatgaatgctgctgtctccacggtaaaggatttcctgtctcagctcaggagcagcaataggagattttctatcccagagtcaggccaaggagggacagaaatggatggctttaggagaaccatagaaaaccagcactctcgtaatgatgtcatggtttctgagtggctaaacaaactgaatctagaggagcctcccagctctgttcctaaaaaatgcccgagccttaccaagaggagcagggcacaagaggagcaggttccacaagcctggacagcaggcacatcttcagattcgatggcccaacctccccagactccagagacctcaactttcagaaaccagatgcccagccctacctcaactggaacaccaagtcctggaccccgagggaatcagggggctgagagacaaggcatgaactggtcctgcaggaccccggagccaaatccagtaacagggcgaccgctcgttaacatatacaactgctctggggtgcaagttggagacaacaactacttgactatgcaacagacaactgccttgcccacatggggcttggcaccttcgggcaaggggaggggcttgcagcaccccccaccagtaggttcgcaagaaggccctaaagatcctgaagcctggagcaggccacagggttggtataatcatagcgggaaataaagcaccttccaagcttgcctccaagagttacgagttaaggaagagtgccaccccttgaggcccctgacttccttctagggcagtctggcctgcccacaaactgactttgtgacctgtcccccaggagtcaataaacatgatggaaataaagcaccttccaagcttgcctccaagagttacgagttaaggaagagtgccaccccttgaggcccctgacttccttctagggcagtctggcctgcccacaaactgactttgtgacctgtcccccaggagtcaataaacatg

SEQ ID NO: 1126 - DNA, 600 bp, Homo sapiens
ctgacattcaatgacttacttcttttcttagaaaatttccaccacatttctatccccaagccaacatacaatgtgaaatgaaagccagtgcgtggagtgcagctgctaaaaattttcagcacagggctctttctgactctgctcatgagatggtatcagccacccaatgactggcgtatcttggtcctgtgtctttcttcttacgctgtgttaatgtgtttactttccatttggcagagagacaagagagacacctccaacttcgacaaagagttcaccagacagcctgtggaactgacccccactgataaactcttcatcatgaacttggaccaaaatgaatttgctggcttctcgtatactaacccagagtttgtcattaatgtgtaggtgaatgcagattccatcgctgagcctgtgtgtaaggctgcaggctgaatgtctattatcaattccagtcttccaggattcatggtgcctctgttggcatccgtcatgtggagagcttgtcttagagggcttttctttgtatgtatagcttgctagtttgttttctacatttcaaaatgtttagtttagaataagtgcattgcccactga

SEQ ID NO: 1127 - DNA, 594 bp, Homo sapiens
gcggccgctatcccctccggaccatggccgacgacgacgtgctgttcgaggatgtgtacgagctgtgcgaggtgatcggaaagggtcccttcagtgttgtacgacgatgtatcaacagagaaactgggcaacaatttgctgtaaaaattgttgatgtagccaagttcacatcaagtccagggttaagtacagaaggtaagagatggatttcaaatctaaagcgggaagccagtatctgtcatatgctgaaacatccacacattgtagagttattggagacatatagctcagatggaatgctttacatggttttcgaatttatggatggagcagatctgtgttttgaaatcgtaaagcgagctgacgctggttttgtgtacagtgaagctgtagccagcatcttagacaaacatagctggaaacaacttggagaccaccttaatacagctttgagctcagcatgacttgaatgtcttcaaattcattgccctgactccttctggctgaagagcaagggacctagtctcagggatggagcagccatggctatggcacaaaataaagaatatgctcaatgaaaaaaaaaaaaaaaaa

SEQ ID NO: 1128 - DNA, 552 bp, Homo sapiens
ccagcctgttgcaggctgcttcgtagcgggcgtcggctgcggacttcccttcccgggtctggatcttttcatcctaccagatgagaaagggaatgagtgaatggagtgaccccgcaccctgtcactttcctgagacatgactgccaggaagaagagctgctctggtctccatcagggctggcaggacaaactgaccagtgagtcagtaggcagagttcacactgaaaaagggcacaagggctgtcccacaatgggaggaaatggggtctcagaacttctacttctctgaaaactaagacacaattgggacaaccaccacccccgtgtgagatttctcacctcgagacaggacaagatgaagttcacggcttcttctggggtaaagaccttgaagagcccatcacaggccaacaaaatgaacctacaacaccagggagaaatataaacgggttttaggcccaaccaaaaaataaaaaataaaaaaagggcctggagatggagataaaataaatatttgtccaactattcaaaggctaaggtttttttttcttt

SEQ ID NO: 1129 - DNA, 1400 bp, Homo sapiens
ttgagatccctaatttcaactggccccaatttgagtatgttaaagtgcctctggctgacatgccgcatgcccccattggactgtactttgacaccgtggctgacaagatccacagtgtgagcaggaagcacggggccaccttggtgcactgtgctgcaggggtgagccgctcagccacgctgtgtatcgcgtacctgatgaaattccacaacgtgtgcctgctggaggcgtacaactgggtgaaagcccggcgacctgtcatcaggcccaacgtaggcttctggaggcaactgatagactacgagcgccagctctttgggaagtcgacagttaaaatggtacagacaccttatggcatagttcccgacgtctatgagaaggagtcccgacacctgatgccttactgggggatttagtgccactgaagcctgcgtcagcagcccgagcggggccggcatctgctccccgccgtctgctccctctccactctcttctcaaatggctgacttctggttctccctcaagtgttttttacactgggtgttcaaatttattttaagagatagggagggaggggacataaagggaatgcatacattgctagtcacatttttaaaattaacattttggaatagtgtttatggaaatctttagcttttaatcatttttaccaatttgaacagtttaataaactggttctgctctcttctgaatctcatgcctttggcaccttggtaggtgcaggaggagctcagtgcaaaaatcactttggggcctcattaaccctttagagacaagctttgccccaggctgcggaccagacagatgcttagggaaggttgataaccagcttcagtctctactggattagccctactctttcctttcccctccattatttagtgactctgtaagtaagttaaatacacccttattatttagctgttaagtaactataatgaaatctgctgcaaaatctctcttggaatccatgtgcccaggattatattagcattatttttaataaatctatatgcttaacatattagaatttttactaataatttcaaggtgtgtgtgtgtcgatgatgggaaaaaggtgctctccagtaactaactaactaactgctgaaatgtggctcctgtgccagttgggaacattacttaaaatacacatcccagcagagtcttgtcggcgcgtcacatcctggtggacaggcagacacaccgtccccggtgctgggccggtgggagatgattgatagtgcacgctctgatcaggggtgctggttttggtttcctcttggttagtggagcgccccgaagcagcgtgtcctccatcagagaaactggttttcaataaaaggtgcctctgcttgactattattaccacatacgaa

SEQ ID NO: 1130 - DNA, 1400 bp, Homo sapiens; identical to SEQ ID NO: 1129

SEQ ID NO: 1131 - DNA, 600 bp, Homo sapiens
tagtgatagcagtgacagcagtgacagcagcgacagcagtgacagcagcgacagcagtgacagcagcgacagcagtgacagcaatgaaagcagcgacagcagtgacagcagcgatagcagtgacagcagcaacagcagtgacagcagcgacagcagtgatagcagtgacagcacatctgacagcaatgatgagagtgacagccagagcaagtctggtaacggtaacaacaatggaagtgacagtgacagtgacagtgaaggcagtgacagtaaccactcaaccagtgatgattagaacaaaagaaaaacccataagattccttttgtgaaaagtttggtaatgggataggaaaaaaagatttccaagaaagtaaagaaaggggagaaataaacataagacgtatgtaaacaaaaacaactgggggaatcaaatcaaacagttggattcagaaccaagacctaactcctgcagagacagactctgaatgcatgacctttggtacatgcctgttaatattcatgttctgaaaatattttgttaaaagtgtaaatctaaacataaaagaacaattaaaatattctttaatacttcacacagaa

SEQ ID NO: 1132 - DNA, 600 bp, Homo sapiens; identical to SEQ ID NO: 1131

SEQ ID NO: 1133 - DNA, 382 bp, Homo sapiens
tcagatgacagccggttctctgcacattggaacttgtccatggggcctcctttaagggtcttgccttcttcctcccctgtcatcctcacacttttcccccctcttctcccccttccctcatttccaacataggaggatccaaagtgggaattccctcggaagaacttggttcttggaaaaactctaggagaaggcgaatttggaaaagtggtcaaggcaacggccttccatctgaaaggcagagcagggtacaccacggtggccgtgaagatgctgaaaggtacctgccaggcacaggcacagtgcccctgggggagtctccggggcggggggcgggtgaggcccctcctgcccagcatgggaccctaagagcccccaatgc

SEQ ID NO: 1134 - DNA, 368 bp, Homo sapiens
gatgagcccctgtccactgatcccaaaggctgggagaagcctcaagcagcatcgtctttgcaggcctctctgtctgaacttgggcaaggcgatgcaggtccatcctgacctggtatggtcatggaaggggcttccaggagcgatcgtttgcaacctgctctgtgctgcatttcagagaacgcctccccgagtgagcttcgagacctgctgtcagagttcaacgtcctgaagcaggtcaaccacccacatgtcatcaaattgtatggggcctgcagccaggatggtaaggccagctgcagggtgaggtgggcagccactgcacccaggctgggggctccatacagccctgttctccctctttctccctt

SEQ ID NO: 1135 - DNA, 405 bp, Homo sapiens
catgtcacaccctgactccaccacgcccctgccatgccacacccccggcccaggtctcaccaggccgctacccgggccacacaccacccctctgctggtcacaccaggctgagccagtgacacgctgctgcctggccatggcctgacgactcgtgctatttttcctcacagctcgttcatcgggacttggcagccagaaacatcctggtagctgaggggcggaagatgaagatttcggatttcggcttgtcccgagatgtttatgaagaggattcctacgtgaagaggagccaggtgcccagtcccggggatgaggcggggctcccagggatcccaggtgcaccatggggcaggcagtccttgggaagcctaggaaagataccgaagattagtggagctctaagc

SEQ ID NO: 1136 - DNA, 405 bp, Homo sapiens; identical to SEQ ID NO: 1135

SEQ ID NO: 1137 - DNA, 383 bp, Homo sapiens
ttgagctgtctgcagcagagctgagaggaccagccattttacttatggaaaacagtgtggcatattctgctgagcttcgccctggaagaagcctcttttatacatctcttcagggaagagagaagcaatgggcatgttagaactgaggtgggctagtgggggtgagatggtgacgctggacgtggggccggaggatgagctgcccgactgggccgccgccaaagagttttaccagaagtacgaccctaaggacgtcatcggcagaggagtgagctctgtggtccgccgttgtgttcatcgagctactggccacgagtttgcggtgaagattatggaagtgacagctgagcggctgagtcctgagcagctggaggaggtgcggg

SEQ ID NO: 1138 - DNA, 383 bp, Homo sapiens; identical to SEQ ID NO: 1137

SEQ ID NO: 1139 - DNA, 600 bp, Homo sapiens
gagagatgctgagtgttttgtatgttagcatcgactctttctttttatttctgttcagactcaagtttttagaagctagaatatagatccctttaagaaaaaaaaaggaagaaagaagaatttgctgttgacatcacttgttagaagagcaactctgaaagaaaacgagcaaattccaaaatatgaaaagattcacaatttcaaggtgcatacattcagagggccacactggtgtgaatactgtgccaactttatgtggggtctcattgctcagggagtgaaatgtgcagattgtggtttgaatgttcaaagcagtgttccaagatggtcccaaatgactgtaagccagacttgaagcatgtcaaaaaggtgtacagctgtgaccttacgacgctcgtgaaagcacataccactaagcggccaatggtggtagacatgtgcatcagggagattgagtctagaggtcttaattctgaaggactataccgagtatcaggatttagtgacctaattgaagatgtcaagatggctttcgacagagatggtgagaaggcagatatttctgtgaacatgtatgaagatatcaacattatcactggt

SEQ ID NO: 1140 - DNA, 600 bp, Homo sapiens; identical to SEQ ID NO: 1139

SEQ ID NO: 1141 - DNA, 211 bp, Homo sapiens
aggaggtccgcgggaggatggagcagtgagcgggtctgggcggctgctggcagcgccatggagacggtacagctgaggaacccgccgcgccggcagctgaaaaagttggatgaagatagtttaaccaaacaaccagaagaagtatttgatgtcttagagaaacttggagaagggtcctatggcagcgtatacaaagctattcataaagaga

SEQ ID NO: 1142 - DNA, 405 bp, Homo sapiens
  misc_feature (227)..(227): n is a, c, g, or t
agttgtctctgccgctggggaaggtaaagcggcgacggcgtcctcaggagctgtggggtcccctgctagaagtgggggactcggcgggggagtcatttaatacttcatgattagaacaaatatgtgaaagttcccaccaaccagtgagaatttcttccttcagacggttttggatcttactgcacagctttctgagaagttcttttggtgccatgttttgtggcttnmatcaaaagaggagtttgtcttcatgaagattcctaacattggtaatgtgatgaataaatttgagatccttggggttgtaggtgaaggagcctatggagttgtacttaaatgcagacacaaggaaacacatgaaattgtggcgatcaagaaattcaaggacagtgaagaaaatgaaga

SEQ ID NO: 1143 - DNA, 405 bp, Homo sapiens; identical to SEQ ID NO: 1142
  misc_feature (227)..(227): n is a, c, g, or t

SEQ ID NO: 1144 - DNA, 332 bp, Homo sapiens
cttcctaaatagaggggcctgggaaactgaaatgcccacatccaggaagtcctaggagctgcagccagctggaaggacattcaggtacccgggtaggctcctccctgcgacagaccttcagcttcctctcgggcatgaccggaaaggccaagacccgggaaaaggagaagatgaaggaagccaaggatgcccgctataccaatgggcacctcttcaccaccatttcagtttcaggcatgaccatgtgctatgcctgtaacaagagcatcacagccaaggaagccctcatctgcccaacctgcaatgtgactatccacaaccgctgtaaagac

SEQ ID NO: 1145 - DNA, 403 bp, Homo sapiens
  misc_feature (33)..(33): n is a, c, g, or t
gcctccctgcctattgtcggggccggagggagnccgacgcagcatcagctcgtcaacgggaaggaagatgcctccctgcacgcccgccgcgcacagagcataaagaatctgcgctgaggaggcaggagaagaaagccgaatctatctaccgccggggagccagaagatggaggaagctgtaccgtgccaacgccacctcttccaagccaagcgctttaacaggagagcgtactgcggtcagtgcagcgagaggatatggggcctcgcgaggcaaggctacaggtgcatcaactgcaaactgctggtccataagcgctgccacggcctcgtcccgctgacctgcaggaagcatatggattctgtcatkccttcccaagagcctccagtagacgacaagaacgag

SEQ ID NO: 1146 - DNA, 403 bp, Homo sapiens; identical to SEQ ID NO: 1145
  misc_feature (33)..(33): n is a, c, g, or t

SEQ ID NO: 1147 - DNA, 385 bp, Homo sapiens
agtaaggccccgcgggcgtcctggccgccatgtgcaccgtagtggaccctcgcattgtccggagatacctactcaggcggcagctcgggcaggggagaacattccgggaaatcacgctcctccaggagtttggggaccatcccaacatcatcagcctccttgacgtgatccgggcagagaacgacagggacatttacctggtgtttgagtttatggacactgacctgaacgcagtcatccggaagggcggcctgctgcaggacgtccacgtgcgctccatcttctaccagctcctgcgggccamccggttcctccactcggggcacgttgtgcaccgggaccagaagccgtccaatgtgctcctggatgccaactgcacagtgaa

SEQ ID NO: 1148 - DNA, 297 bp, Homo sapiens
cctctacacacaggtcccaaacaggaaacggttaacgacttctggagaatggtctgggagcaaaagtctgcgaccatcgtcatgttaacaaacttgaaagaaaggaaagaggtgagttccagcatctggccccggtatcacttcctttcagctgctgctgccgggctggggatgttcttaccacttccttttcctacttccctcccttcctcccactatcactgcagaaaaaaacccaaacacatgcagtggcttacagcattttcttcacgaaacaaatcccctgtgtcccctcgc

SEQ ID NO: 1149 - DNA, 366 bp, Homo sapiens
  misc_feature (275)..(276): n is a, c, g, or t
ttatgtataatggataagcccaaaattgaaagtcagatctgatttgcttacggccttcaccaaacaatcccagtggctcaatgtctttcgcagatcgcagacctcggccttgcctcctttaagatgtggagssaaackgaataatgaagagcacaatgagctgagggaagtggacggcaccgctaagaagaatggcggcaccctctactacatggcgcccgagcacctgaatgacgtcaacgcaaagcccacagagaagtcggatgtgtacagcnntgcwgtagtactctgggcgatatttgcaaataaggagccatatgaaagtaaggcattacttactttccactgccgtcccctcagcatacc

SEQ ID NO: 1150 - DNA, 366 bp, Homo sapiens; identical to SEQ ID NO: 1149
  misc_feature (275)..(276): n is a, c, g, or t

SEQ ID NO: 1151 - DNA, 302 bp, Homo sapiens
acctcagactctgcgcgcacccaattcagtcgcccgctcccgttcggcacctcgaagccatggcgggamctgggggctsgagggacagggasstcacggatctgggccacctgccggatccaactggaatattctcactagataaaaccattggccttggtacttatggcagaatctatttgggacttcatgagaagactggtgcatttacagctgttaaagtgatgaacgctcgtaagacccctttacctgaaatasgaaggcgagtgagagtgaataaatatcaaaaatctgttgggtgc

SEQ ID NO: 1152 - DNA, 302 bp, Homo sapiens; identical to SEQ ID NO: 1151

SEQ ID NO: 1153 - DNA, 195 bp, Homo sapiens
ttcgtttgtgttccctgcttgtgtctcttgcatgattcttcttggtctactgtgaactcttacccttcccctcacctctgccccctccccacgtctctctctcggcccctccctctccggtggcctcttttctttcagacagagaagattacagtatgtggggacacccatggccagttctatgacctcctcaac

SEQ ID NO: 1154 - DNA, 455 bp, Homo sapiens
aaaatctcttactttgcctccgcagtatacacgtacatccaaagccggttctaccgatccccagaagtgatcctgggccacccctacgacgtggccattgacatgtggagcctgggctgcatcacggcggagttgtacacgggctaccccctgttccccggggagaatgaggtggagcagctggcctgcatcatggagattccaaaggttttcctaaaaatataaccaacaacagggggaaaaaaagatacccagattccaaggacctcacgatggtgctgaaaacctatgacaccagcttcctggactttctcagaaggtgtttggtatgggaaccttctcttcgcatgaccccggaccaggccctcaagcatgcttggattcatcagtctcggaacctcaagccacagcccaggccccagaccctgaggaaatccaattcctttttcccctct

SEQ ID NO: 1155 - DNA, 455 bp, Homo sapiens; identical to SEQ ID NO: 1154

SEQ ID NO: 1156 - DNA, 424 bp, Homo sapiens
  misc_feature (358)..(358): n is a, c, g, or t
atttctctccttctgttggcagtgacggtgcaggccggagcggcacctacgtcctgatcgacatggttctcaacaagatggccaaaggtgctaaagagattgatatcgcagcgaccctggagcacttgagggaccagagacccggcatggtccagacgaaggagcagtttgagttcgcgctgacagccgtggctgaggaggtgaacgccatcctcaaggcccttccccagtgagcggcagcctcaggggcctcaggggagccccyaccccacggatgttgtcaggaatcatgatctgactttaattgtgtgtcttctattataactgcatagtaatagggcccgtgcggggccgggangcagaggttgcagggagccgagatcgtgccattgtactccagcctgggtgacagagtgagactccg

SEQ ID NO: 1157 - DNA, 424 bp, Homo sapiens; identical to SEQ ID NO: 1156
  misc_feature (358)..(358): n is a, c, g, or t

SEQ ID NO: 1158 - DNA, 142 bp, Homo sapiens
aattcgcacgagtagtgggtcgtcttgtttctagcaaaacaggtggcagcagccttatcacactcacacagttgactatctgaatcatttttaagtatacattcagtagtgttaagtatgtcgccattgttgtacaaccaaa

SEQ ID NO: 1159 - DNA, 142 bp, Homo sapiens; identical to SEQ ID NO: 1158

SEQ ID NO: 1160 - DNA, 231 bp, Homo sapiens
atcaccttgacttttccccatcttcctattaaaaaaaattgttttaattctggatttatgttttctaattttcttttccagttaccctgcagtttgtgaatttttgcagaacaataatttactatcaattatcagagcccatgaagcccaagatgctgggtatcgaatgtacaggaagagccaagccacaggctttccatcacttattacaattttctctgcccccaatgg

SEQ ID NO: 1161 - DNA, 373 bp, Homo sapiens
gtgtcctctgcaaacagggacaatggaaaggctgttatatggaatgtctgtaaattctaatacttgaagtggacccakgagtggtaggtckcatrattararasattcagacaatcactatctwtgtktttccctctagtggtgcctgtggagaggtaaagctggctttcgagaggwdwacatgtaagaragtagccataaagatcatcagcaaaaggaagtttgctattggttcagcaagagaggcagacccagctctcaatgttgaaacagrmatagaaattttgaaaacctaaatcatccttgcatcatcaagattarrmrcttttttgaagcagargattatkatattgttttggaattgatggwaggg

SEQ ID NO: 1162 - DNA, 373 bp, Homo sapiens; identical to SEQ ID NO: 1161

SEQ ID NO: 1163 - DNA, 343 bp, Homo sapiens
ctgttctcacagctgtgatcacgagccattgtcattcaagtgcccaccttgtcttgctgtgtactcattgtcttctatcaatcgggccaatccgaagtcagcaatcttgcatatgagtccattccccactagaatgtttgctgatcgcagatctctatggatataattcatgcgctcgatgtaagccattcctgcagccacctgtggaaacccagggaacaggacatgttacaccacgacccaatgtacttagacacgtcattaaatctatggcacatcaagttaccctgcagggcctacctgtgctgccatgtccacaagatttggtaatttcagagctcaa

SEQ ID NO: 1164 - DNA, 343 bp, Homo sapiens; identical to SEQ ID NO: 1163

SEQ ID NO: 1165 - DNA, 278 bp, Homo sapiens
gactgsghmtcgccaacaccctggggaacaagggggctgtgggcgtctccttcatgtttaatggcacctcatttggctttgtgaattgtcacctcacctcgggaaatgagaagacggctcggtgagggggcgctttcccatggkctctttacacccatcccattcacctgaggcctgttcccgctcccataccctagcccatgaccctcccgcaggcctgtctccagagaccccctgctctcttatcccaattcaagacccttctgttcctgacccac

SEQ ID NO: 1166 - DNA, 278 bp, Homo sapiens; identical to SEQ ID NO: 1165

SEQ ID NO: 1167 - DNA, 464 bp, Homo sapiens
cacattaactggsaagaacttctggctcgaaaggtggagcccccctttaaacctctgttggtaagtatacatgaaagtgtataattgggtgcagtggctcacgcctgtaatccccaaactttgaagggccagggtgggaggattgtttgaggccgggagttcgggaccagcgtgggcggcatggcaagactccatatctacagaacatttaaaggttggctgggtgtggcggcttgtgcctgtaagtcccagctacttgcaaggctgaggcgggaggatcgcttgatatttttttagaataagaaaaatctcagagcagacagaaacattatttttattagcagtkcaaagatctctggtctatcctctccagcatctttattttattttattttgagatggggtctcactctgtcacccaggatggagtbcagcagcacgatcacagttcaatgcagccttga

SEQ ID NO: 1168 - DNA, 600 bp, Homo sapiens
gagcactcaagaaagttctgaaactgctttgtatctgctttgtactgttggtgccttcttggtattgtaccccaaaattctgcatagattatttagtataatggtaagttaaaaaatgttaaaggaagattttattaagaatctgaatgtttattcattatattgttacaatttaacattaacatttatttgtggtatttgtgatttggttaatctgtataaaaattgtaagtagaaaggtttatatttcatcttaattcttttgatgttgtaaacgtactttttaaaagatggattatttgaatgtttatggcacctgacttgtaaaaaaaaaaaactacaaaaaaatccttagaatcattaaattgtgtccctgtattaccaaaataacacagcaccgtgcatgtatagtttaattgcagtttcatctgtgaaaacgtgaaattgtctagtccttcgttatgttccccagatgtcttccagatttgctctgcatgtggtaacttgtgttagggctgtgagctgttcctcgagttgaatggggatgtcagtgctcctagggttctccagggkgggttcttcagaccttcacctgtgggg

SEQ ID NO: 1169 - DNA, 600 bp, Homo sapiens; identical to SEQ ID NO: 1168

SEQ ID NO: 1170 - DNA, 1300 bp, Homo sapiens
cgggctggcccatggctgagacctctctcccagagctggggggagaggacaaagccacgccttgccccagcatcctggagctggaggagctcctgcgggcagggaagtcttcttgcagccgtgtggacgaagtttggcccaaccttttcataggagatgcagctggtccttactccctgccatggggctctgccactttgccaccctggcactgatcctgctggtgctgctggaggctctggcccaggcggacacacagaagatggtggaagcccagcgtggggtcggccctagagcctgctactccatctggctcctcctggcgcctacaccccctctcagccactgtcttcagtctccacagaaacagcatcaagtgtgcggagacaggcggctgaaagccagcagcacgaactgcccgtcagagaagtgcacagcctgggccagatactcccacaggatggactcactgcagaagcaggacctccggaggcccgagatccatggggcagtccaggcatctccctaccagccgcccacattggcttcgctgcagcgcttgctgtgggtccgtcaggctgccacactgaaccatatcgatgaggtctggcccagcctcttcctgggagatgcgtacgcagcccgggacaagagcaagctgatccagctgggaatcacccacgttgtgaatgccgctgcaggcaagttccaggtggacacaggtgccaaattctaccgtggaatgtccctggagtactatggcatcgaggcggacgacaaccccttcttcgacctcagtgtctactttctgcctgttgctcgatacatccgagctgccctcagtgttccccaaggccgcgtgctggtacactgtgccatgggggtaagccgctctgccacacttgtcctggccttcctcatgatctgtgagaacatgacgctggtagaggccatccagacggtgcaggcccaccgcaatatctgccctaactcaggcttcctccggcagctccaggttctggacaaccgactggggcgggagacggggcggttctgatctggcaggcagccaggatccctgacccttggcccaaccccaccagcctggccctgggaacagcaggctctgctgtttctagtgaccctgagatgtaaacagcaagtgggggctgaggcagaggcagggatagctgggtggtgacctcttagcgggtggatttccctgacccaattcagagattctttatgcaaaagtgagttcagtccatctctataataaaatattcatcgtcataaagaa

SEQ ID NO: 1171 - DNA, 1300 bp, Homo sapiens; identical to SEQ ID NO: 1170

SEQ ID NO: 1172 - DNA, 1313 bp, Homo sapiens
ggatccaggagttggagcccgcctgcgcgctgcgggacggggcacggcggaagggttgggtccgcctcgagcggggagggtaatgtgcaccacaggggcggggctggagatcatcagaaaagcccttactgaggaaaaacgtgtctcaacaaaaacatcagctgcagatcttgtgacagaaacagatcaccttgtggaagatttaattatttctgagttgcgagagaggtttccttcacacaggttcattgcagaagaggccgcggcttctggggccaagtgtgtgctcacccacagcccgacgtggatcatcgaccccatcgacggcacctgcaattttgtgcacagattcccgactgtggcggttagcattggatttgctgttcgacaagagcttgaattcggagtgatttaccactgcacagaggagcggctgtacacgggccggcggggtcggggcgccttctgcaatggccagcggctccgggtctccggggagacagatctctcaaaggccttggttctgacagaaattggccccaaacgtgaccctgcgaccctgaagctgttcctgagtaacatggagcggctgctgcatgccaaggcgcatggggtccgagtgattggaagctccacattggcactctgccacctggcctcaggggccgcggatgcctattaccagtttggcctgcactgctgggatctggcggctgccacagtcatcatcagagaagcaggcggcatcgtgatagacacttcgggtggacccctcgacctcatggtttgcagagtggttgcggccagcacccgggagatggcgatgctcatagctcaggccttacagacgattaactatgggcgggatgatgagaagtgactgcggctgaggcaaagctgctcccaaggcctccctgggctgctgtgggctcctggggaggtggccctcgtggcccacgctccatgccagtggctcacgctctgctcctggctaccccagagggagttgtcacgctacagtgagtggctggccttttaaatcgacgtctctctcaccaggatttggtgtttagctgtttctctctttaatctcacgtagccctttttcaggttagtacgtgttcttctgtcagggcaaaactcaaatctcctgtgaaatacgtattgataatccaatcttgatttttccccccagaatataaatctcaggtaatasaggctttagaactgctgataaagggatcgttctcaggcctccccccggagtacttcagaatgcaataaatcaaaatatgggaaaaaaaaaactcgag

SEQ ID NO: 1173 - DNA, 1313 bp, Homo sapiens; identical to SEQ ID NO: 1172

SEQ ID NO: 1174 - DNA, 600 bp, Homo sapiens
gagagctgccttgtacactgcctggccggggtctccaggagcgtgacactggtgatcgcatacatcatgaccgtcactgactttggctgggaggatgccctgcacaccgtgcgtgccgggagatcctgtgccaaccccaacgtgggcttccagagacagctccaggagtttgagaaccatgaggtccatcagtatcggcagtggctgaaggaagaatatggagagagccctttgcaggatgcagaagaagccaaaaacattctggccgctccaggaattctgaagttctgggcctttctcagaagactgtaatgtacctgaagtttctgaaatattgcaaacccgcagagtttaggctggtgctgccaaaaagaaaagcaacatagagtttaagtatccagtagtgatttgtaaacttgtttttcatttgaagctgaatatatacgtagtcatgtttatgttgagaactaaggatattctttagcaagagaaaatattttccccttatccccactgctgtggaggtttctgtacctcgcttggatgcctgtaaggatcccgggagccttgccgcactgccttgtgggtggcttggcgctc

SEQ ID NO: 1175 - DNA, 600 bp, Homo sapiens; identical to SEQ ID NO: 1174

SEQ ID NO: 1176 - DNA, 600 bp, Homo sapiens
gctgcagcagccttcaacaaagatgcccttctgaactggcttaaagaatacaactctggggatgacctggaccgagccattgaggaatttacactgtcctgtgctggctactgtgtagcttcttatgtccttgggattggtgacagacatagtgacaacatcatggtcaaaaaaactggccagctcttccacattgactttggacatattcttggaaatttcaaatctaagtttggcattaaaagggagcgagtgccttttattcttacctatgatttcatccatgtcattcaacaaggaaaaacaggaaatacagaaaagtttggccggttccgccagtgttgtgaggatgcatatctgattttacgacggcatgggaatctcttcatcactctctttgcgctgatgttgactgcagggcttcctgaactcacatcagtcaaagatatacagtatcttaaggactctcttgcattagggaagagtgaagaagaagcactcaaacagtttaagcaaaaatttgatgaggcgctcagggaaagctggactactaaagtgaactggatggcccacacagttcggaaagactacagatcttaa

SEQ ID NO: 1177 - DNA, 600 bp, Homo sapiens
ttccctttgaaaaagcctatgaaaagctccagattctcaaaccagaggctaagatgaatgaggggtttgagtggcaactgaaattataccaggcaatgggatacgaagtggatacctctagtgcaatttataagcaatatcgtttacaaaaggttacagagaagtatccagaattgcagaatttacctcaagaactctttgctgttgacccaactaccgtttcacaaggattgaaagatgaggttctctacaagtgtagaaagtgcaggcgatcattatttcgaagttctagtattctggatcaccgtgaaggaagtggacctatagcctttgcccacaagagaatgacaccatcttccatgcttaccacagggaggcaagctcaatgtacatcttatttcattgaacctgtacagtggatggaatctgctttgttgggagtgatggatggacaggtgagaacacattttattttctacaattttattttatgatctatattttattccttcttgcattttaagctctattttaactagtgttttgctccatttcttaatttctttatttctgatgattatatctttcttgtgtagataa

SEQ ID NO: 1178 - DNA, 600 bp, Homo sapiens; identical to SEQ ID NO: 1177

SEQ ID NO: 1179 - DNA, 600 bp, Homo sapiens
  misc_feature (592)..(592): n is a, c, g, or t
agatggttctgcagacaccaagccaacccaggtcgacacatccagaagctattacatgtggtaactcagaggatattttgcttctggtagtaaggagcacaaagacgtttttgctttattctgcaaaagtgaacaagttgaagacttttgtatttttgactttgctagtttgtggcagagtggagaggacgggtggatatttcaaatttttttagtatagcgtatcgcaagggtttgacacggctgccagcgactctaggcttccagtctgtgtttggtttttattcttatcattattatgattgttattatattattattttattttagttgttgtgctaaactcaataatgctgttctaactacagtgctcaataaaatgattaatgacaggatggggttcccctgtgcttttaccagtagcatgaccccttctgaagccatccgtagaaagtactttgtccccaaaaagcaacatacggtttgaacagcatgaaactttgtagcatcgggctaagactttaactcagagcaaggcagactggtacctcgttaagatgtagtgactgcggatgtttacactgaatgaagntgcttaat

SEQ ID NO: 1180 - DNA, 600 bp, Homo sapiens; identical to SEQ ID NO: 1179
  misc_feature (592)..(592): n is a, c, g, or t

SEQ ID NO: 1181 - DNA, 1400 bp, Homo sapiens
  misc_feature (1395)..(1395): n is a, c, g, or t
  misc_feature (1397)..(1397): n is a, c, g, or t
agggagtcggaaggaggaggacagaggagggcacagagacgcagagcaagggcggcaaggaggagaccctggtgggaggaagacactctggagagagagggggctgggcagagatgaagttccaggggcccctggcctgcctcctgctggccctctgcctgggcagtggggaggctggccccctgcagagcggagaggaaagcactgggacaaatattggggaggcccttggacatggcctgggagacgccctgagcgaaggggtgggaaaggccattggcaaagaggccggaggggcagctggctctaaagtcagtgaggcccttggccaagggaccagagaagcagttggcactggagtcaggcaggttccaggctttggcgcagcagatgctttgggcaacagggtcggggaagcagcccatgctctgggaaacactgggcacgagattggcagacaggcagaagatgtcattcgacacggagcagatgctgtccgcggctcctggcagggggtgcctggccacaatggtgcttgggaaacttctggaggccatggcatctttggctctcaaggtggccttggaggccagggccagggcaatcctggaggtctggggactccgtgggtccacggataccccggaaactcagcaggcagctttggaatgaatcctcagggagctccctggggtcaaggaggcaatggagggccaccaaactttgggaccaacactcagggagctgtggcccagcctggctatggttcagtgagagccagcaaccagaatgaagggtgcacgaatcccccaccatctggctcaggtggaggctccagcaactctgggggaggcagcggctcacagtcgggcagcagtggcagtggcagcaatggtgacaacaacaatggcagcagcagtggtggcagcagcagtggcagcagcagtggcggcagcagtggcggcagcagtggtggcagcagtggcaacagtggtggcagcagaggtgacagcggcagtgagtcctcctggggatccagcaccggctcctcctccggcaaccacggtgggagcggcggaggaaatggacataaacccgggtgtgaaaagccagggaatgaagcccgcgggagcggggaatctgggattcagaactctgagacgtctcctgggatgtttaactttgacactttctggaagaattttaaatccaagctgggtttcatcaactgggatgccataaacaaggaccagagaagctctcgcatcccgtgacctccagacaaggagccaccagattggatgggagcccccacactccctccttaaaacaccaccctctcatcactaatctcagcccttgcccttgaaataaaccttagctgccccacaaaananaaa

SEQ ID NO: 1182 - DNA, 1400 bp, Homo sapiens; identical to SEQ ID NO: 1181
  misc_feature (1395)..(1395): n is a, c, g, or t
  misc_feature (1397)..(1397): n is a, c, g, or t

SEQ ID NO: 1183 - DNA, 388 bp, Homo sapiens
  misc_feature (1)..(1): n is a, c, g, or t
  misc_feature (388)..(388): n is a, c, g, or t
ntctagatcactctgtagcgcatggttaaatgctgacacaatagaaaagtgcgaggacatcctcgaattaatgagatggtggactggatgagtcaagttctcgtcgttgcggcggctgtcggtcagctgcccctcctccacttctgcttctcggcgttaccccataccgtattggccgcgtgttcacctttgaatgcagccatgtcgtcgtctccgtatcgaaatgatgtgccatcgaagatgccgacctcagcatcggcatctgcagtgatgagtgcgtatcgcgccacacgaaacgcccagcgcaaccgtgtcctcgcacgatacgaagtgcttgggtatctcagctctggtacctatggtcgtgtatataaagcaaaggaacttn

SEQ ID NO: 1184 - DNA, 388 bp, Homo sapiens; identical to SEQ ID NO: 1183
  misc_feature (1)..(1): n is a, c, g, or t
  misc_feature (388)..(388): n is a, c, g, or t

SEQ ID NO: 1185 - DNA, 600 bp, Homo sapiens
tcccaatgatcttgccattccgagtgaagaaaaccaccaccttcctgccctcatgctccggctctatctcttccccatcctcttcctcttcctcttcctcctcttcctcttccccttcctggtgcaggtacatgacattccgcacgttccggacggcccgggcagtcggagacaggatcactgtgtcacaactgtcatcactgtccccctcactgtccaaaatgtagtcccgggggaacatgattccacagcccatgatgtcccctttgtaacagcgtggcccaaaggggtcccccacaccactgccatggaagatcttcccatcgtctgcatgataagccacagaccctctgctccagccagggtgcctgttcttgggatagtccttccgtgccagccccagggcgatgtagcatttctctccagggtccacgatctccacctcgaagtagtggctgcgggtgctgagtgggtgccgggcctgggccagccccacatccacgatgcttttgcccttccctaagtactccagcagagtcccacagactctgacatcatgtagccggccccattcatcctcgtagctgtccaccatcatga

SEQ ID NO: 1186 - DNA, 600 bp, Homo sapiens; identical to SEQ ID NO: 1185

SEQ ID NO: 1187 - DNA, 371 bp, Homo sapiens
  misc_feature (1)..(1): n is a, c, g, or t
ntgtacaatttccttgctggaagtactggagcgaatatgatacggtctccggcctctcagcagttcatatgccgtcactcccagggaccaccagtcaacagcaaaggaatagcctgctccttttctggagctgaacatctcaggtgccatgtaaggcttggtgccagccatggtggagacctgcgttatcacctgcaacagaacgtccacttcaaggaagaaacagtgaagctcttcatctgtgagctggtcatggccctggactacctgcagaaccagcgcatcattcacagggatatgaagcctgacaatattttacttgacgaacatgggcacgtgcacatcacagatttcaacattgctgcgatgct

SEQ ID NO: 1188 - DNA, 477 bp, Homo sapiens
ccggatatggcagctcgacttcattcgaccagagttcttggaacatttggctatcatgcacctgagtatgcaatgactggacaacttagctctaagagtgacgtttacagttttggagttggtcttctggagctcctgactggaagaaagcctgtggatcttccattaccaagaggacagcaaagtcttgtgacatgggcaactccacggctttgtgaagataaagttaggcaatgcgttgattcaagacttggagtagaatatcctcctaaatccgttgcaaagtttgcagctgttgctgcactgtgtgtgcaatatgaagctgactttcgacccaacatgagcatcgtggtgaaggcgcttcagcccctgctgaatgcacgtgcatccaacaaccctggatgaatgaatgaatgactgccgttgcttttccctgacgagagtatctgaatcagacaatcatgtagcattgaattc

SEQ ID NO: 1189 - DNA, 477 bp, Homo sapiens; identical to SEQ ID NO: 1188

SEQ ID NO: 1190 - DNA, 401 bp, Homo sapiens
  misc_feature (1)..(1): n is a, c, g, or t
ncgccgattaccaaggctatggatgtgtgggccttgggcgtaacgctatactgtctgctgttcggtcgagtgccatttgatgcagagacggagtacttgctgctggaaagtatcctgcatgacgattatgccgtcccgacgcacatgggtagcgaccgcgtgttggtaggcccgcgaccagcacgttggccctcgtcgcaagagacgcccaacgtgccgctgtccggcgaggcgcatgcagtacgccatctgctcgatgcccttctcgacaaggatccagcgacgcgcctcactctcgatcgtgttataacacacccatggctcgtggcagagtcatggtaatagtagcaattgtatataccctcatcaccaagatggccaaagcggtacaaggcccgcgg

SEQ ID NO: 1191 - DNA, 401 bp, Homo sapiens; identical to SEQ ID NO: 1190
  misc_feature (1)..(1): n is a, c, g, or t

SEQ ID NO: 1192 - DNA, 362 bp, Homo sapiens
  misc_feature (1)..(2): n is a, c, g, or t
nnacgcgtgcatgctgcaggcatcatccatcgcgatctgaagccccaaaacatcttcctggtgccgagcgcgcgcgagcgcgacttcgtgaagatcttcgacttcggcgcatgccagatggtcacaccgaaggtatcgaacggcgtgcccgagctgaagacgagcgcgggaaatctcttcggcacggtgccgtacatggcgccggagtgcttcgaggacggctcgcaccggctggatgcgcgcgcggacatctactccacgggcatcatcatgtaccgctgcgtgacggggacgctccccttcaaggcgaacaccgtcttcgagatgctcatccatctgcgcgagggccgcccatcaagctt

SEQ ID NO: 1193 - DNA, 362 bp, Homo sapiens; identical to SEQ ID NO: 1192
  misc_feature (1)..(2): n is a, c, g, or t

SEQ ID NO: 1194 - DNA, 600 bp, Homo sapiens
ttaccggtcatcgctttattgacatctggcaggccatcaaacctcaacgaattggccgtcaagaatggcctgaggtcccgatggacgaagacttcaaactcggcaccctgaagcgtctgggcctgcctcactcgacccaagctgacgtcggtaaggcctggcaggccatgctggcacgagtgcgcgactggcacgatttagacccccgctttaacacggagatggagaaacttatcgatttcgtcacgcgtgaccatgtcgacgagctggacaatggggagatggcatgagtattgacgtcgacacggtgtctgacctcatccgggatgtgagtgccagggttatcgatccccggttccggaccctccacgatcatcaaatccaccagaaaaagcccggggacttcgttactgatgccgatcgtcaggccgagtgcgagctgggtgccgctgtgaccaagtatgccggcggtattgtcgtgggggaggaatcagccttcgccgacccaaccatccttgatgccgtttccgatgctgacctggcctgggtcatcgaccccattgatggcactaagaacttcgtgcacgggtctgttgatca

SEQ ID NO: 1195 - DNA, 600 bp, Homo sapiens
acggcgaggaacgtgccgataccggggatggaccccgccggtggatcattgatccgatcgacggcactgcgaattttctgcgtggggtcccagtgtgggccaccctcattgccctcagcgtcgaggaccagattgtcgcatctgtggtctctgctcctgccctcaagcgacgctggtgggcagcccgtggctcaggagcatggtcgggcaaatccctggcctcagcgacaccgatccacgtctcgaatgtgcgcaatcttgccgacgcattcttgtcctactcttcgctgcacggatgggtcgagagcggacgagggcacgggttcggtgaactcatgcggtcggtgtggcggacccgagccttcggcgatttctggtcttacatgatggtggcagaaggtgtcgtcgatgtggcatgcgagccggaactcagcctgcacgacatggccgccctcgacgctatcgtcaccgaggcgggcggtaagttcaccggtctcgatggcaaagacggcccgtggtctgggaatgctctggcgtcgaatggtttccttcatgaccaggccctagccatggtccagcctcaggagtgagcaccgatcg

SEQ ID NO: 1196 - DNA, 289 bp, Homo sapiens
  misc_feature (1)..(1): n is a, c, g, or t
nccatggggaatgggatgaacaagatcctgcccggcctgtacatcggcaacttcaaagatgccagagacgcggaacaattgagcaagaacaaggggaaccctttttctgtttgtccccgatgggtgccaggcctatgttggaggacaagacatttcaaagaaagtattaaattcattcacgagtgccggctccgcggggagagctgccttgtacactgcctggccggggtctccaggagcgtgacactggtgatcgcatacatcatgaccgtcactgactttggctggg

SEQ ID NO: 1197 - DNA, 289 bp, Homo sapiens; identical to SEQ ID NO: 1196
  misc_feature (1)..(1): n is a, c, g, or t

SEQ ID NO: 1198 - DNA, 600 bp, Homo sapiens
ctggggggaaaaaattttttaaaaaaaatggtggggaaaaacccccccccgccccccccctttttttcccccgtgggggccaaaaaaaaaaatgtgggcccccaaaaaaaaaaaaaaaaaaaaaaaaaagtcttgggagggggtcggtttggccaggtccacaggtgcacagagaagtctacaggccttgcactggcagccaagatcatcaaagtgaagaacgtaaaggaccgggaggatgtgaagaatgaggtcaacatcatgaaccagctcagccacgtaaacttgatccaactttatgatgcgtttgagagcaagagcagcttcactctgatcatggagtatgtggatggaggcgaactctttgaccggatcacggatgagaagtaccacctcactgagttggatgtggtcttgttcacgaggcagatctgtgagggtgtgcattacctgcatcagcactatatcctgcacctggacctcaagcctgagaacatattgtgtgtcagccagacagggcatcaaattaagatcattgactttgggctggctagaagatacaagcctcgggagaagctaaaggtgaactttggtactccg

SEQ ID NO: 1199 - DNA, 600 bp, Homo sapiens; identical to SEQ ID NO: 1198

SEQ ID NO: 1200 - DNA, 600 bp, Homo sapiens
cccaaaccggcactccccagcagctgcgtaggggcacagctgctgctcgttgctgtaggagctgctggcctccacgtcatcaaggccactcctgatggcatccaggtaggaatgcggcttcatctcggggctgggctgggggtcgctgcagctgcctggattactcaccatgctcggctgggtcttcctttcagccatgccagagagatttcggtctctaagaaccaatgttctcttttcacgctttccgggttcatgtgagttagttttcacaatggatgcagtgacctcggaaggagggtgaggactgtggaaagctggggagggcacactgtgggccatggtgcccacagcacctccagctgcagcagagggcctcgtgtggtcatatctgcaccgagttccataggcacagtagcccttctggtagtacttgcagatggtggacggtttgctgtttgccaagtcatgtgagaataggcactgacttccttcccgacacacaccatgcataaaatacctgcaagtgatctgcttggtgctcatggtggctgggctgagggaccgtcgtcgtgccgccgcctctcgcagccgctgccc

SEQ ID NO: 1201 - DNA, 273 bp, Homo sapiens
ctgggggcgccacctgggccacattcctcaggccctgccttcatctcattccccagacggaactccttcttaccaactccttcttctacccattcattcattcaacaaacatttatcgagtgcctctgtttgcctgagctcagtttatacactaacatttgatgttagcgtataaattagtgttctgtgtcaaagaagtgcagaacgtactcttggcagaaaggatttaatacaggaaattaagtgcttttaaaaatgtgggaaaggccaggc

SEQ ID NO: 1202 - DNA, 600 bp, Homo sapiens
cgctgccttccacccatggtgatggatggtttggaaagggaatgttggtgccttttgtgccacaagttaagatgctactgttttaaaggaaaaaaaaaaaaaaaaagtactgatcttcaatatgaagacatgagcttttctcgcaggaaattttctttttcacagaactggtgtcaggaatcactgaagggctaaccgtgatagtccttgcaagtaagtcaaggttttatcctgattggaaatagaagacatttccggttgagagaacagattcgttggaagcttaacttttgttgcctcttaacgccaccaaattttagggtaatttgattatgaaagagtgaatttttctggacagaaaagggagagctaccaaattgtttttttctttttaaaaggaagtttaatgtccgttgtatcacaaatcagtgttaaaacaccagaactttagccaaaataaatgtcttacattacaaaggtaaaaaaaaaaaaaaaaaaaacccaaaaattttttataccggaaatttgaaaaaaccccccatttccccccaacagtgacccggaacactcctcattctattaattacaccattctcccat

SEQ ID NO: 1203 - DNA, 600 bp, Homo sapiens
caggctgaccaggcgcccgggatccagctcatccccttggctgggaacatcctccactgacttcctcccactgtctgccctgaacccactgctgcccccagaaaaaggccgggtgacaccggggggctcccagcccgtgcaccctggaagggcaggtctggcggctccatccgtggctgcaggggtctcatgtggtcctcctcgctatgttggaaatgtgcaaccactgcttcttgggaggagtggtgggtgcagtccccccgctgtctttgagttgtggtggacgctggcctgggatgagagggcccagaagaccttcgtatcccctctcagtcgcccggggctgtcccgtgcatgggttggctgtggggaccccaggtgggcctggcaggactccagatgaggacaagagggacaaggtatggggtgggagccacaattgaggataccccgagactaccaggagagccctgggctggaggctgagctgcatccctgctccccacatggaggacccaacaggaggccgtggctctgatgctgagcgaagctataggctcttgttggataaaagcttttttaasagaaaaaaaaaaaaaa

SEQ ID NO: 1204 - DNA, 600 bp, Homo sapiens; identical to SEQ ID NO: 1203

SEQ ID NO: 1205 - DNA, 598 bp, Homo sapiens
taaggcaagattttcagaaaaatgagtaaaataattaatgaaacatatttagagcacttaatggtctctgttttcaatataattcttgatttcatttttctctggaatatattggccttctacagctattactgaattatagaaactggtttatttctggcagaaagctgcagtgccacctgagttccaaattttaccattctttgtaaacagttggatggattatgataaagaagatgctaccaatgaaatagaaaaccaacgagatgagaagactgtgatcctcatgtactcagaggcacttccctcctaagtcaaagaccatcctcactgactatgtgccaacgcctcgtttcaggcttgtgactcaacaaagggcttttccattgatagaagcagtttgggatttgtagttgcgacttcttcgatagttacctgcacgtccattgctggcaactgacttgtcattaaaacctggctctttggttaagggagctacgctgtggtttattcttaagttacgtggataaactaacctctaacagaaatatactttggttaattttgaaaaaaaaaaaaaaaaaccggggggggcccg

SEQ ID NO: 1206 - DNA, 598 bp, Homo sapiens; identical to SEQ ID NO: 1205

SEQ ID NO: 1207 - DNA, 566 bp, Homo sapiens
  misc_feature (27)..(27): n is a, c, g, or t
aatcccaaattccccaatttttttggnctttttagggaaagatgtgttgtggtaaaaagtgttagtataaaaatgataatttacttgtagtcttttatgattacaccaatgtattctagaatagttatgtcttaggaaattgtggtttaatttttgacttttacaggtaagtgcaaaggagaagtggtttcatgaaatgttctaatgtataataacatttaccttcagcctcccatcagaatggaacgagttttgagtaatccaggaagtatatctatatgatcttgatattgttttatataatttgaagtctaaaagactgcatttttaaacaagttagtattaatgcgttggcccacgtagcaaaaagatatttgattatcttaaaaattgttaaataccgttttcatgaaagttctcagtattgtaacagcaacttgtcaaacctaagcatatttgaatatgatctcccataatttgaaattgaaatcgtattgtgtggaggaaatggcaatcttatgtgtgctgaaggacacagtaagagcaccaagttgtgccccacttgc

SEQ ID NO: 1208 - DNA, 566 bp, Homo sapiens; identical to SEQ ID NO: 1207
  misc_feature (27)..(27): n is a, c, g, or t

SEQ ID NO: 1209 - DNA, 443 bp, Homo sapiens
gaattcggcaccagcggggggctacggcggcggctacggcggcgtcctgaccgcgtccgacgggctgctggcgggcaacgagaagctaaccatgcagaacctcaacgaccgcctggcctcctacctggacaaggtgcgcgccctggaggcggccaacggcgagctagaggtgaagatccgcgactggtaccagaagcaggggcctgggccctcccgcgactacagccactactacacgaccatccaggacctgcgggacaagattcttggtgccaccattgagaactccaggattgtcctgcagatcgacaacgcccgtctggctgcagatgacttccgaaccaagtttgagacggaacaggctctgcgcatgagcgtggaggccgacatcaacggcctgcgcagggtgctggatgagctgaccctggccaggaccgacctgg

SEQ ID NO: 1210 - DNA, 1345 bp, Homo sapiens
  misc_feature (1324)..(1324): n is a, c, g, or t
  misc_feature (1326)..(1326): n is a, c, g, or t
  misc_feature (1338)..(1338): n is a, c, g, or t
  misc_feature (1344)..(1344): n is a, c, g, or t
ctccagggatgtgatccggcatccttgagtttgctcacagtgcctgtgcaccattcgagaagcccagcccctytccctcaccaccaaaccagaaacccgggcccagctggctctccactctgcgccttcmtgtcggctaaggctgcagcctcctcytctgggcagatgggcagccagcytcccctcctgtcccggcccytcccccttgggtccatgcccacagctctgctggcctctcccccgtccttccccgccacgctccatgcccaccaggccctcccggtgctacaggcccagcctctttccctggtcaccaagtctgcccactaagctccccccgacccctgcaggctgtcacatgactcattgagtagtaatgattcagaagaaaaagaaaaaggagactttattggtcaatatttgaccactctggactgttctgtaaagtggctggtaacaacagcactttacagtttgtagatgtaaccagtagctgatcttaaggcttttttaaaaaacaaaacaaaacaacaaaaaaaaatctttataagaaagagaactgaaaagtagcgtgctattcgtcctgtaggtgctgtggtggatggacctgggcagagggcacttctctctcttacctctcttgcactttctgtctcctgtctcttctcgcccctgccgcctgccccagcttccccgactccatctgcagctctgccattgtgacatttcctgttacccagcccaagttttcatcgtctgctcaataccgtgggttcttcttcgtcctctgtcctctgcccagtgtgaggccatcaccatgtgagaagacatcttggcctgatttgctgccaccagcgtcccctccctcagtgggcccgaactcgccagccccagctttcagtggagaaagcggtcctctgaaatggtttcctcccaacccccgcatttaaagggactcaaggtgcctgccacttcctcagcgaagaagtctgtgttcctccccgtccttgccagtggcgatcatcccttcacaatcccagagtggcaggcgggaccrgccccatggtctggctcctgtcacctgggtccgtgccagcacaatctgccaaagttctagagaccctgttcccttccccatcacctcacatgcttcttctgtgtgtatttctttttgtttttatggtttttggagcaatttaaactcccagttgtttattttcacaaaagaaaataaaattgcagttgcaaaaaaaaaaaaaaaaaaaaaaaaaaaaaaaaaaaaaaaaaaaaaaaaaaaaaaaaaaaaaaaaaaaaaaaaaaaaancnsggggggggggnccgttnc

SEQ ID NO: 1211 - DNA, 1345 bp, Homo sapiens; identical to SEQ ID NO: 1210
  misc_feature (1324)..(1324): n is a, c, g, or t
  misc_feature (1326)..(1326): n is a, c, g, or t
  misc_feature (1338)..(1338): n is a, c, g, or t
  misc_feature (1344)..(1344): n is a, c, g, or t

SEQ ID NO: 1212 - DNA, 600 bp, Homo sapiens
  misc_feature (158)..(158): n is a, c, g, or t
tgaaggaaatggctctgctgatgcaagcagcacattttctggctttaaatcacagtgcacaatattcttaaaatgcagattccycaagcaacaagtatctgttatgaaaaagatttycttttcatgtctggaaatcacagtaaacctcctgtgactcntgaatgatttaatttgaaaactccactatagttcatcaagacttagctaaaagtgtgttattctgctccttaaggttaacaattcccacaatcacccaacatgtaaargtactgctatttaattattttagtttttagckggatacagtggctcatgcctgtaatcccagcactttgggagacctaggcaggtggatcacttgaggcaaggagttcgagaccagcctggccaacacggtgaaaccccagctctactaaaaatacaaaaattagccaggcgtggtggcacacatctgcaatcctagatacttgggaggctgaggcatgagaatcacttgaatccaggaggcagaggttgcagtgagccagattgcaccactgcactccagcccaggtgacagagtaagactcttgtcttaaaaaaaaaaaaaaaaaaactcga

SEQ ID NO: 1213 - DNA, 600 bp, Homo sapiens
gagtggggkaacgcgctgaaggggtgtgatgatccccttttccttgacttcttaaaacagtgtttagagtgggatcctgcagtgcgcatgaccccaggccaggctttgcggcacccctggctgaggaggcggttgccaaagcctcccaccggggagaaaacgtcatgaaaaggataactgagagcaccggtgctatcacatctatatccaagttacctccaccttctagctcagcttccaaactgaggactaatttggcgcagatgacagatgccaatgggaatattcagcagaggacagtgttgccaaaacttgttagctgagctcacgtcccctgatgctggtaacctgaaagatacgacattgctgagccttactgggttgaaaaggagtagctcagacctgtttttatttgctcaataactctactcatttgtatcttttcagcacttaattttaatgtaagaaagttgttcattttgtttttataaaatacatgaggacaatgctttaarttttaaaaaaaaaaaaaaaaaaaaaaaaaaaaaaaaaaaaaaaaaaaaaaaaaaaaaaaaaaagggcggccgctcgcgatctaga

SEQ ID NO: 1214 - DNA, 1400 bp, Homo sapiens
gttacacttgtgcagaaagattttaatgtggggggtgggagacttttacatttgagaggtaaaagtattttttttatgaagttgtgtatcttaataaaaaggactgaattagtttttattactatattaaagcatcaacatttcatgccacataaattatatttaataagaaccagattgaaatgagaacgtattggtgtttgtacagtgaacatgccaccttttttctcatggtttcagtagagcagctaccacatgttgcatgagttcatactttctacgtggcatttttctccctttctaaaatgaaagctgatgaatcttaaaaggaagaagaaaagaaaagctgtgcaaattcatagtaaagttcgttttttatatgtttccagtgtagcagatctctatataaatatataaatatatataactggcttattttcttttaatgtgcaatgatggctggatcattttaaaaaaaaagggttctttttagaaaataacataagccaaagactcaagtgtaaatatgtctatatggagaaagcacattatatttattggttacttacattccttttttgatggctaaaatactaccaccacacaatcatcttttttttcctgaagaaagctttttctttagctaaaatcaattgtaaacgatttttgtagattattttttgtatgttttagtgtaagtagaagataaactttttattcataaaccaggaagcaatgttctttatagtgattctcttgtgtacatgcttgtgaattaaatttgtgtaaaatcccttggcaattgggtcttttaatataggaccaaattaaaacattttgctgaatatgtatagtttttcacaatttcattaggtaaataatggtttggtgatcatacatgagaaatgtacacattaaaaggccttgctgacaacttgcacaatgttgaacatagcctttaagcatcatttaaattttaaaggaatggagtttttcagcctgtggcccagcactggtcaagaaaacaagatggcaacatatatgctttcagggtcaaatttgagcaaactgtaaactgtcagggtgataaaatgtttctcttgatgtttacatgcacaagctttgcgttctgactataaaaagtgtgaacaaatcaatgccagattcctgttttgcgcattgtcatgggattcttaagtgaacctttctaaatgtggtcttgttcacatgctccacgtagctgtaacttcacatcatcagcttgcagtttgtaattgactaaagcattccagtgtcctctttctagattgccagctcatgacatggtgcttataaagatttaattaaagtaagaatgaaataaagtttttataattataaaaaaaaaaaaaaaaaaactc

SEQ ID NO: 1215 - DNA, 388 bp, Homo sapiens
  misc_feature (205)..(205): n is a, c, g, or t
  misc_feature (339)..(339): n is a, c, g, or t
  misc_feature (344)..(344): n is a, c, g, or t
  misc_feature (364)..(364): n is a, c, g, or t
  misc_feature (382)..(382): n is a, c, g, or t
aattcggcacgagctgaaggctagcaaaccgagcgatcatgtcgcacaaacaaatttactattcggacaaatacgacgacgaggagtttgagtatcggttagtgctggcgcgggagcaatagcgagggtcgtgagctttggccgctgagggcacaaggaattagtaacaggaactgaggcgatagaattggcgcatgcgtatganacatgtcatgctgcccaaggacatagccaagctggtccctaaaacccatctgatgtctgaatctgaatggaggaatcttggcgttcagcagagtcagggatgggtccattatatgatccatgaaccagaacctnaaatnttgctgttccggggccattnccaggaaccaaggaattnagtttc

SEQ ID NO: 1216 - DNA, 388 bp, Homo sapiens; identical to SEQ ID NO: 1215
  misc_feature (205)..(205): n is a, c, g, or t
  misc_feature (339)..(339): n is a, c, g, or t
  misc_feature (344)..(344): n is a, c, g, or t
  misc_feature (364)..(364): n is a, c, g, or t
  misc_feature (382)..(382): n is a, c, g, or t

SEQ ID NO: 1217 - DNA, 1400 bp, Homo sapiens
ctgattttgaataaaaatgaaagcattaaagggtttccctacaaaacatttttctttaaaatacttttgaaatggctataagcagttgactttcacccttggagagcatcacactgtgtgaggttcagtgattgttgaccctccccagcccctcctgcttctttaagttatctgtgtgcgtgcgcttcctctcaatcttctttgcacgctcatttctttttctctgacccatgagaaaggaaaacttactgatgataatttttaaatagtgtaatttattcatttatagcatgtcaggataaattaaaagaacatttgtctggaaatgctgccgggagcctattgtgtaaatgtaggtattttgtaaaataaccttgaaattgtaaattgacacgtgtttggtcagattgtgtcaagtttaatttgttttgttttcttttttcttttttttatttgaaaactactttagcaataattaattccatgattatcacattctgccattaagggatattagtaccgtaatactgaagaaattttattaagtctgaacttctggggtaggcagcttctttgtttcttttctatccacccttgtcggttgaggtatttgtttcttgactaataaaccctttgatacttttagccagaaatcagtctcataaagctatttttgagtatagtttgtgtaaaataaaaatgtttagctttggtaataacttccaagctgaactccctctagcaagatatttttcagtgcttttatttactatgcacttagactatgcactttttctgaaatatttttgtaacacttttttgtatttttgccatttgaaaaggttgtggtgtagttggtctgtaattaagttgcagatttaaaactgctgttagctttgtaaatcaaaatataggtgttttttgtcctggtatatcgtcattccatctgcagctggagctggaatcccattgatcttctagctaccattcattttcttcactgttcacaaaagaagagtgtgaaattcagtgaatgctgttactaatcctgttacgagatgaatctcatttcaccaaaattaaattatgtttttccgctaaaatgatgatacaagttgaagacacatcactctgaaattggaagacctcaccacttaaggctccacagtggcttactcagctgaactctaggttactactctttactttgttcacccattggggggtgcagtttttttaaaatgttgggagatggccattctaactactgttgaatgtctctgttttgggaaggtataacaagaaataaaaaagaatatatatgaagggagagactggttatctcctcccaaaaaaaaaaaaaaaaaaaaaaaaaaaaaagcggccgctcgaattaagcc

SEQ ID NO: 1218 - DNA, 97 bp, Homo sapiens
gggacagcccaggtcacacgtggggtcagcagaggtaccacgaagctaccttttgggatgattgctcgattgtttggtttttaaatctgagaagcct

SEQ ID NO: 1219 - DNA, 97 bp, Homo sapiens; identical to SEQ ID NO: 1218

SEQ ID NO: 1220 - DNA, 600 bp, Homo sapiens
tcttgaagcaactgaaccacccaaatatcatcaagtatttggactcgtttaccgagacatcaagcctgccaacgtgttcatcacagccagcaccactttgccttacttgagtcgtcttctcttcgagtggccacctggtagcctagaacagctaagaccacagggttcagcaggttccccaaaaggctgcccagccttacagcagatgctgaaggcagagcagctgagggaggggcgctggccacatgtcactgatggtcagattccaaagtcctttctttatactgttgtggacaatctcagctgggtcaataagggcaggtggttcagcgagccacggcagccccctgtatctggattgtaatgtgaatctttagggtaattcctccagtgacctgtcaaggcttatgctaacaggagacttgcaggagaccgtgtgatttgtgtagtgagcctttgaaaatggttagtaccgggttcagtttagttcttagtatcttttcaatcaagctgtgtgcttaatttactctgttgtaaagggataaagtggaaatcatttttaaaaaaaaaaaaaaaaaaaaaaaaaaaaaaaaaaaaaac

SEQ ID NO: 1221 - DNA, 600 bp, Homo sapiens; identical to SEQ ID NO: 1220

SEQ ID NO: 1222 - DNA, 287 bp, Homo sapiens
acgctgcatccaggccacagggtgctgtgtgtgacatagacaccagggagggaggagaaccctggtgagtcgaatcacggaccctcctccaagaaccctggttgcttgctctgcaggtgcgcctcctgggagtggtgtccaagggccagcccacgctggtggtgatggagctgatggctcacggagacctgaagagctacctccgttctctgcggccagaggctgaggtaagctgcttcgggggacccagcggggtactcggtggagcacccgctcctggcctcctc

SEQ ID NO: 1223 - DNA, 322 bp, Homo sapiens
gatcccagtgctgctgaaacaccaaccccgtgtttctgttttagaataatcctggccgccctccccctacccttcaagagatgattcagatggcggcagagattgctgacgggatggcctacctgaacgccaagaagtttgtgcatcgggacctggcagcgagaaactgcatggtcgcccatgattttactgtcaaaattggaggttcgtctggctttctgctttgaaaacataacgacccaggccaggtttgatttcagaaggaagttgtctataatgagccgttaagtcttttctgataatataaaggggcaagtacttc

SEQ ID NO: 1224 - DNA, 322 bp, Homo sapiens; identical to SEQ ID NO: 1223

SEQ ID NO: 1225 - DNA, 288 bp, Homo sapiens
gacgtgggccaggtgaacccctcttagggctctgtgagaggtggggcagtcaaggtggcagatgctaggaccaaggctgaaggttaagagcgtgtgaaccttttgtgttgtcagactttggaatgaccagagacatctatgaaacggattactaccggaaagggggcaagggtctgctccctgtacggtggatggcaccggagtccctgaaggatggggtcttcaccacttcttctgacatgtggtgagttgtgtgtggatgggtggatggacgctgggcttgaattc

SEQ ID NO: 1226 - DNA, 288 bp, Homo sapiens; identical to SEQ ID NO: 1225

SEQ ID NO: 1227 - DNA, 407 bp, Homo sapiens
ttgcgtgtgtgtgtgcgtttgcgtgtgtgtgtttgcgcgcgcgcgtgtgtgtgtgtgtctaaatggcttctttgttactactatcaactgtcatcggcaggtcctttggcgtggtcctttgggaaatcaccagcttggcagaacagccttaccaaggcctgtctaatgaacaggtgttgaaatttgtcatggatggagggtatctggatcaacccgacaactgtccagagagagtgtaagtgtagaaagggtttaaggtgtgtgaggtgttcgttgaaagggtattgccctttacacgtgtgcttggttttgcctttcctatgtctacacgctcaccgtgtttgcatgctgtatgttacaggtgtgtttgtgtttgcatagcttgtctttacatgcatgcttgcatt

SEQ ID NO: 1228 - DNA, 407 bp, Homo sapiens; identical to SEQ ID NO: 1227

SEQ ID NO: 1229 - DNA, 600 bp, Homo sapiens
ctgtgggaccacctgagcgagaagagggtggagccgggcttcgtgcccaacaaaggccgtctgcactgcgaccccacctttgagctggaggagatgatcctggagtccaggcccctgcacaagaagaagaagcgcctggccaagaacaagtcccgggacaacagcagggacagctcccagtccgccccacggagcaagtccaagccatccacccagaggcaagggagctgggccttggcatcctcgggcttgggagaatgactatcttcaagactgcctcgatgccatccagcaagacttcgtgatttttaacagagaaaagctgaagaggagccaggacctcccgagggagcctctccccgcccctgagtccagggatgctgcggagcctgtggaggacgaggcggaacgctccgccctgcccatgtgcggccccatttgcccctcggccgggagcggctaggccgggacgcccgtggtcctcaccccttgagctgctttggagactcggctgccagagggagggccatgggccgaggcctggcattcacgttcccacccagcctggctggcggtgcccacagtgccccggacacattt

SEQ ID NO: 1230 - DNA, 600 bp, Homo sapiens; identical to SEQ ID NO: 1229

SEQ ID NO: 1231 - DNA, 1400 bp, Homo sapiens
gatgggtcttccccaaccgaggcttcctgcaccagctctgcaggctggaccactggtccttactccctgccatggggctctgccactttgccaccctggcactgatcctgctggtgctgctggaggctctggcccaggcggacacacagaagatggtggaagcccagcgtggggtcggccctagagcctgctactccatctggctcctcctggcgcctacaccccctctcagccactgtcttcagtctccacagaaacagcatcaagtgtgcggagacaggcggctgaaagccagcagcacgaactgcccgtcagagaagtgcacagcctgggccagatactcccacaggtgggcccatattctggtgccgctgaaaatccagctccgcagggtccctgactccttcagccagcagatgcctgaaacaagctacctgacccgggtggggcctgacatccagtgctggcctgagtcgtgggggatggactcactgcagaagcaggacctccggaggcccaagatccatggggcagtccaggcatctccctaccagccgcccacattggcttcgctgcagcgcttgctgtgggtccgtcaggctgccacactgaaccatatcgatgaggtctggcccagcctcttcctgggagatgcgtacgcagcccgggacaagagcaagctgatccagctgggaatcacccacgttgtgaatgccgctgcaggcaagttccaggtggacacaggtgccaaattctaccgtggaatgtccctggagtactatggcatcgaggcggacgacaaccccttcttcgacctcagtgtctactttctgcctgttgctcgatacatccgagctgccctcagtgttccccaagaggatggccatgggtgtctcttcttcccaaaggggtgggtggttcaagggcaggtagctgatgctaagttggttctccctacaggccgcgtgctggtacactgtgccatgggggtaagccgctctgccacacttgtcctggccttcctcatgatctgtgagaacatgacgctggtagaggccatccagacggtgcaggcccaccgcaatatctgccctaactcaggcttcctccggcagctccaggttctggacaaccgactggggcgggagacggggcggttctgatctggcaggcagccaggatccctgacccttggcccaaccccaccagcctggccctgggaacagcaggctctgctgtttctagtgaccctgagatgtaaacagcaagtgggggctgaggcagaggcagggatagctgggtggtgacctcttagcgggtggatttccctgacccaattcagagattctttatgcaaaagtgagttcagtccatctctataataaaatattcatcgtcat

SEQ ID NO: 1232 - DNA, 1400 bp, Homo sapiens; identical to SEQ ID NO: 1231

SEQ ID NO: 1233 - DNA, 600 bp, Homo sapiens
cagctggaggagcgcttcggcgagagccccttccgcgacgaggaggagttgcgcgcgctgctgccgctgtgcaagcgctgccggcagggctccgcgacctcggcctcctccgccgggccgcactcagcagcctccgagggaaccgtgcagcgcctggtgccgcgcacgccccgggaagcccaccggccgctgccgctgctggcgcgcgtcaagcagactttctcttgcctcccccggtgtctgtcccgcaagggcggcaagtgaggatgcagtccagccgtggctccccacttccgactggctcccttcgggggctgtctgcgccttccacgccccccaggacgggcccagaggctgggggagccccgcggcggcctgaaccctgcctcccgcgcccgccctgctcgtccgcgtctgcagtcagcgtccccaacctgtgcgtctctgtgtccgggccggcctgctgcagccacctggtgccttagtccttgggctgggggagggggcccacccttaaaggcggcgggaggggagggagggagagtggagggtttgacgggcctggagggtattaaagagacacagaagaagctgcctgtc

SEQ ID NO: 1234 - DNA, 600 bp, Homo sapiens
gtgtatgcttacatgcccaacgggtccttgctggacagactgtcctgcctggatggtacaccaccgctttcctggcacacaaggtgcaaggttgctcaggggacagcaaatggcatcaggtttctgcatgaaaatcatcacattcatagagatattaaaagtgcaaatatcttactagacaaagactttactgccaaaatatctgactttgggcttgcacgggcttcggcaaggctagcgcagacggtcatgaccagccgaatcgtgggcacaacggcttacatggcacccgaagctttgcggggagaaataacacccaaatctgacatctacagcttcggcgtggttctgttggagctgataaccgggctggcggctgtggatgaaaaccgtgaacctcaactactgctggatattaaagaagagattgaagatgaagagaagacgattgaagattacacggatgagaagatgagcgatgcggaccctgcttcggtggaagcaatgtactctgctgctagccagtgtctgcatgagaagaaaaacagacggccagacattgcaaaggttcaacagctgctacaagagatgtctgcttaa

SEQ ID NO: 1235 - DNA, 600 bp, Homo sapiens
gctctccgctgtaaaggagtcccccagacaatggcagcttttggggttagatattttctcaatgctcttgggtgcaaacttgttttctatctccatagagtgggcaggggagtgtccattggcaccacctgcctcttgagtgtcttccaggtgatcacggtcagctccaggaaatccaggtgggcaaaacttaaagagaaagcccccaagcatgttggcttttctgttctcctgtgctggatcgtgtgcatgttggtaaacatcatctttcccatgtatgtgactggcaaatggaactacacaaacatcacagtgaacgaggatttgggatactgttctgggggaggcaacaacaaaatcgcacagacactgcgtgcaatgttgttatcattccctgatgtgttgtgtctggggctcatgctctgggtcagcagctccatggtttgcatcctgcacaggcacaagcagcgggtccagcacattgataggagcgatctctcccccagagcctccccagagaacagagctacgcagagcatcctcatcctggtgagcacctttgtgtcttcttacactctctcctgccttttccaagtttga

SEQ ID NO: 1236 - DNA, 195 bp, Homo sapiens
ccacttcctaacacatgctgccatttctggcttatggtttggcagcagaagaccaaagcagttgtcatgctgaaccgcattgtggagaaagaatcgagtggtgaaacagaacaatatctcactttcattatactacctggccagaatttggagtcccttgaatcaaccagcttcattctcaatttcttggtaaag

SEQ ID NO: 1237 - DNA, 600 bp, Homo sapiens
  misc_feature (140)..(140): n is a, c, g, or t
  misc_feature (433)..(433): n is a, c, g, or t
  misc_feature (513)..(513): n is a, c, g, or t
  misc_feature (545)..(545): n is a, c, g, or t
  misc_feature (588)..(588): n is a, c, g, or t
tggatttggagacggaggaaggcagcgagggcgagggcgagccagagctcagccccgcggacgcatgtccccttgccgagttgagggcagctggcctagagcctgtgggacactatgaagaggtgttccaggtgcgaaangtgcaaggcaccaacttgggcaaaatatatgccatgaaagtcctaaggaaggccaaaattgtgcgcaatgccaaggacacagcacacacacgggctgagcggaacattctagagtcagtgaagcacccctttattgtggaactggcctatgccttccagactggtggcaaamtctacctcatccttgagtgcctcagtggtggcgagctcttcacgcatctgggagcgagagggcatcttcctgggaagatacggcctgcttctacctggctgagatcacgctggccctgggncatctccactcccagggcatcatctaccggggacctcaagcccgaggaacatcatggttcagcagccagggcccacatcnaaactgaccgacttttggacttttggcaaggngttttattccatggggggcgcccttcaattgacaactttttgngggcaaccattg

SEQ ID NO: 1238 - DNA, 600 bp, Homo sapiens; identical to SEQ ID NO: 1237
  misc_feature (140)..(140): n is a, c, g, or t
  misc_feature (433)..(433): n is a, c, g, or t
  misc_feature (513)..(513): n is a, c, g, or t
  misc_feature (545)..(545): n is a, c, g, or t
  misc_feature (588)..(588): n is a, c, g, or t

SEQ ID NO: 1239 - DNA, 600 bp, Homo sapiens
taagatgggcctgtatgagacaggaaaaaccaacaggtttatctgaaggaccccaggtaagatgttaatctcccagcccacctcaacccagaggctactcttgacttagacctatactgaaagatctctgtcacatccaactggraattccaggaaccaaaaagagcatccctatgggcttggaccacttacagtgtgataaggcctactatacattaggaagtggcagttctttactcgtcccctttcatcggtgcctggtactctggcaaatgatgatggggtgggagactttccattaaatcaatcaggaatgagtcaatcagcctttaggtctttagtccgggggacttggggctgagagagtataaataaccctggctgtccagccttaatagacttctcttacattttcgtcctgtagcacgctgcctgccaaagtagtcctggcagctggaccatctctgtaggaagtctattaaggctggacagcccagggttatttatactctcccagcccacctcaacccagaggctactcttgacttagacctatactgaaagatctctgtcacatccaactggaaattccaggaacca

SEQ ID NO: 1240 - DNA, 600 bp, Homo sapiens
  misc_feature (597)..(597): n is a, c, g, or t
tataaatatatgtgtagtgaagctactgtgagtctttaaatggaaagagcaaatgagaagtggtttggatacacttgatgagagatgagagtgtcacattaataatttttaagactcttaggcagctatgggtttcttttgatcatttttgttctttattcatttgaacacgtttttgaagttcttcaaaactagtcagtttgaattttgacagctattcaatatgtgatctccaagtttaaaaaaatttttttccagacttccctaatcctaaaatgcgagtttttatttttaataactgtaccaaggaataagtatgaaaacagttctctgttaccatattttgtattctggaccacttactggtgaaagcaaccatgcaaaagaaattaatttggscaggcatgagccaccgcacctggccagatctttgtatgtcttaagtgtttcaaagttataagcatttttctggggggatgtccattttggagggatccattttgatcctttgtactctataatgtgaactttcccctgttccaacacttaaaagaaaattattagcacataatctaaaagatggaatttttttttttnctt

SEQ ID NO: 1241 - DNA, 600 bp, Homo sapiens; identical to SEQ ID NO: 1240
  misc_feature (597)..(597): n is a, c, g, or t

SEQ ID NO: 1242 - DNA, 551 bp, Homo sapiens
  misc_feature (2)..(2): n is a, c, g, or t
  misc_feature (15)..(15): n is a, c, g, or t
cnagtgtagacagcnaaccctcactaaagggaacaaaagctggagctccaccgcggtgcggccgctctagaactagtggatcccccgggctgcaggaattcggcacgagcaggcatgcagaaggctgacgtctatagctttgggatcatcctgcaggagatagcacttcgcagtggtcctttctacttggagggcctggacctcagccccaaagagattgtccagaaggtacgaaatggtcagcggccatatttccggccaagcattgaccggacccaactgaatgaagagctagttttgctgatggagcgatgttgggctcaggacccagctgagcggccagactttggacagattaagggcttcattcggcgctttaacaaggagggtggcaccagcatattggacaacctcctgctgcgcatggaacagtatgccaataacttggagaagctggtggaggaacgcacacaggcctatctggaggaaaaacgcaaggctgaagctctgctctaccaaatcctaccccattcagtggcagagcagttaaa

SEQ ID NO: 1243 - DNA, 449 bp, Homo sapiens
tctgtgctcccgactcctccatctcaggtaccaccgactgcactgggcggggccctctggggggaaaggctccacggggcagggatacatctcgaggccagtcatcctctggaggcagcccaatcaggtcaaagattttgcccaactggtcggcttcagagtttccacagaagagaggctttcgacgaaacatctctgcaaagatacagccaacactccacatgtccacaggtgttgcatatgtggactgcagaagaacttcgggagctcggtaccagagtgtaacaaccttgatcgtttcggctggcaagcctggtgggggtgccttgtccagatatgtccttaggtcctggtctacatgctcaaacaccagggttaccttgatctcccggtcagttcgggatgtggcacagacgtccatcagccggacaacattgggatgctcaaaa

SEQ ID NO: 1244 - DNA, 449 bp, Homo sapiens; identical to SEQ ID NO: 1243

SEQ ID NO: 1245 - DNA, 1400 bp, Homo sapiens
  misc_feature (955)..(955): n is a, c, g, or t
  misc_feature (1242)..(1242): n is a, c, g, or t
atcaatgcagtgaatgaacacgggaatgtgcccctgcactatgcctgtttttggggccaagatcaagtggcagaggacctggtggcaaatggggcccttgtcagcatctgtaacaagtatggagagatgcctgtggacaaagccaaggcacccctgagagagcttctccgagagcgggcagagaagatgggccagaatctcaaccgtattccatacaaggacacattctggaaggggaccacccgcactcggccccgaaatggaaccctgaacaaacactctggcattgacttcaaacagcttaacttcctgacgaagctcaacgagaatcactctggagagctatggaagggccgctggcagggcaatgacattgtcgtgaaggtgctgaaggttcgagactggagtacaaggaagagcagggacttcaatgaagagtgtccccggctcaggattttctcgcatccaaatgtgctcccagtgctaggtgcctgccagtctccacctgctcctcatcctactctcatcacacactggatgccgtatggatccctctacaatgtactacatgaaggcaccaatttcgtcgtggaccagagccaggctgtgaagtttgctttggacatggcaaggggcatggccttcctacacacactagagcccctcatcccacgacatgcactcaatagccgtagtgtaatgattgatgaggacatgactgcccgaattagcatggctgatgtcaagttctctttccaatgtcctggtcgcatgtatgcacctgcctgggtagcccccgaagctctgcagaagaagcctgaagacacaaacagacgctcagcagacatgtggagttttgcagtgcttctgtgggaactggtgacacgggaggtaccctttgctgacctctccaatatggagattggaatgaaggtggcattggaaggccttcggnctaccatcccaccaggtatttcccctcatgtgtgtaagctcatgaagatctgcatgaatgaagaccctgcaaagcgacccaaatttgacatgattgtgcctatccttgagaagatgcaggacaagtaggactggaaggtccttgcctgaactccagaggtgtcgggacatggttgggggaatgcacctccccaaagcagcaggcctctggttgcctcccccgcctccagtcatggtactaccccagccatggggtccatccccttcccccatccctaccactgtkgncccaagaggggcgggctcagagctttgtcacttgccacatggtgtctcccaacatgggagggatcagccccgcctgtcacaataaagtttattatgaaaamaaaaaaaaaaaaaaaaaaaaaaaaaaaaaaaaaaaaaaaaaaaaaaaaacaaaaaaa

SEQ ID NO: 1246 - DNA, 600 bp, Homo sapiens
gtccctgtcgtgttccaggcccgggtctccgtccagcatcgagggccgaggtcacggccagggtctgagcccgcggtcgcaggtctggttcggggtcagattccgcgcggcctccagggggcgccgtcgccgcccggctcggcccctcgcgggctcgctggcgttgtgcgcggcaggcggggccggaggcggcggcggctccgggggcgcgggccgggcggcggcggcggcggcgccccgactgcagtcccggcgggagcggagcgcgaagcgcggggccgggcccggagccggcgccatggggcggcgccgcctgtgagcggcggcgagcggagccgcgggcgccgagcagggccaggcgggagcgtcggcgcccgaggccgagcgagccgcggccgggccgggccgagcgccgagcgagcaggagcggcggcggcggcggcggcggcgggaggaggcagcgccgccgccaagatggcggacctggaggcggtgctggccgacgtgagctacctgatggccatggagaagagcaaggccacgccggccgcgcgcgccagcaagaagatactgctgcccgagcccaggtgaggagaagct

SEQ ID NO: 1247 - DNA, 600 bp, Homo sapiens
agtgcattgagtagggccggccagtgcaaggccactgcctgcccgaggacgtgcccgggaccgtgcagtctgcgctttcctctcccgcctgcctagcccaggatgaagggctgggtggccacaactgggatgccacctggagccccacccaggagctggccgcggcaccttacgcttcagctgttgatccgctggtcccctcttttggggtagatgcggccccgatcaggcctgactcgctgctctttttgttcccttctgtctgctcgaaccacttgcctcgggctaatccctccctcttcctccacccggcactggggaagtcaagaatggggcctggggctctcagggagaactgcttcccctggcagagctgggtggcagctcttcctcccaccggacaccgacccgcccgccgctgtgccctgggagtgctgccctcttaccatgcacacgggtgctctccttttgggctgcatgctattccattttgcagccagaccgatgtgtatttaaccagtcactattgatggacatttgggttgtttcccatctttttgttaccataaataatggcatagtaaaaaaaaaaaaaaaaaa

SEQ ID NO: 1248 - DNA, 600 bp, Homo sapiens; identical to SEQ ID NO: 1247

SEQ ID NO: 1249 - DNA, 600 bp, Homo sapiens
cgtcatcggcgtgctgcgggatcagcaacgctaccacgaagacattttcgggctcacgctgcgcacccaggaggtgacaagccgcatacgcacccagagcttttccttgcaggagcgtcagttgcggggcgcagtgccctgggcgttcgaccctcccggctcagacaccaacagcccctgagagccgcctggctttcccttccagttccgggagagcggctgcccgactcaggtccgcccgaccaggatcagccccgctcctcccctcttgaggtggtgccttctcacatctgtccagaggctgcaaggattcagcattattcctccaggaaggagcaaaacgcctcttttccctctctaggcctgttgcctcgggcctgggtccgccttaatctggaaggcccctcccagcagcggtaccccagggcctactgccacccgcttcctgtttcttagtccgaatgttagattcctcttgcctctctcaggagtatcttacctgtaaagtctaatctctaaatcaagtatttattattgaagatttaccataagggactgtgccagatgttaggagaactactaaagtgcctaccccagctc

SEQ ID NO: 1250 - DNA, 600 bp, Homo sapiens; identical to SEQ ID NO: 1249

SEQ ID NO: 1251 - DNA, 1400 bp, Homo sapiens
attagacctaataattatgttttttgatggtgttgaccaataaaatatctagtgataaggaaatttgtagcatcaactagaataatctacattgatagcatttattgtgataagtacattgtttccacttcttgatatgactgagatttatttctctcttttagatgaaattgttgatactttaggtgaaggagcttttggaaaagttgtggagtgcatcgatcataaagcgggaggtagacatgtagcagtaaaaatagttaaaaatgtggatagatactgtgaagctgctcgctcagaaatacaagttctggaacatctgaatacaacagaccccaacagtactttccgctgtgtccagatgttggaatggtttgagcatcatggtcacatttgcattgtttttgaactattgggacttagtacttacgacttcattaaagaaaatggttttctaccatttcgactggatcatatcagaaagatggcatatcagatatgcaagtctgtgaattttttgcacagtaataagttgactcacacagacttaaagcctgaaaacatcttatttgtgcagtctgactacacagaggcgtataatcccaaaataaaacgtgatgaacgcaccttaataaatccagatattaaagttgtagactttggtagtgcaacatatgatgacgaacatcacagtacattggtatctacaagacattatagagcacctgaagttattttagccctagggtggtcccaaccatgtgatgtctggagcataggatgcattcttattgaatactatcttgggtttaccgtatttccaacacacgatagtaaggagcatttagcaatgatggaaaggattcttggacctctaccaaaacatatgatacagaaaaccaggaaacgtaaatattttcaccacgatcgattagactgggatgaacacagttctgccggcagatatgtttcaagacgctgtaaacctctgaaggaatttatgctttctcaagatgttgaacatgagcgtctctttgacctcattcagaaaatgttggagtatgatccagccaaaagaattactctcagagaagccttaaagcatcctttctttgaccttctgaagaaaagtatatagatctgtaattggacagctctctcgaagagatcttacagactgtatcagtctaatttttaaattttaagttattttgtacagctttgtaaattcttaacatttttatattgccatgtttattttgtttgggtaatttggttcattaagtacatagctaaggtaatgaacatctttttcagtaattgtaaagtgatttattcagaataaattttttgtgcttatgaaaaaaaaaaaaaaaaaaaaaaaaaaaaaagggaggggg

SEQ ID NO: 1252 - DNA, 1400 bp, Homo sapiens; identical to SEQ ID NO: 1251

SEQ ID NO: 1253 - DNA, 600 bp, Homo sapiens
aggacgatgacatgggggacctggtggatgctgaggagtatctggtaccccagcagggcttcttctgtccagaccctgccccgggcgctgggggcatggtccaccacaggcaccgcagctcatctaccaggagtggcggtggggacctgacactagggctggagccykctgaaagaggaggcccccaggtctccactggcaccctccgaagggctggctccgatgtatttratggtgacctgggaatgggggcagccaaggggctgcaaagcctccccacacatgaccccagccctctacagcggtacagtgaggaccccacagtacccctgccctctragactgatggctacgttgcccccctgacctgcagcccccagcctgaatatgtgaaccagccagatgttcggccccagcccccttcgccccgagagggccctctgcctgctgcccgacctgctggtgccactctggaaaggsccaagactctctccccagggaagaatggggtcgtcaaagagtttttgcctttgggggtgccgtggagaaccccgagtattgacaccccaggggagggagcttgcccttcagccccacctt

SEQ ID NO: 1254 - DNA, 600 bp, Homo sapiens
ctggaggccaaggcggctggatcgcttgagcccaggagttcgagaccagcctgggcaatgtggcaaaaccccatctctacaaaatatacagaaattagctgcaggtggtggcatgcgcctgtagtccccagctactcaggtggcggaggtgggaggattgcttaagccccaggaggtcaaggctacagtgagcccaagatcacaccactgcactctagcctggaaaacagagcatgactctgtctaaataaataaataagaagcctgagaaaccataaacagaccaaacaataaacaggctgagaagaggaattgtaatgatcattagtggcagagaatttgtaacctgattgtggaaagcacatctgaaaacaaagattgaatgaactatttgaaaaaaatggcaatgaaagaaaatttacagaggcaaaacctgaatatccagtgaataataaaaagattctggctggctcaaaggtagtgagttctaccaatgtattgtccacagtcagttacagaccaaattccttgttctactctttcccccctcctcactaatgcacttgactagtctttaacgaagaaaaaaaaaaaaaaaaa

SEQ ID NO: 1255 - DNA, 600 bp, Homo sapiens
ccattgttctcttcagaaccctatctgggagagaaggcgaaccacctccgggtttccatcatgtcaaggtcacaggcatccatgtgtgcaaaccatctgccccagctgcctccacagactgctgtctccttgtcctcctcggccctgccccacttcagggctgctgtgagatggaattccaggaaagaacttcaggtgtctggaccctttctatctagataatatttttagattcttctgctccctagtgacctacctgggggcaaagaaattgcaaggacttttttttaagggtcagagttttcaaaacaaaagcatcttccctagaaatttttgtgaattgtttgcacttgtgcctgttttaaattaaattgagtgttcaaagccattgggcttcctgtgtctctgggagcggagaccggccgtcttggaggggggtctcctgtggcgggtgaatctcgtgtagcctcccctcctccccacgtgagctctccagcagccacaccacagaacacccaacttccctggtggcctgtggacccgaaaggagggcagagaggaagggaaacaggaagtgaaaggcccttgggaatgaaggcg

SEQ ID NO: 1256 - DNA, 600 bp, Homo sapiens; identical to SEQ ID NO: 1255

SEQ ID NO: 1257 - DNA, 348 bp, Homo sapiens
tatgtcaaatgaatgtgagaaatattataccttttcatataaattccataaagaaatgaaattgttacatgaatggcagtcatagtattaatcagaaattcattttcctgcacattctgtcaaattcttttgaaatatttcatttctcattcaattgtgacattgttcttacttgattatataatgagattcttgcagtaaattgataataaatgcttggcttctgtgtatctaggtggacctcacttgtttttagaagtccttcccatgatacagacattggcttgttggttttgttttattttgtttttaacatatgtcatttaaaaactcatattacctcctttt

SEQ ID NO: 1258 - DNA, 348 bp, Homo sapiens; identical to SEQ ID NO: 1257

SEQ ID NO: 1259 - DNA, 600 bp, Homo sapiens
gagttggtgctggtactgtgttatctccatgacttgggcatcatgcatcgagatgtgaagatggagaatattcttctagatgaacgaggccatctgaaactgacagactttggtctgtcccgccacgtgccccagggagctcaagcctacactatctgtggcactcttcagtacatggccccagaggtcctaagtggaggaccttacaaccatgctgctgattggtggtccctgggtgtcttgcttttctctctggcgactggaaagtttccagtggctgcagagagagatcatgtggccatgttggcaagtgtgacccacagtgactctgagatcccagcttctcttaaccagggcctctcactcctgctccatgagctcttatgccagaaccccctccatcgtctacgttatctgcatcacttccaggtccaccctttctttcggggtgtggccttcgacccagagctcctacagaagcagccagtgaactttgtcacggagacacaagctacccagcccagttcagcggagaccatgccctttgacgactttgactgtgatctggagtccttcttgctctaccctatccctgcttga

SEQ ID NO: 1260 - DNA, 600 bp, Homo sapiens; identical to SEQ ID NO: 1259

SEQ ID NO: 1261 - DNA, 600 bp, Homo sapiens
agtaaatgaatcaaaaggaaaaaacattgaaccagaggtgagggcagcacacccgcagcagctgtccaggcctgagccaatgcaaccctgggcgggaaggccagctcaccgtgagcaggtagaagccagccagccacccaggcagggaccttggttctccccacacactcccaggagcagggaacaggggtggagtggcctttcccagagctggagttggctgcagcagctttcgaatcagacctgccaaggtgatgggcgtctgagtttcacatctgggccccccgtgaccccactgagtcctgacagctaaggatgggccacctccacagctccgtcactcgtacttgggacaggcctctcatcctctgggaaggtcctccttgtttcctacccaactagaagggaaacagtggcatattctcatggtacatggttgtctgaaagccttacctaggaagacgcagggtctagatagaagctataaggaagccacacacataacccacatccccacacccccaacatcccccacactccccacaccccccacaccccccacatccccaccataattacccccacctccaaatatctcat

SEQ ID NO: 1262 - DNA, 600 bp, Homo sapiens; identical to SEQ ID NO: 1261

SEQ ID NO: 1263 - DNA, 1400 bp, Homo sapiens
aacaattctatgaaattagctggggagatactgtccttatttttcacagctgaagaaaccaaagctttgggaagtttgtgacttctctgagatcacagctggtgatagaaggagctgggacacgcgcttgggttgactggcttctggttttggttctctggcttctagtgctggaagaagccctctctttcccttctctttcctcagtagcatctgactcttttcataagcaaacagctgtataaacaaagcccccattttggtcaagcacagggtgaatgtgatattgttcccacaaccttattctccactcaacagccgcctggctttggggaagaggccgccttcaggtgacagtgcagctgtccaggtggccgtgcactgaaccaggctgagggagacaaaaaccccgcagacccgcctgcctttcagcgtccagttaactgcagaagtttaggctcacctcaaagatgtctagtttttccaagttacaatacagcagtttcctacagaacacccccttcctcaattgccaaggggccgcatcgcacggcatcaggccaccactgcaggccagcagattccaccccaggaacggtcatgaactcagcctttgtctcaacgaggggcgtaacatttccttacagtcaagccccatcaactagaagtgcttattacttttaggattaaaaaagtaataacagactttgacttaatactctgtcttttcagaggcaaagtgggtgggtagaggggagctttaaaaatagaagtacaaaacaacatcctggaaacatatgaccccagatggaataatgtcacattccccagtgcagataatgggctgctgctggctctgtggtgtctgtctgcagaagatttgctcagtcaaggaaattcaagtggtgagacctttccaccatgggtggtaagagaaacctgccttcaccaaaatctctgaaggggaaagaagtggagagaaaggtttgcttcacttcggggactgcagtttgagaaataaaagggatacagagatatctgcactttgtagaaagggcaagattatttgcttatatctgaagggaggtgggtggttttgctggatgtttggtctgaaagagttacttttgataaagttaatctaattgtagttatattttctgtgtgcttttttttaattactaagaaaaaaattggtgagttcagtagctttggtattatgagtgcaaatcataatagctccaatgtgaaaaaaaaaatcaaaagtataacttgtcacttaatgttagaaaattgcctaaaatgcagtgtaataaataatctctgtaccaaatagtaatttaaatggggtaattttctgcaaggaaaatgtactgtttttatgtttccaaccctcttga

SEQ ID NO: 1264 - DNA, 1400 bp, Homo sapiens; identical to SEQ ID NO: 1263

SEQ ID NO: 1265 - DNA, 600 bp, Homo sapiens
ttaatgagcgaacaggtcacagtgaccaaatggcaaatgagaacaaaaggaagctgaatttttccagatctgacaggaaagaattccattttccagaattgcctgtcacaatacagtcaaaagatacaaaaggaatggaagttaaacagataaaaatgctgaagagggagtcaaagaaaacagagtcatctaagataccaactttacttaacgtggatcaaaatcaagaaaaacaagagtttattcccttatctctgctgtctgcctgctgtcctattttcacaaatatttgctctcagctaactatcagggtggagatggccattgcgaggggaagaatttgaagagaaacaggttttttttctggtagtgtcttttcttttacatagtccaaaaaatacaagatgacaactcttcccgttttatttatctacaatagaagtgtgatgtgagttgttgttaagacagccatccatgtgcatgagcatcatccagctttttttgttagcaaaacatttactgttttcttttcccttttaagactctgttgatgtgataatttgatttggaattataaagtcatctcttctctgccttgaa

SEQ ID NO: 1266 - DNA, 600 bp, Homo sapiens; identical to SEQ ID NO: 1265

SEQ ID NO: 1267 - DNA, 600 bp, Homo sapiens
ttctaccctgtttttcccctctcacaggctgtgcgaagtttaactgtgcatctgaacaggtgacattcaaacctggtggcaggaggacccgatttctgagtacgccctgcttggctctttgtgtgtaacacctttactccttccttgtccttgtgtttctgctgcttggatctgatgtttcacgcagtccattttcatttgtctctttttgtatatcatctactcagtggcttggctgaattactgttaccctcagaagtttgggcccccacattaattatgataaaaaatgtcaaaataacaagttatctacaaatttcaatgtaactttctggtagaagtgcttcttcatggatctgtgacagagagtggatatggtatctaggcaatagattgctgggtcatttagaataatgaagactgaactccacagtcgtagtcagtgctgtctgtctgccctagcattagaaatgagagaaatcagccagacacggtggcgtacacctgtaatcccagcactttgggaggccgaggcgggaagattgcttgaggccaggagctcgagaccaaccctgggcaacatggtgataccccatctct

SEQ ID NO: 1268 - DNA, 1400 bp, Homo sapiens
aaggagaaagtaacaacagccagtggagacaaaaagaactgcttctctttctttccccctccaagttcctagtggagggctgagtccagcatcccagactcgtgtgactatataggcaagcatttggggacctacttcactttgataccctagccttcagcagctcaaggtgttggcctttggataggaggcttccaagtagtaaagctccctgctctcagcaagcccaacaccatggggaagggagatgtcttagaggcagcaccaaccaccacagcctaccattccctcatggatgaatatggttatgaggtgggcaaggccattggccatggctcctatgggtcggtatatgaggctttctacacaaagcagaaggttatggtggcagtcaagatcatctcaaagaagaaggcctctgatgactatcttaacaagttcctgccccgtgaaatacaggtaatgaaagtcttgcggcacaagtacctcatcaacttctatcgggccattgagagcacatctcgagtatacatcattctggaactggctcagggtggtgatgtccttgaatggatccagcgctacggggcctgctctgagccccttgctggcaagtggttctcccagctgaccctgggcattgcctacctgcacagcaagagcatcgtgcaccgggacttaaagttggagaacctgttgctggacaagtgggagaatgtgaagatatcagactttggctttgccaagatggtgccttctaaccagcctgtgggttgtagccctkcttaccgccaagtgaactgcttttcccacctcagccagacttactgtggcagctttgcttacgcttgcccagagatcttacgaggcttgccctacaaccctttcctgtctgacacctggagcatgggcgtcatcctttacactctagtggtcgcccatctgccctttgatgacaccaatctcaaaaagctgctaagagagactcagaaggaggtcactttcccagctaaccataccatctcccaggagtgcaaggtccaactgctcattgcctgtgtggcacaatggagaaaaactcaggcaagacctctctctcccctgctctagaacctgatcctccagatgctacgccaagccactaagcgtgccaccattctggacatcatcaaggattcctgggtgctcaagttccagcctgagcaacccacccatgagatcaggctgcttgaggccatgtgccagctccacaacaccactaaacagcaccaatccttgcaaattacgacctgaaaatggctgagggagggggctaagagaggagcaaagcaggaggtcttgggctaaaaatcttttttaccaaaaataaatctaagtctgatttagtttcatcaaaaaaa

SEQ ID NO: 1269 - DNA, 1400 bp, Homo sapiens; identical to SEQ ID NO: 1268

SEQ ID NO: 1270 - DNA, 600 bp, Homo sapiens
gggaaacccaagaaccctgccagcacccaaagtatcattgtgaacaaggcccccttggagaaggtcccggacctcatcagccaggtgttggccacctaccctgcggatggggaaatggcagaagccagctgcggagtcttctggctgctgtccctgctgggctgcatcaaggagcagcagtttgaacaagtggtggcgctgctcctgcaaagcatccggctgtgccaggacagagccctgctggtgaacaatgcctaccggggactggccagcctggtgaaggtgtcagagctggcggccttcaaggtggtggtgcaggaggagggcggcagtggcctcagcctcatcaaggagacctaccagctccacagggacgacccggaggtggtggagaacgtgggcatgctgctggtccacctggcttcctatgaggagatcctgccggagctggtgtccagtagtatgaaggccctgctccaggagatcaaggagcgcttcacctccagcctggtgagtgacagcagcgccttcagcaaaccaggcctccctccaggtggaagcccccagctggggtgcaccacgtctgggggactggaatag

SEQ ID NO: 1271 - DNA, 600 bp, Homo sapiens; identical to SEQ ID NO: 1270

SEQ ID NO: 1272 - DNA, 1400 bp, Homo sapiens
aggcagcaccgactgcatactcgagtttccggccaggaacttcaccctgccctgctcagcccagggctggtgcgagggcatgaacgagaagcggaacctctataatgcctacaggtttttcttcacatacctcctgcctcacagtgccccgccttcactgcgtcctctgctggacagcatcgtcaacgccacaggagagctcgcctggggggtggacgagaccctggcccagctggagaaggtgctgcacctgtaccggagcgggcagtatctgcagaactccacggcaagcagcagtaccgagtaccagtgtatcccagacagcaccatcccccaggaagactaccgctgctggccatcctaccaccacgggagctgcctcctttcagtgttcaacctggctgaggctgtggatgtctgtgagagccatgcccagtgtcgggcctttgtggtcaccaaccagaccacctggacaggtcggcagctggtctttttcaagactggatggagccaagtggtccctgatcccaacaagaccacatatgtgaaggcctctggctgacctatctgagggctcggctgaccagctgactatcctcagcagctgggcttgcctgtggagggagtgacttgcactggcagcactgcatgtcacctgggaacccctgcagacaaagctaacatcccagacagacagatgtgaccaggacaaacgtgcaataatgccaaatgttaaaatgtgagtttaccagcctagctatgggactgctggctcctagtccaggaatcatgggggtatgactgcctctccaaccctgtgggctgtaagcaagctcaggctagtctccccactgggggctgtgcccctccctgggacggttccgtgggcagccccatcactgtgttcaatagtgtgagaatgtagctaaagcccctgctgctgctgctgcacatgccacagcaggcggtgggggctgcgtggggacaatccatcgtggagtgttctctcagcttaggtctggacaggagacttggcgggagatgctccaggatgtgggtgattctgtacctggggaggctatctctgacctcccgacaggggacactcccaggccagcccaggggtcaggggcagaggtgcacacctcagcatgagccaagactggggtcagggagcaggtgtggtttgagccaggacctggggcgggggtggggccggggcctttctgcctcatttgctttcaatgaaagcctcaaagcagccaaaaccaggctttcccccttcctcgagtttgaatatccagaatcttttgtacttcttgttggttaaattgtttatttttgtaaaaaataaaataaaattagttaataaaatgatgtttcacagcaaactcttccct

SEQ ID NO: 1273 - DNA, 520 bp, Homo sapiens
gggaaactttctaaatcagtgtaaatgttgtagcttattctaaatgaaagaatggcagtaggtatttaattatttgggagactgtcaagaggtgcacagatgctcagattggtttgagtgccctttgctattctcagatgactctgtgtttttataataaaataaactgtacttgtttattcatgcttaattattctgaagggccgtgatgacctgagacaagatgctgtcatgcaacaggtcttccagatgtgtaatacattactgcagagaaacacggaaactaggaagaggaaattaactatctgtacttataaggtaactatttgtacttctgttagttcaccaaaaacatataaaagatgccatttggttgggtgaagtggctcatgcccatattcataatgctttgggaggccaaggtgggaggattgcttgaggccaggagttcgagaccagcctcagcaacatagtgagaccccatcttgacaaaaagttaaaaaaaaaaaaaaaaccagag

SEQ ID NO: 1274 - DNA, 520 bp, Homo sapiens; identical to SEQ ID NO: 1273

SEQ ID NO: 1275 - DNA, 474 bp, Homo sapiens
aatcatctaggatttgtaaaatgcaatatgcattaaaatagctggcaagatttgagttaaactcaacatggccggttatgcacatcatttaagtaggctaaaaatcctaaactacttaaagattataccaagtcagtggtcttaattgaaattatggctatatattagaaagagatggaatcagtgatttcagattgtttgtttcttttttctccagttggttacatacttggacttggtgatagacatgtacagaatatcttgataaatgagcagtcagcagaacttgtacatatagatctaggtaagtaataaaatctatgtatctattctttttagtaaatatttggtcatcatggaatgttgtttgcctaccaagatattacaaatataagagacagataaatcgaagcagtaaatattgggtttttttgttttcagcataaacagttgtcctagaagaaacagttaact

SEQ ID NO: 1276 - DNA, 483 bp, Homo sapiens
gatttgaggtggatctcacagacagtgacaaagatgaggaaggcagccagagcagaagtaaactactgtacatactagtgttcatagaacgtaggtaacatgtggtttcttgcctttgtaaagttcacattctaactggaaagaaagtaaattagctgtcaaacctcctaacttcactgtattctttactttaggtgttgcttttgaacagggcaaaatccttcctactcctgagacagttccttttagactcaccagagatattgtggatggcatgggcattacgggtgttgaaggtgtcttcagaaggtaagtgatatgaagtaaaggagggaaataatttttgatgtcaaaattacatgggctgggcatggttctttgcacctgtaatcccagctactcaagaggctgaagtgggaggattgtttgagcccaggagtttgagtccagcctaggcaatacagcaagaccctgtatctaaaa

SEQ ID NO: 1277 - DNA, 483 bp, Homo sapiens; identical to SEQ ID NO: 1276

SEQ ID NO: 1278 - DNA, 1400 bp, Homo sapiens
gctatttataaagccattttcattgtacttgataacagcacgagtcccaaaacttttagaaataaaataggacattggcttgattgaaaagagggactttttaaaaattgttctttcgtcagaagccttttggatgacttacaatagctctgatgaagataccaccccagcgtcagtccaataggtcagtgagtttcaacaggcatccatccctcccatgaagggattctggtgaggggaagtttctgtaatgacaggaaagcattgaccctcattgattgtcaactttggtattagccatgaaagacaggatgctcattgggtgttctgtagagtgaggaatgctgcctattccctcccagaacgtctgacccaggggtgtgtgttgaggagccctgggggaaatggaccaagttttcccacagagcagtattaggctgaagagcaggtgactggtaggccccagctcccatcattccctcccaaagccattttgttcagttgctcatccacgctggattccagagagttttccaatttgggaagccatgagaaaggtttttaaatcttgggaagatggagagagggacataggatagttgactccaacatgacaggaagaggctggagattgggaattggccatcaaccaagcctgtagtagtaaagccatggtcccgcattggaattacttggggaacttatacagttctgatacccaggctctcctagaccagttcaaccaattctaggtgggggactcaggcatcagtgtgtttcgtagctccccgggtgttttccctgtgcagccgagcttgggaaactgccatgctttttggatgtcaaggcgctgttggaggctgggtgtgacagcacagagccaggttgtcttgtggaaaccacagccacgggtttgccactggctcagcatggcctcactgccagtcccagcctggctgagggacaagatggtttctcttgggagttcctgagtggagcacccttccaggctttttgaaagccagctgatctgtggagccttgttaagggactcaatacggtgtttggatattgatgtttttccttgagactgtcttgtccatcaataaagatggaggatgtctcctctttgaaccccgcttccccaccagtactctctctcccttagagtttatgagttattcaaggaggagacttcttaaagacagcaacgcaattcttgtaacttgtgtaaatagccccatctttcagagtgataccatttctacatttgataatgcctgtattcctgtaggatgtatatagtttaggggattttttttttgtttggttttgttttttagaagtcaatatgtctggttttatttattgcttgaaaaagatcatttgaaaaaaataaa

SEQ ID NO: 1279 - DNA, 300 bp, Homo sapiens
  misc_feature (197)..(197): n is a, c, g, or t
ctatggctgttactgcggcatcggtggctcccactggccggtggaccagactgactggtgaggaagcagcctgcagggggacctccatggggatggaggagctgggggatcctgggaggatcctgggagaaggagggaagcctgggggcacctggaaaattcaggctgatctctcctctgggctactttgggctcgngggccccgagcagcccctggtccagcccagcctggctcacaggtccctccaggtcaaccatgacccttgcaggtgctgccacgcccacgactgctgctacggg

SEQ ID NO: 1280 - DNA, 487 bp, Homo sapiens
tatctcccctgagctgtgtgagggcaagccctacaaccagaagagtgacatctgggccctgggctgtgtcctctacgagctggccagcctcaagagggctttcgaggctgcggtgagtgtatgcaccctccaggggacaactgagaaatctactgcctcgcccagcagccctctatctgaccggtacagccctgagcttcgccagctggtcctgagtctactcagcctggagcctgcccagcggccaccactcagccacatcatggcacagcccctctgcatccgtgccctcctcaacctccacaccgacgtgggcagtgtccgcatgcggaggcctgtgcagggacagcgagcggtcctgggcggcagggtgtgggcacccagtgggagcacactttcgcctctgactgtgtccgccacagcctgcacctacactctgtcatcttttaccattgacaccttgcaccatgatctgaaaacacaatga

SEQ ID NO: 1281 - DNA, 487 bp, Homo sapiens; identical to SEQ ID NO: 1280

SEQ ID NO: 1282 - DNA, 476 bp, Homo sapiens
tctggtcaaaccagagcacgaaacaacacagcgctggaatactcgggcaccagcggtgcctccggcgactcctcccatccgggtcgcatgagcttcttctccaaactctcctcacgttttagcaaacgtcccacaatcgcagacgaggcggctaagccacgagttctacgattcacatggtcaatgaaaaccacatcgcccctgatgcccgatcagataatgcaaaagatcagggaggtgctggaccagaataattgcgactacgaacagcgggaaagattcgtcctgtggtgcgtgcatggagatcccaatacggactcactggtgcaatgggaaatagaagtgtgcaagctgccacgactctctctgaatggagtgcgcttcaagcgaatttccggcaccagcattggcttcaagaacattgcgtcgcgcattgcttttgacctcaagctgtgacttaaccaaacgaacaacga

SEQ ID NO: 1283 - DNA, 302 bp, Homo sapiens
  misc_feature (220)..(220): n is a, c, g, or t
  misc_feature (282)..(282): n is a, c, g, or t
  misc_feature (302)..(302): n is a, c, g, or t
tagagggccaccttagcacccgccgcgtcgcagctccgggactggccccggccgcgacgccgccgcgatgggcaacgccgccgccgccaagaagggcagcgagcaggagagcgtgaaagagttcctagccaaagccaaggaagatttcctgaaaaaatgggagaccccttctcagaatacagcccagttggatcagtttgatagaatcaagacccttggnaccggctcctttgggcgagtgatgctggtgaagcacagggagagtgggaaccactacgccangaagatcttagacaggcagn

SEQ ID NO: 1284 - DNA, 101 bp, Homo sapiens
agaaggtcttcatccagatgccaaatatgccaaggtgaagcttatcccactgggttgggattatgctgctgttatattcaacaggacatgccttatatctc

SEQ ID NO: 1285 - DNA, 159 bp, Homo sapiens
gagacagagccttggtgtgtcgcccaggcgacaaaagtgctaggattacaggcatgagctaccgtgcctggcctgtctatatttttaaaaagcatttgtcttaccttcaacccgtgattccaagtgcttatccaactctgaatcttttttcaccgcttc

SEQ ID NO: 1286 - DNA, 159 bp, Homo sapiens; identical to SEQ ID NO: 1285

SEQ ID NO: 1287 - DNA, 600 bp, Homo sapiens
agaagtttgcccagacagtcatgactagcagaattgtgggaacaacagcttatatggcaccagaagctttgcgtggagaaataacacccaaatctgatatttacagctttggtgtggttttactagaaataataactggacttccagctgtggatgaacaccgtgaacctcagttattgctagatattaaagaagaaaaaaaaaaaaaaaaaggccacatgtgctcgagctgcaggtcgcggccgctagactagtctagagaaaaaacctcccacacctccccctgaacctgaaacataaaatgaatgcaattgttgttgttaacttgtttattgcagcttataatggttacaaataaagcaatagcatcacaaatttcacaaataaagcatttttttcactgcattctagttgtggtttgtccaaactcatcaatgtatcttatcatgtctggatccccgggtaccgagctcgaattaattcctcttccgcttcctcgctcactgactcgctgcgctcggtcgttcggctgcggcgagcggtatcagctcactcaaaggcggtaatacggttatccacagaatcaggggataacgcagg

SEQ ID NO: 1288 - DNA, 600 bp, Homo sapiens; identical to SEQ ID NO: 1287

SEQ ID NO: 1289 - DNA, 600 bp, Homo sapiens
gaatcttctccgtgcaacctggaaagttcatctcttgtttccttcagtcaaagaaagtccattgtacataacaaaacagcccccaaacagcccagtgccgacaccattgttcctttcacactttcctttgttgcatgcagttgggttcaaatgccaaatagtgattagaagacgaccattctgatctgtgtgtgatctggtcactatgtgactgcctttacggtttctctccatgtgctatatgaatgaagaatgcataccagtgttttaaaaggtatttttatgtgtttttaaacacttttttaaatgagcctgacacctgtgtttcagcatttggagacatccccatgttattcttttaagtgtataattactgatacttttttgtttgtttgtttaactaagttgtgtttaatttatgtgcagtctttataatgtatgtatgttattacagttcaactatcatattttctttgattacatttataatttgatcttgctctgattataatgccagtgaatgttgctgaactctttgtatatgcaaattgcaagatttaaaccattctgatgcaaggacaaacctttactttgactacc

SEQ ID NO: 1290 - DNA, 600 bp, Homo sapiens
tcactagttaaacttgagaattttttatttctattaatcatttttctgggaaactcaatcctagaagctgattatcattactttcaaattaaaactctgtaccgcacaggaataacaaaaatacagaaatacttatacattaattcaatatttaatttttctcattgccaatggcctcctaatagcctaacagggctgtgtttatttattcattgctttaaagacctctttaatttgtaactgattttacatccaaattcatgtaccattctcataagattctctcatcaaatctatccatttttctgctcttagaaagggctggggttagccgggcgtggtcgtggctgacacctgcaatcccagcactttggaaggccgaggcaggcagaccacgaagtcaggaggtcgagacgatcctggctaccacggtgaaaccccatctctactaaaaatacaaaaattagctgggcgtggtggcgggcgcctgtagtcccagctactcgggaggttgaggcaggagaatggagtgaacctgggagacggagcttgcagtgagcctagatcggtatcccgggcgacagagcgagactctgtctc

SEQ ID NO: 1291 - DNA, 826 bp, Homo sapiens
tgtaaagatcaaacccgtgtggtagatgacaatggatttaaccctgtgtgggaagaaacactgacatttacagtacacatgccagaaatagctttggttcggttccttgtgtgggatcacgatcccattggacgagactttgttggacaaagaactgtgaccttcagcagcttagtgcctggctaccggcatgtctatttggaaggactgacagaagcatccatatttgtacacataaccatcaatgaaatctatggaaagaacagacaactccagggtctgaagggactgttcaataagaatcctaggcacagttcttcagaaaacaattcccattatgtacggaagcgatccattggagatagaattctgcgacgcacagctagcgccccagccaaaggcaggaaaaagagcaaaatgggcttccaagaaatggtggagataaaggattctgtgtccgaggccacaagagatcaagatggcgtgctgaggaggaccacacgcagtttgcaagcacgccctgtctctatgcctgttgacagaaaccttctgggagctttgtcgctgcctgtatctgaaacagcaaaagacattgaaggaaaagaaaactctctagactctagcttttgcaggccgactgagcaggctaaagcagaaatgtgcaaagtgcctttccccagacagttagaatgtgtaatgaagatggaaatttccgagacctgaatccccaaacccagactgatctctcttctcttcttgaatataaaagtaagctggcaagatttaaaaaactgaacccaaataaatattcatcatttttttcttc

SEQ ID NO: 1292 - DNA, 206 bp, Homo sapiens
atggagtcttgctatgttgcccaggctggtcttgaactcctgggttcaagcagtcctcctgcactggcctcccaaagtgctgggattacaagcatgagccaccatgcccagccagaatggatgtactacactttatccattattctactgaaggacatcttggttgcttttaagttatggcaattatgaataaagcttctacaaac

SEQ ID NO: 1293 - DNA, 1400 bp, Homo sapiens
tgctgcagcttcctgaagttgtgtccgttaaaaggcagggacccggtgtccaggctacagagggtgactccaggttccacaccaccactgtggaccagtgtgcctatggacttaggagagttcccagatcgcacaagggggctgccccagagggtgttcagcttgttgccaacagttgctgaagccaaagtctgcaaccttgatgttcaggtcaagtagccagaaacaggtgttctggctttaggtccctgtggacaatgccattctctccttcccaggctactgatgtcctgggttgctcctcttatggtagaagctcaagatggaatggctggagcttggctgcctccggttagagcctgggctctgtattgcagacatcacctggcagaattcctcatgggccccttttgtcgtgggtgcgactgctgggccagggttgtcgtgggtagtaaaggtatttaccaagacaaccgtgagtaaagaaaggcaaatttattacagaaactatgaaaatacattgcgagaatgcaacatgcagcacagcagagaaggggctgtctgcaaagataaagggctggagggaagttttctaaggttgtgctggacggcgctatgtgcaggtgagcttgtgctatatgctaagaatatgttggaataattttaactgccagacctttcctcttctggtgcccgagggaaacgccctgctgcttttagctgtcttgtaacccacacgccttttcacttctgaagttgcaagaataacggctgtggtttttcacacaaaagggttgcagactgggttaggtccctgttccgccaacctggctgtttcccagtttcagttaacttagtggtttactagagccccacacctttctctttcatatggccatgatccaggaggtaatccgtcacctcccctccactagagtgctccatggccagggataatccgtcacctcccctccaccagagtgctccatggccaggggtaatcctcacctctcctccgctagagtgttccatggccaggcagtgtttcctgggtccagagcacctcaaacaatttcagtgttgtggtgactcagggccttcaccatacagacttgacagcatagtctagaggctggaggggctctgtgactcccattaatgacagtcactgccacggtttccccaggcaggatgtgccaggagaactgctccatgttggctcagcagaatgttattataggtagctcaaaaagagagggagcagggcttctctagattatttcagggaacgagctattatttgaatgttaatttaagactattttatcaattaaaaatgtaaggcccaagaaacttcagtgaggaagaatgaacaaattgaataaatactgttaaacttt

SEQ ID NO: 1294 - DNA, 1400 bp, Homo sapiens
acctcttcaccaagctgacctccaaactgacccgaagggtcgcagacgaacctgagagaatcgggggacctgaggtcacaagttgccatctaccttgggatcaaacggaaaccgccccccggctgctccgattcccctggagtgtgaagctgaccagctcgcgccctcctgaggccctgatggcagctctgcgccaggccacagcagccgcccgctgccgctgccgccagccacagccgttcctgctggcctgcctgcacgggggtgcgggcgggcccgagcccctgtcccacttcgaagtggaggtctgccagctgccccggccaggcttgcggggagttctcttccgccgtgtggcgggcaccgccctggccttccgcaccctcgtcacccgcatctccaacgacctcgagctctgagccaccacggtcccagggcccttactcttcctctcccttgtcgccttcacttctacaggaggggaaggggccagggaggggattctccctttatcatcacctcagtttccctgaattatatttgggggcaaagattgtcccctctgctgttctctggggccgctcagcacagaagaaggatgagggggctcagcgggggagctggcaccttcctggagcctccagccagtcctgtcctccctcgccctaccaagagggcacctgaggagactttggggacagggcaggggcagggagggaaactgaggaaatcttccattcctcccaacagctcaaaattaggccttgggcaggggcagggagagctgctgagcctaaagactggagaatctgggggactgggagtgggggtcagagaggcagattccttcccctcccgtcccctcacgctcaaacccccacttcctgccccaggctggcgcggggcactttgtacaaatccttgtaaataccccacaccctcccctctgcaaaggtctcttgaggagctgccgctgtcacctacggtttttaagttattacaccccgaccctcctcctgtcagccccctcacctgcagcctgttgcccaataaatttaggagagtccccccctccccaatgctgaccctaggattttccttccctgccctcacctgcaaatgagttaaagaagaggcgtgggaatccaggcagtggtttttcctttcggagcctcggttttctcatctgcagaatgggagcggtgggggtgggaaggtaaggatggtcgtggaagaaggcaggatggaactcggcctcatccccgaggccccagttcctatatcgggccccccattcatccactcacactcccagccaccatgttacactggactctaagccacttcttactccagtagtaaatttattcaataaacaatcattgacccatgcctactcc

SEQ ID NO: 1295 - DNA, 1400 bp, Homo sapiens; identical to SEQ ID NO: 1294

SEQ ID NO: 1296 - DNA, 600 bp, Homo sapiens
attatggtctaagagcgctcaggctgggtgcagtggctcatgcctgtaatcccagcaatttgggaggccgaggcaggaagatcacttgagatcaggagttcgagaccagtctggtcaaaatggtgaaaccccatctctactaaaaaatacaaaagttagccaggcatggtcacgcatgcctataatcccagctactcaggaggctgacgcataagacttgcttgaacccgggaggtggaggttgcagtgagccaagatcacgccattgtactccagcttgggagatactcccgctgtctcaaaaataaaataaataaataggccaggcacagtggctcacgcctgtaatcccagcaccttgggagggtgaggcgggtggatcacttgaggtcaggagttggagaccagcctggccaacaggtgaaaccccatctctactaaaaatacaaaaagtagccgggcgtggtggcgcatgcctgtaattccagctactcgggaggctgtggcaggagaatcgtttgaacacgggaggcggaggttgcggttagccgagatcgcgccattgcactccagcttgggcaacgagcaaaactccatctc

SEQ ID NO: 1297 - DNA, 600 bp, Homo sapiens
ttgtggcgggtagactggagagtctacagatgggatgggtctgaccccttgtgggatgaaagccaaacctttcccatcgtccgtattctggcactcctcttcctgttaaaaccatgagaattcacttgagaggtattttagtcacttgattgttcccccaaagccatgagtttcttgggcaggttgaggagacctgtgttgctttcactgcaccatcagtgcactgtctttctgtgatgccttattcttcacaaagcatccctcaacacacacttcacaccagcctgctgcggcgggggctcattaaaaatagtcagggccgccgggcgcggtggctcacgcctgtaatcccagcactttgggaggccaaggagggtggatcacgaggtcaggagttcgagaccagtctggccaacatagtgaaaccccgtctctactaaaaatacaaaaaattagccgggtgtggtgttgtgcatctgtaatcccagctactcgggaggctgacgcaggagaatcgcttgaacccaggaggcagaggttgcagtgaaccaaaatagtgacactgcattccagcctgggcaacagaacaagactccatct

SEQ ID NO: 1298 - DNA, 600 bp, Homo sapiens
gtcacccatgctggagtgcagtggcacaatactgctcactgcagcctttacctcccgggctgaagcagttttcctgcctcaccctcccaagtagttgggaccacagacgcataccaccatgcccagctaattttataatttattttttgtagaaacagtgttgccatattctccaaactggtctcaaactcctgggctcaagcaatcctccggccttggcgtcccaaaatgctgggattacagatggatgtgagccaccattcctggccacagaatgctaatactagtatattttttaccaaaagagtatcaaggccagagtggtgggtggcacatgcttataacagcactttgggaggctgaggtgggaggatcgcttgagcccaggagttcaagaccagcctgggcaacatgttgagaccctgtgtctagcaaaaaaaaaaaaaaaatcattagccaggcatggtgggacacacctgtggtcctagctactcagtagtcttaggtgggaagatcacttgaacctgggaggtccatgctgcagggagctgaattcgtgccagtgcattccagcctgggtcacagagtgaaattcgatct

SEQ ID NO: 1299 - DNA, 600 bp, Homo sapiens; identical to SEQ ID NO: 1298

SEQ ID NO: 1300 - DNA, 1400 bp, Homo sapiens
gggaacttcggagagctcagattaggtaaaaatctctacaccaatgaatatgtagcaatcaaactggaaccaataaaatcacgtgctccacagcttcatttagagtacagattttataaacagcttggcagtgcaggtgaaggtctcccacaggtgtattactttggaccatgtgggaaatataatgccatggtgctggagctccttggccctagcttggaggacttgtttgacctctgtgaccgaacatttactttgaagacggtgttaatgatagccatccagctgctttctcgaatggaatacgtgcactcaaagaacctcatttaccgagatgtcaagccagagaacttcctgattggtcgacaaggcaataagaaagagcatgttatacacattatagactttggactggccaaggaatacattgaccccgaaaccaaaaaacacataccttatagggaacacaaaagtttaactggaactgcaagatatatgtctatcaacacgcatcttggcaaagagcaaagccggagagatgatttggaagccctaggccatatgttcatgtatttccttcgaggcagcctcccctggcaaggactcaaggctgacacattaaaagagagatatcaaaaaattggtgacaccaaaaggaatactcccattgaagctctctgtgagaactttccagaggagatggcaacctaccttcgatatgtcaggcgactggacttctttgaaaaacctgattatgagtatttacggaccctcttcacagacctctttgaaaagaaaggctacacctttgactatgcctatgattgggttgggagacctattcctactccagtagggtcagttcacgtagattctggtgcatctgcaataactcgagaaagccacacacatagggatcggccatcacaacagcagcctcttcgaaatcaggtggttagctcaaccaatggagagctgaatgttgatgatcccacgggagcccactccaatgcaccaatcacagctcatgccgaggtgggggtagtggaggaagctaaatgtataatgtttcataaaccctggcactggtcacaaagctcagctgtgaaaatgaaatttgtagtatttttaaacatgaatgtcaatttcaagtgtatttgaaatggttcctccaggagagatttgtgcaccattaggaaaatcttctctgcagaggaagtagccttctttggagaaaatggaaaatgggttctgatatgtgatctcagagtagcccatttcctagggcaccatggaaaacacaaatgtgatctttaagtatacctcttccccagtttggggaggaaaggactcagtttgcaccctttttgtatgtaaaataaaatgtcttacctttcttg

SEQ ID NO: 1301 - DNA, 1400 bp, Homo sapiens; identical to SEQ ID NO: 1300

SEQ ID NO: 1302 - DNA, 600 bp, Homo sapiens
atcatcctcctcactgtgatggcctatgaccgctacgtggccatctgtaagcccctgcactacacgatcatcatgagtccacgggtgtgctgcctaatggtaggaggggcttgggtggggggatttatgcacgcaatgatacaacttctcttcatgtatcaaatacccttctgtggtcctaatatcatagatcactttatatgtgatttgtttcagttgttgacacttgcctgcacggacacccacatcctgggcctcttagttaccctcaacagtgggatgatgtgtgtggccatctttcttatcttaattgcgtcctacacggtcatcctatgctccctgaagtcttacagctctaaagggcggcacaaagccctctctacctgcagctcccacctcacggtggttgtattgttctttgtcccctgtattttcttgtacatgaggcctgtggtcactcaccccatagacaaggcaatggctgtgtcagactcaatcatcacacccatgttaaatcccttgatctatacactgaggaatgcagaggtgaaaagtgccatgaagaaactctggatgaaatgggaggctttggctgggaaa

SEQ ID NO: 1303 - DNA, 600 bp, Homo sapiens
gtctatatcctggctgtgatggcctttgacaggtacatggccggctgcaaccctctgctttatggcagtaaaatgtctaggactgtgtgtgttcggctcatctctgtgccttatgtctatggattctctgtcagcctaatatgcacactatggacttatggcttatacttctgtggaaactttgaaatcaatcacttctattgtgcagatccccctctcatccagattgcctgtgggagagtgcacatcaaagaaatcacaatgattgttattgctggaattaacttcacatattccctctcggtggtcctcatctcctacactctcattgtagtagctgtgctacgcatgcgctctgccgatggcaggaggaaggcgttctccacctgtgggtcccacttgacggctgtttctatgttttatgggacccccatcttcatgtatctcaggagacccactgaggaatccgtagagcagggcaaaatggtggctgtgttttacaccacagtaattcctatgttgaatcccatgatctacagtctgagaaataaggatgtaaaagaagcagtcaacaaagcaatcaccaagacatatgtgagg

SEQ ID NO: 1304 - DNA, 600 bp, Homo sapiens; identical to SEQ ID NO: 1303

SEQ ID NO: 1305 - DNA, 936 bp, Homo sapiens
atgcccaattcaaccaccgtgatggaatttctcctcatgaggttttctgatgtgtggacactacagattttacattctgcatccttctttatgttgtatttggtaactctaatgggaaacatcctcattgtgaccgtcaccacctgtgacagcagccttcacatgcccatgtacttcttcctcaggaatctgtctatcttggatgcctgctacatttctgttacagtccctacctcatgtgtcaattccctactggacagcaccaccatttctaaggcgggatgtgtagctcaggtcttcctcgtggttttttttgtatatgtggagcttctgtttctcaccattatggctcatgaccgctatgtggctgtctgccagccacttcactaccctgtgatcgtgaactctcgaatctgcatccagatgacactggcctccctactcagtggtcttgtctatgcaggcatgcacactggcagcacattccagctgcccttctgtcggtccaacgttattcatcaattcttctgtgacatcccctctctgctgaagctctcttgctctgacaccttcagcaatgaggtcatgattgttgtctctgctctgggggtaggtggcggctgtttcatctttatcatcaggtcttacattcacatcttttcgaccgtgctcgggtttccaagaggagcagacagaacaaaggccttttccacctgcatccctcacatcctggtggtgtcagtcttcctcagttcatgctcttctgtgtacctcaggccacctgcgatacctgcagccacccaggatctgatcctttctggtttttattccataatgcctcccctctttaaccctattatttacagtcttagaaataagcaaataaaggtggccatcaagaaaatcatgaagagaattttttattcagaaaatgtg

SEQ ID NO: 1306 - DNA, 431 bp, Homo sapiens
  misc_feature (369)..(369): n is a, c, g, or t
  misc_feature (404)..(404): n is a, c, g, or t
aaacaatttgcttctggaaacaggacagccggggccgtgttcctgcaacagcagaccaagcaccgcgggcggacccaggcaagcacggaacaagctgagacggatgataatatggatacaaaatctattctagaagaacttcttctcaaaagatcacagctcttagaaatgtgctacgatgtctgtgaaggcatggccttcttggagagtcaccaattcatacaccgggacttggctgctcgtaactgcttggtggacagagatctctgtgtgaaagtatctgactttggaatgacaaggtatgttcttgatgaccagtatgtcagttcagtcggaacaaagtttccagtcaagtggtcagctccagangtgtttcattacttcaaatacagcagcaagtccanacgtatgggcatttgggatcctgatgt

SEQ ID NO: 1307 - DNA, 431 bp, Homo sapiens; identical to SEQ ID NO: 1306
  misc_feature (369)..(369): n is a, c, g, or t
  misc_feature (404)..(404): n is a, c, g, or t

SEQ ID NO: 1308 - DNA, 347 bp, Homo sapiens
ttgtaatttaaggatcggggaccaaaaatgtttaaagactaaatgtgttcacattactatagatatgtctataaggtgaagattcttttcttaggtatacaaatgtgatgttgtatataaatgggcttcccacccacaaatgcttattagcctaaaatggcctgaaagctctagtaattaaattatttctctgcgtcctaattttttgtctttgaaacagattatttagaaaatcatgtacttcgcttaagtttctaacttttacttgctttttccagagttatttataccaaatcctacaggggattgtgttttgtcactctagaagagttcttcacagagactta

SEQ ID NO: 1309 - DNA, 347 bp, Homo sapiens; identical to SEQ ID NO: 1308

SEQ ID NO: 1310 - DNA, 600 bp, Homo sapiens
cttctcaaagcaagaagggagcgctgaggcatgaagccctggggaaactggcagtaggttttggtttttattttttgagacagggtctcgctccgtcgcccaggctggagtgcaatgttgcaatcatggctcactgcagctttgaactcccaggctcaagcgatcctcccatctcagcctcctgagtagctgggactacaggcacaggccaccacacctggctaatgtttaaattttatgtagagagggcgccacactggcccgcgcccagcagctcattcagacctatgagctcaacgagacagccaagcagcatgagctgatgacactggatggcttcatgatgtacctgttgtcgccggagggggctgccttggacaacacccacacgtgtgtgttccaggacatgaaccagccccttgcccactacttcatctcttcctcccacaacacctatctgactgactcccagatcggggggcccagcagcaccgaggcctatgttagggcctttgcccagggatgccgctgcgtggagctggactgctgggagggccaggaggggagcccgtcatctatcatgccataccctcacctcca

SEQ ID NO: 1311 - DNA, 600 bp, Homo sapiens
agcctgtggaactgacccccactgataaactcttcatcatgaacttggaccaaaatgaatttgctggcttctcttatactaacccagagtttgtcattaatgtgtaggtgaatgcaaactccatcgttgagcctggggtgtaagacttcaagccaagcgtatgtatcaattctagtcttccaggattcacggtgcacatgctggcattcaacatgtggaaagcttgtcttagagggcttttctttgtatgtgtagcttgctagtttgttttctacatttgaaaatgtttagtttagaataagcgcattatccaattatagaggtacaattttccaaacttccagaaactcatcaaatgaacagacaatgtcaaaactactgtgtctgataccaaaatgcttcagtatttgtaatttttcaagtcagaagctgatgttcctggtaaaagtttttacagttattctataatatcttctttgaatgctaagcatgagcgatatttttaaaaattgtgagtaagctttgcagttactgtgaactattgtctcttggaggaagttttttgtttaagaattgatatgattaaactgaattaatata

SEQ ID NO: 1312 - DNA, 600 bp, Homo sapiens; identical to SEQ ID NO: 1311

SEQ ID NO: 1313 - DNA, 600 bp, Homo sapiens
gcaggctattcctttgctgttgactggtggtccctgggagtgacggcatatgaactgctgagaggccggagaccgtatcatattcgctccagtacttccagcaaggaaattgtacacacgtttgagacgactgttgtaacttacccttctgcctggtcacaggaaatggtgtcacttcttaaaaagctactcgaacctaatccagaccaacgattttctcagttatctgatgtccagaacttcccgtatatgaatgatataaactgggatgcagtttttcagaagaggctcattccaggtttcattcctaataaaggcaggctgaattgtgatcctacctttgaacttgaggaaatgattttggagtccaaacctctacataagaaaaaaaagcgtctggcaaagaaggagaaggatatgaggaaatgcgattcttctcagacatgtcttcttcaagagcaccttgactctgtccagaaggagttcataattttcaacagagaaaaagtaaacagggactttaacaaaagacaaccaaatctagccttggaacaaaccaaagacccacaaggtgaggatggtcagaataacaacttgtaa

SEQ ID NO: 1314 - DNA, 600 bp, Homo sapiens; identical to SEQ ID NO: 1313

SEQ ID NO: 1315 - DNA, 600 bp, Homo sapiens
aagaacatctcacatggagacctaaagccacaaaacatcctactggatgaggatggcaacatcaaatacctggactttggcttcagcaccacacttacgaagtgtgccagccttttgtggcacgtaccccctacgtggccccagaactcttcctgggccaggggtgtcagtgcccgccgtggagcccccaaagtttccaccttctgggagaaactgaagagggctcagagcgagccagcttttgagacttttaaaattcagctgcccgaggagggccagaagtcaggacagaagaccaccattcctgccagtgcacctgccggcctgcagaggaagccagccatttccagtgaagtcccccagcatgactccatggcctctccctccagccagagcaccagcagcagtgggagcggcccaggagtcaactgcccccagggaacatcccaggacgtcagttctgtccatgtgggagacccaggaggagtcacctgtccccagggaacagcccgggaagccagcaccctctccactgggcatcagatgaaaatgaaaggaattgaaattaagggagagattgaagtgtggcaccaagattga

SEQ ID NO: 1316 - DNA, 600 bp, Homo sapiens
actgcagctgccaggggcaaatacctgatctgcaagatgctgctcaggtacggagccagccttgagctgcccacccaccagggctggacacccctgcatctagcagcctacaagggccacctggagatcatccatctgctggcagagagccacgcaaacatgggtgctcttggagctgtgaactggactcccctgcacctagctgcacgccacggggaggaggcggtggtgtcagcactgctgcagtgtggggctgaccccaatgctgcagagcagtcaggctggacacccctccacctggcggtccagaggagcaccttcctgagtgtcatcaacctcctagaacatcacgcaaatgtccacgcccgcaacaaggtgggctggacacccgcccacctggccgccctcaagggcaacacagccatcctcaaagtgctggtcgaggcaggcgcccagctggacgtccaggatggagtgagctgcacacccctgcaactggccctccgcagccgaaagcagggcatcatgtccttcctagagggcaaggagccgtcagtggccactctgggtggttctaagccaggagccgagatggaaatt

SEQ ID NO: 1317 - DNA, 600 bp, Homo sapiens; identical to SEQ ID NO: 1316

SEQ ID NO: 1318 - DNA, 600 bp, Homo sapiens
gctctgcctcggtttccccatctggaaaatgggggcaggggtcctgacctacctcaggtggaacggtgagcagggaacatgtcggagtccttcagagaatgtgatgtgaggttggatcaacagtgtgggttcctgtcctgtttccccttcctctttggggctgaggaggaggttaaaggccaaatgctgtttcccaacaccccaaagtctgcacacgtctcatgaatgcatcacatttctgtcatatggatattagccattccgaaatctgtgtaatcaacttcacattattcaagttacaaatcactgtgtccatagaaaaactgtgctggtatttgctggacaaagggttgggccccttttatttttacctgccacccagcatctcccccacctgccccttctgggtgacacagccggtaaacggaatcacgtatggttctttctgtgggtctgtggcacagcaggaagagcccggtgccgccagcaccttgtggaagaccacacatgggtggtcccacagcatgggaccaggctggcctgagggatgcccagttgtaacaatgctgctgtcactgtctcattaaatatacatccttt

SEQ ID NO: 1319 - DNA, 600 bp, Homo sapiens; identical to SEQ ID NO: 1318

SEQ ID NO: 1320 - DNA, 498 bp, Homo sapiens
  misc_feature (5)..(5): n is a, c, g, or t
  misc_feature (10)..(10): n is a, c, g, or t
  misc_feature (13)..(13): n is a, c, g, or t
  misc_feature (32)..(32): n is a, c, g, or t
  misc_feature (63)..(63): n is a, c, g, or t
  misc_feature (72)..(72): n is a, c, g, or t
  misc_feature (154)..(154): n is a, c, g, or t
ttatnccatnttncgccaagttgggtccgagntggatccattagtacggccgccagtgtgtgnaattcgccntaagggtggtcgcggccgaggtccagaagggaagtcatccacaaagacctggttgccaggaactgtgtcattgatgacacanttcaagttaagatcacagacaatgccctctccagagacttgttccccatggactatcactgtctgggggacaatgaaaacaggccagttcgttggatggctcttgaaagtctggttaataacgagttctctagcgctagtgatgtgtgggcctttggagtgacgctgtgggaactcatgactctgggccagactccctacgtggacattgaccccttcgagatggccgcatacctgaaagatggttaccgaatagcccagccaatcaactgtcctgatgaattatttgctgtgatggcctgttgctgggccttagatccagaggagaggcccaagtttcagcag

SEQ ID NO: 1321 - DNA, 498 bp, Homo sapiens; identical to SEQ ID NO: 1320
  misc_feature (5)..(5): n is a, c, g, or t
  misc_feature (10)..(10): n is a, c, g, or t
  misc_feature (13)..(13): n is a, c, g, or t
  misc_feature (32)..(32): n is a, c, g, or t
  misc_feature (63)..(63): n is a, c, g, or t
  misc_feature (72)..(72): n is a, c, g, or t
  misc_feature (154)..(154): n is a, c, g, or t

SEQ ID NO: 1322 - DNA, 440 bp, Homo sapiens
ctgtgctcccgactcctccatctcaggtaccaccgactgcactgggcggggccctctggggggaaaggctccacggggcagggatacatctcgaggccagtcatcctctggaggtagcccaatcaggtcaaagattttgcccaactggtcggcttcagagtttccacagaagagaggctttcgacgaaacatctctgcaaagatacagccaacactccacatgtccacaggtgttgcatatgtggactgcagaagaacttcgggagctcggtaccagagtgtaacaaccacgggtgtaagtgccatctggtagctgtagattctggacctgcccgggcggccgctcgaagggcgaattccagcacactggcggccgttactagtggatccgagctcggtaccaagcttggcgtaatcatggtcatagctgtttcctgtga

SEQ ID NO: 1323 - DNA, 285 bp, Homo sapiens
ccagcctgttgcaggctgcttcgtagcgggcgtcggctgcggacttcccttcccgggtctggatcttttcatcctcgagacaggacaagatgaagttcacggcttcttctggggtaaagaccttgaagagcccatcacaggccaacaaaatgaacctgtcattgggggtcagacctcggccgcgaccacgctaagggcgaattccagcacactggcggccgttactagtggatccgagctcggtaccaagcttggcgtaatcatggtcatagctgtttcctgtga

SEQ ID NO: 1324 - DNA, 600 bp, Homo sapiens
tttaagtaggcattatttaccagaatagtcttccaccagtaaaacagtacctttaagttgtattggcccataacaatttggtatatgcttgcttatcttaatttgatcttgtagacccaaaaaaggcatttatattcagagcatctagaatgtacatcacatttttatttttcatttttaaagcttctacgcagattttggaccactcaatctggcaatggtttacagatattgctgccagatcaataagaaattacaggccattacaatggtaaggaagaaaattgttcattttactggctctgatcagagaaaacaagccaatgctgccttccttgctggatgctacacggttatatatgtggggagaacccccagacgaagcctatacaacattaatctttggggagacaccctatattcccttcaggcacacatatgcacgccgccgccgacccgctaacccaaacccgccccacacatcttgaagtctgctggccaacagacaaccgccctcacccctcttccgatgccgccaactcctcgccgacggtctcatccccccacacacaatgccccgttcaccgcgctccccccctc

SEQ ID NO: 1325 - DNA, 380 bp, Homo sapiens
tctcggagcccccagcccgggcaggagtgtggaaagtgccgaaaccgtgctgaaaatgcagagaggccaggacccgatggctgcgcgcacctgctgctccttgtcgcaacatctgctgactcccgaccacccggaaaaccaggaccagaacctgcaggcgaaccatatttacctatacggaggctgatgagagctcgccgacgtcatgggcataggtgaccgctgtgagaacaagataacgcctacaccactggtcacatgttccacattgattttggccgcttcctgggccgtgcccagatgtttggcaacatcaagcgggaccgtgccccctttgtcttcacctcggacatggcgtatgtcatcaacgggggtgacaa

SEQ ID NO: 1326 - DNA, 380 bp, Homo sapiens; identical to SEQ ID NO: 1325

SEQ ID NO: 1327 - DNA, 600 bp, Homo sapiens
ccccagaacgctccctgggccaggcatgccagtgacccgccagggacatacaaagcctcagtgtcatactgtatttcaggaatacagtaggtagaagggccaggactttgcccttttactcagggaagcctccaaacttcaagaaaaaattctcacaggaagatatcatgccccaccacttcttgcccttcaacttgactcattaaaaaattactaatgctgaacgccaggaagtgtccttcactgtaactgatgaaaaatccatgggtgaaaagtagccagaagatgccactgataccatacgaagagccactcctggaccaccccaaacaatccagctcatggtggccatgggatttcaggccaagaacatctctgtggcaatcatagaaagaaaattcaactatcccatggccacctacctcattttagagcacacaaaacaagagaggaagtgctccaccatcagagaactgtcccttcctcccggggttcccacctctccttccccatccactgaactttccaccttccctctctcactgatgcgggctcatagggagccagcttttaacgttcagcctcccgaagaaagccagg

SEQ ID NO: 1328 - DNA, 600 bp, Homo sapiens; identical to SEQ ID NO: 1327

SEQ ID NO: 1329 - DNA, 502 bp, Homo sapiens
cttaaagtgaaatttaaaaagtaataataatttttaaaaatgtttaaaggcttactttggagagacagttttacatagcttaatattttatcattaaaggcatggtggagctggttcctgcttccgataccctcaggaaaatccaagtggaatatggtgtgacaggatcctttaaagataaaccacttgcagagtggctaaggaaatacaatccctctgaagaagaatatgaaaaggcttcagagaactttatctattcctgtgctggatgctgtgtagccacctatgttttaggcatctgtgatcgacacaatgacaatataatgcttcgaagcacgggacacatgtttcacattgactttggaaagtttttgggacatgcacagatgtttggcagcttcaaaagggatcgggctccttttgtgctgacctctgatatggcatatgtcattaatgggggtgaaaagcccaccattcgttttcagttgtttgtggacctctg

SEQ ID NO: 1330 - DNA, 502 bp, Homo sapiens; identical to SEQ ID NO: 1329

SEQ ID NO: 1331 - DNA, 266 bp, Homo sapiens
ggcaggaagatggcttgagcccaggagtttgagaccagcctgggcaacatggcaagacctcatctctactaaaaattgaaaaattagccgggcacagtagcgtgcacccatagtcccagctgcttgagaggctgaggcaggagggccacttgagcccgggaggttgaggctgcagtgagccatgatcacaccactgcactccagcatgggtgacagagtaaaaccctgacatgtattgcgggcgctctagaggataacaagcatac

SEQ ID NO: 1332 - DNA, 415 bp, Homo sapiens
accgggacgacccacgcgtccgggaatttaattctattatatatgcagactttctaaagaagataaagcttttttatgggagaaacgttattattgcttcaaacacccaaattgtcttcctaaaatattagcaagcgccccaaactggaaatgggttaatcttgccaaaacttactcattgcttcaccagtggcctgcattgtacccactaattgcattggaacttcttgattcaaagtaagtcaaatacatttatttgctcttgttttattgtcagtttttccagtaaggtatgttgccagaagtatttcctttccttttaacatgaaagcaattcaatataatccaaatgtgtaaatgtatatttatacaaacatatcttctgcattgaagttgtcaataaagcattgcatgt

SEQ ID NO: 1333 - DNA, 415 bp, Homo sapiens; identical to SEQ ID NO: 1332

SEQ ID NO: 1334 - DNA, 489 bp, Homo sapiens
ccgacgatttcgtgaggcggcagccaggtggggttccagccagagcacgcacgcacggagccgggagcatgcagcctgcactgcgggggatgtgatgctcggctctaactcgcctggctggcccgccacggacgcctcagcttgcaaccatggtaacgtttctggcgggggacacccccgggagcccaccgcgatgggcagcctcctggtgactgatggacgagtgtccacctcccagaccgagagcgcttagtaggtcggaggaagtggagaggatgtaacacgcccccagccgggagtgaagccctgaggagctcctccccccttcgttcccaccctcaagtctgacgatgacacctccaattttgatgaaccaaagaagaattcgtgggtttcatcctctccgtgccagctgagcccctcaggcttctcgggtgaagaactgccgtttgtggggttttcgtacagcaaggcactggggattcttgg

SEQ ID NO: 1335 - DNA, 489 bp, Homo sapiens; identical to SEQ ID NO: 1334

SEQ ID NO: 1336 - DNA, 600 bp, Homo sapiens
tggaattccataagtgactgtgctaaaagtgttttgaaacaacttatgaaagtagatcctgctcacagaatcacagctaaggaactactagataaccagtggttaacaggcaataaactttcttcggtgagaccaaccaatgtattagagatgatgaaggaatggaaaaataacccagaaagtgttgaggaaaacacaacagaagagaagaataagccgtccactgaagaaaagttgaaaagttaccaaccctggggaaatgtccctgagaccaattacacttcagatgaagaggaggaaaaacaggtaggaagaatcattgctgcatttctcccaagtgtaaaataccctcaccacacctggaacatttttttgcaaatctgtctttttgttgttagtttgtaacaaaggccgagcgttatatagcaagtaaagttctttctgccttataaggctagcatgatttagcgaggtggcctacatgtttattttaaggttggtgattatgtagggcaggtgtctgcaaactttttctgtaagggaacaaacagtaaatattttaggctttgtgggccctagtagtctttgtcacaactactc

SEQ ID NO: 1337 - DNA, 600 bp, Homo sapiens; identical to SEQ ID NO: 1336

SEQ ID NO: 1338 - DNA, 600 bp, Homo sapiens
  misc_feature (460)..(460): n is a, c, g, or t
  misc_feature (520)..(520): n is a, c, g, or t
  misc_feature (530)..(530): n is a, c, g, or t
cacccggacctttcaacattttccctttcacctaaaactgtatttttctctgctaagaccggctaccctactttcattttcctttcactcttcttggctcttttgggccttttaggaatttgggatgattcaggctctgacaggcatggtactagatttattttaggctgctcttttgctgttgtccaacaggccaaggagagatttaaatgatttatccaatatttgctaaatagtcatgtgtttcatttatcccatatatagttcagccttaatattgtttttgttttgatttgttacactagtgcatacatagagacgtgaagccagaaaatatcctcatcacgaaacattccgtgattaagctttgtgactttggatttgctcggcttttgactggaccgagtgactactatacagactacgtggctaccaggtggtaccgctcccctgagctgcnggtgggggacacgcagtaccggccccccggtgggatgtttggggcaattggctgtgtctntgctgagctngctgtcagggaagtgcctctggtggccaggaaaatcggaatgttggatcagctgtatctgattaggaaga

SEQ ID NO: 1339 - DNA, 600 bp, Homo sapiens; identical to SEQ ID NO: 1338
  misc_feature (460)..(460): n is a, c, g, or t
  misc_feature (520)..(520): n is a, c, g, or t
  misc_feature (530)..(530): n is a, c, g, or t

SEQ ID NO: 1340 - DNA, 600 bp, Homo sapiens
tggtacccctgagtacttggcacctgaagtgcttctggaaagagccttatgatcgagcagtggactggtggtgcttgggggcagtcctctacgagatgctccatggcctgccgcccttctacagccaagatgtatcccagatgtatgagaacattctgcaccagccgctacagatccccggaggccggacagtggccgcctgtgacctcctgcaaagccttctccacaaggaccagaggcagcggctgggctccaaagcagactttcttgagattaagaaccatgtattcttcagccccataaactgggatgacctgtaccacaagaggctaactccacccttcaacccaaatgtgacaggacctgctgacttgaagcattttgacccagagttcacccaggaagctgtgtccaagtccattggctgtacccctgacactgtggccagcagctctggggcctcaagtgcattcctgggattttcttatgcgccagaggatgatgacatcttggattgctagaagagaaggacctgtgaaactactgaggccagctggtattagtaaggaattaccttcagctgctaggaagagctgtatt

SEQ ID NO: 1341 - DNA, 600 bp, Homo sapiens; identical to SEQ ID NO: 1340

SEQ ID NO: 1342 - DNA, 600 bp, Homo sapiens
ctgctttgcttcgtgttttcttctaacctggcaaggagagagccaggccctggtcagggctcccgtgccgcctttggcggttctgtttctgtgctgatctggaccatctttgtcttgccttttcacggtagtggtccccatgctgaccctcatctgggcctgggccctctgccaagtgcccctgtgggatgggaggagtgaggcagtgggagaagaggtggtggtcgtttctatgcattcaggctgcctttggggctgcctcccttcttattcttccttgctgcacgtccatctcttttcctgtctttgagattgacctgactgctctggcaagaagaagaggtgtccttacagaggcctctttactgaccaactgaagtatagacttactgctggacaatctgcatgggcatcacccctccccgcatgtaacccaaaagaggtgtccagagccaaggcttctaccttcattgtccctctctgtgctcaaggagttccattccaggaggaagagatctataccctaaggcagataggcaaagaagataatggaggagcaattggtcatggccttggtttccctcaaaacaacgctgcaga

SEQ ID NO: 1343 - DNA, 333 bp, Homo sapiens
tggcggcggtccgctggggaagatgccgcgggcgcagttggcggacccgtggcagatgatggctgtggagagcccgtccgactgcgctgacaatggacagcaaattatggatgaacctatgggagaggacgagattagcccacaaactgaataagtcagtatcaaagaagttgctgtcacacattgtgtaaaggaaggacatgataaggcagatccttcccagattgaacttttaagagtcttacggcagggatcattgggaaaggtgtacttaggtaagaaagtctcaggctctgatgctaagcagctgtatgccatgaaggtattgacgag

SEQ ID NO: 1344 - DNA, 333 bp, Homo sapiens; identical to SEQ ID NO: 1343

SEQ ID NO: 1345 - DNA, 600 bp, Homo sapiens
gtggccgacccccagccaggttcccaggcaggatgagctggggttggggtggctaggccgagggccttgggagctgggcagtctgggctgggctgggctgggcagggcgccacatggaagctggaggagcaacgggagcgctgggcgtggggagcaaattgcccagtgccttctgtttcccaggcagctctgtggccatggatatgttccagaaggtagagaagatcggagagggcacctatggggtggtgtacaaggccaagaacagggagacagggcagctggtggccctgaagaagatcagactggatttgtgagtgctgggacggcccctgagttacccaccctgggccatcacaacctgggcgctccctgatccgttccctctttcctggagtccacgtttaactcctctgggtgctgcccagcagcccttacctgtcctctccccagttcactgccttctgaccagcctttgccggggccctgactgtggagtttggtggatgacgtgccaaggagcacaggtctccattgccggggccctggtcattctgtggggttaaggagaagccgatccccctggctggaagtgccctt

SEQ ID NO: 1346 - DNA, 458 bp, Homo sapiens
tggcagttatctccattttggaagaatataaactgaaatgcaggaggtgaaagagtttgggctgggatcagagcccagaagtaagtcctcatgaagccctttccactaggaccacccaaagtaggtgaaggaagggagaagttgagaaaggaaaggagattatctgtaatgtattatttattaatgcgttcccagtcatttcagtgagaactgtccctttaccctggacctgtgggtgttcaccctgcatgctcataccaagtctctgtggatgacacatgcctcttccaggtaggccatgccctcacacacatccagacacatgcccagcagggtctctgcagcaaaaagtccccgctgggtgcgtagataatctgacaggcagccgtgctccatgaactcaaacaccaggcagatgggggcctgctccaggcacaccccatacagctgcaccagtt

SEQ ID NO: 1347 - DNA, 458 bp, Homo sapiens; identical to SEQ ID NO: 1346

SEQ ID NO: 1348 - DNA, 476 bp, Homo sapiens
gttgctaggcaggcctgtagacttgccatggtgacacgggagccaccttacgcttctggtctattctttccaggctctttgtatgagaaaaggagccaagagcccaccttgtgtctaggtttggaccagagcctgcaggggaacaaaggtccttgggactagtagatcagaagcagggggggctggctggtggggtcagggccctgaggtccagccacctccacctcaggaagaatatttgccctagaatgccagctaggagctttctgcccgggctcggcttacatccatcagtgctgcgttgatgtaattgctggattctccgtccactgagataaggaagggcaggcagcggtccagaggcagcacgtccatacttcgattcttatcatggttcgggcgagcaatgctgcagtcctcgggccgcacacgggtgtcacaatgttgagggtctgtggggcacaaaggtgaataga

SEQ ID NO: 1349 - DNA, 490 bp, Homo sapiens
ttgctgctgttcatgtacttttcattcattgattcattcattccttcattgatttacatttttggagcatgcactgccagttactgggcaggagtactgtgaggaagtgagaaaccgctctgccttctaacgcttctggcctgtgcctggaagagatcggtacagacccaagcatgaccccagcacgtgggagtgatgtgttggaggtgtgcaccaggctcttgaggcgctggctctgccagcctcagcatagcacctttcctgcccacaggcacaacgaggccctcttggaggaggcgaagatgatgaacagactgagacacagccgggtggtgaagctcctgggcgtcatcatagaggaagggaagtactccctggtgatggagtacatggagaagggcaacctgatgcacgtgctgaaagccgaggtagagagggcccctccgcacggggatccccagcgcttgggccctggctgtctgttatggct

SEQ ID NO: 1350 - DNA, 482 bp, Homo sapiens
gttaggatccggagtgttggaacagcagctgttaatatgtgccttgtggcaactggcggagcagatgcatattatgaaatgggaattcactgctgggatgttgcaggagctggcattattgttactgaagctggtggcgtgctaatggatgttacaggtaaaattatggagagtgaagcagatctccacacatctgttggacttttgtccatatgtagaatttaaaaaactttttgatatatgttatactgcagtttttgaagcagaaacaagctatataattgtgtgcaaaatcaaaataagctttaggagatagaggtaaggataagaggtaatggtaatgtgagacttacaatgataaatggctaatccttttctagtgtgagtttcaggtactcctgaaaggctgtagaaaaagcctagaccaagtttgtccaacctgcagtccatgggccacatgtggctcaggatggctttgaatg

SEQ ID NO: 1351 - DNA, 482 bp, Homo sapiens; identical to SEQ ID NO: 1350

SEQ ID NO: 1352 - DNA, 445 bp, Homo sapiens
cgagaaggaagctggcataggccacaccccatcctcctctctgaagctatgcttatagcttgtgacattatgtagcaaaccaaataatatttaaggtcgccttcagctcctttagggatgggggatctatcccgttaacagatcctcaaagtcatgttgttgctaatctatattagttatccctcctgcctcatccttctgagagggttcctttctctagggaaggagggaggtcctcaaattgtatacgacaatgcatggggaagcacttcctccactgacctctttccagcagtgattcataatctggtagacgtgtgtggaggccagccggggcttgtacaaccgaaatccggtactgatgtcttccaccacctctgagttgcttcggttttcatacgggattttgccttcactgaaaacttcccacatcagcacacctaca

SEQ ID NO: 1353 - DNA, 445 bp, Homo sapiens; identical to SEQ ID NO: 1352

SEQ ID NO: 1354 - DNA, 446 bp, Homo sapiens
tcttctcatagacatgcctgcagagagtatagaatacacaaagaactggatcaccccagaatagttaaactctatgattatttctccttggatacagatacgtaagtgaatattaaggttcaatttttaaggaaagatatgcttgctttctctttccccatcctgtgttgatgatataaatactctccatttccccattgtgattctgaattcttggatattacttatgtctaatttttttctcttctctgttgtaggttttgtacagtgttagaatactgtgaaggcaatgacttggatttctatctgaagcaacacaagttaatgtcagagaaagaagctcggtctattgtaatgcagattgtaaatgcactaagatatctcaatgagatcaaaccccctattatacattatgatcttaagccaggtaattatgaaatttgtct

SEQ ID NO: 1355 - DNA, 446 bp, Homo sapiens; identical to SEQ ID NO: 1354

SEQ ID NO: 1356 - DNA, 387 bp, Homo sapiens
ctcccagaggtgactggaacttttctggacccctgacattcttgaaggggttctgtgtctgcaaggatgagtgggccattgagaagaaaatgtacctgcaggccccgtgagtggacatgacagggaacaggaaggtggcccttccacctggcaagtgacatcctgtctgtcttggtgtttctctctcaggggagtttggcgaggtctgcagtggccacctgaagctgccaggcaagagagagatctttgtggccatcaagacgctcaagtcgggctacacggagaagcagcgccgggacttcctgagcgaagcctccatcatgggccagttcgaccatcccaacgtcatccacctggagggtgtcgtgaccaagagcacacctgtga

SEQ ID NO: 1357 - DNA, 387 bp, Homo sapiens; identical to SEQ ID NO: 1356

SEQ ID NO: 1358 - DNA, 406 bp, Homo sapiens
tgggtcaacagatgtaagcgtcttactttctccccaacataattatttcattaactatgaagactctagacgtttactttgtagaaacaggaaagttcatttcttcacaaattgcaaatccgctagaaaaagaatgaattcagaatgcaggtggctctgtaatgctttagcatgtgaaagcctctctggctgtatccaaagcccttggggattttgattacaaatgtatccatgggaaaggtcctactgggcagcttgtctcaccagagcctgaagtccatgacactgaaagatctgaagaagatgatcacttcattatccttgcatgtgatagtatctgggatgttatgggaaatgaagagctctgtgattttgtaagatccaggcttgaagtcactgatgaccc

SEQ ID NO: 1359 - DNA, 463 bp, Homo sapiens
gggtcttcgataatttttaaatgtgtaaaagagttcaaagactgagaagtctgagaactgatggacaaatgcaaagtctttctgaatattttgtattaggacccaaaatttctaggtgtgccactgctcaaccctcatgaagccatcttaatgtgttttcttgtctggagtctgcacatagaatccaaactcatgaaatacacactgtgtgcccaaaaaagtgctcagaaatctgtctatgaatgttagtctgttcttttggatagcatgaagcttttacttacttggggaaagagtggtctctcatctcttttctttttgaggcactctgccattaatctcttcatggcttttggacagttactccgtaccttactgagatctggagacaggtatcctcgtcccaccataaaaattatctggagagagaaaaaaaagggaaataattcaaccttgtagataa

SEQ ID NO: 1360 - DNA, 433 bp, Homo sapiens
tgtcagagaaagaagctcggtctattgtaatgcagattgtaaatgcactaagatatctcaatgagatcaaaccccctattatacattatgatcttaagccaggtaattatgaaatttgtctaattttttttaaacttgagtatagtttttaaaagtcattcattaagttatctgaaaacatgttttttggtttctcttgtaagacatcagtaaaatactagtaaaattaaaagttattaaagttatgtttttcatgtatgtatcattaaaagaatcttatattttattcttaggaaacatcctactggtagatggaacagcatgtggtgaaatcaaaatcactgattttggtctgtccaagattatggatgatgatagctatggtgtagatggaatggatctaacttcccagggggcaggcacttactggtaa

SEQ ID NO: 1361 - DNA, 433 bp, Homo sapiens; identical to SEQ ID NO: 1360

SEQ ID NO: 1362 - DNA, 415 bp, Homo sapiens
tgacctctgggattccactcttcggagttgcagttaactggggtatcagctgaatcaacgaggaggattctagagtgaacttccacaccataccccaggcccctaagcccactcctccttgtttagccatctgtcctcaggatggatgtcccttgcttccacagggaggccacgtatcagggaaattgcaggtctgcaggggcagatgttggcagctcttgcccttgcctgttcccccaccttagcagagccaaccctcactactccccagccttccccgactctgctctgttcaaccctgcaggggccaagttccccatcaagtggacagctcctgaagccatcaactttggctccttcaccatcaagtcagacgtctggtcctttggtatcctgctgatggagatcgtcacct

SEQ ID NO: 1363 - DNA, 367 bp, Homo sapiens
atcacaggaagcaaacccagctcctagggtacagtctactagtgaattagcgactttggtcagaaaggcctggaaataatgttgagtttcattgcataccggatacagatacccaaaaagattcaagtaataaatgcttggtgagaattaacttggcctaatgctaatgagattgttcctcactccttttctatgcagaaaaatgatggcagatttacagtcattcagctggtgggcatgcttcgtggcattgggtctgggatgaagtatttatctgatatgagctatgtgcatcgtgatctggccgcacggaacatcctggtgaacagcaacttggtctgcaaagtgtctgattttggcatgtccc

SEQ ID NO: 1364 - DNA, 367 bp, Homo sapiens; identical to SEQ ID NO: 1363

SEQ ID NO: 1365 - DNA, 600 bp, Homo sapiens
gagggccaagcaggagacttcagagatcaagtgtgcagtttgacctttgacttggggttttacatgttggcattcttctggggtctgcatcttgtctcccctgattcgtcccttggggtgggctgtccgcatgcgcagtgggctgctaacacttgggaggggctgcatgcacagtgtgtttactgaagttgtgcacatgctcacttgaggtgctttatgtggtccccacagccctgacacctccaggcatcttcaccttggtcctggcattaccactagttgagtgacctggacaacttcattttcttccctaagccccagtttcttcatatgtaaaatgaggagattgtacattatctcaaaagtctctcctggctctagcacccaccagtgcagacatggtcccaggagcatagaaacggggaggaggaagcagggccgcagcagcaccaataagctcccacctctgcctaggcgagggaggacctcaaccccaggcacgaatgggcggatttttaaatctatgattaatctaggattcctttgagtaagacttcaaaaaataactttaatattagaaaagggttttgattgttttcc

SEQ ID NO: 1366 - DNA, 483 bp, Homo sapiens
catcttgagtgctggtcaaatcagaacacttcttccagaaggggaaatgttttgcagatgctgtttcctcctgggatgaggaatggggaaagcctggataaggccagggtaccatggagaaaatggaagcgggagactaacagaaataataagagttactcaaacactctaaaatctgacttctggagctctgagattaaggctgaaattctagatcttttcagtagtgtgattaggcgttaacttttcaccttaccactgacaggtcgtggccctgaagttcatcccaaaattggggcgctcagagaaggagctgaggaatttgcaacgagagattgaaataatgcggggtctgcggcatcccaacattgtgcatatgcttgacagctttgaaactgataaagaggtgtgctttgacagttttgggccctgtctccccaagcacaagggttccaggaatttcccaacctcagaatgcatgaa

SEQ ID NO: 1367 - DNA, 483 bp, Homo sapiens; identical to SEQ ID NO: 1366

SEQ ID NO: 1368 - DNA, 477 bp, Homo sapiens
cctagggattatttaggggcagttaaatatcctctactacctcactagacatccaaaggagatgctggcataacatactatttgaatatcagccagctactttttgttttagattggaattgaaaataagttattaattttaaacttctgtatttcctcatatttgctgtttttttcatttctgcacagttaagtttatgagaaggttcacatgtgttttgattctaaaatggatctgaattatattgaatgatttagagatttttagaaaattatgtcttctgttttcaggttctgttctggatattattaagcacattgtggcaaaaggggaacacaaaagtggagtcctagatgaatctaccattgctacgatactccgagaagtactggaagggctggaatatctgcataaaaatggacagatccacaggtatgtaaaagacaatactcttgtgttacatcatctcattaagg

SEQ ID NO: 1369 - DNA, 477 bp, Homo sapiens; identical to SEQ ID NO: 1368

SEQ ID NO: 1370 - DNA, 397 bp, Homo sapiens
tcctcagagacttcacatggcttttctttcaatcttaggagacagtgagttaaaaggaaacgtaaactggatacaaatgctgcatttctttctccctttccttaagagagagggaaataatatgagaaagtggtaaaaattatggttaaaagaaaaatgaaaagatctggctcttggtcaacaggcaaaagacaaaccttcatctaaagtgatataaatagttattacatacatcataagctccagccttgatctgctgatagagtctgtgttggtcttcatcccagaagggtggataccccacaagtagaatatagagaatgacacctggaggagaatataatgttaacacaatttaagtcatatagacaacagtaaattaaatgtggctgatcca

SEQ ID NO: 1371 - DNA, 485 bp, Homo sapiens
tcaaggtctgaggaactataagccatatgtaggattaccttattaaaccctagaactcaaaagtatcactggattaagcccttttctaccattttaatctcactttttccagtatacaaaggactgcctcaagccatagtacccctacaagtggttggagactagaatcccatctgtgctctgcaggtggaaagcccaggcttgcagaagtcagaagtaaccagaactgtttagagccaggtccaggaacttcctatggccttttggtagcaactgtgcatggcagccctgttggcgttttctccacaggctcctgaaggtcaaaccggaggagagactcaccatcgagggagtgctggaccacccctggctcaattccaccgaggccctggataatgtgctgccttctgctcagctgatgatggacaaggttttgaatgatgtttactttgttggctgaaaagactgtgttgggaaggaatgct

SEQ ID NO: 1372 - DNA, 485 bp, Homo sapiens; identical to SEQ ID NO: 1371

SEQ ID NO: 1373 - DNA, 563 bp, Homo sapiens
gagggggaacaggtaaggagaatgggtggcccaggtggagggcacagcacaggcaaaggccaggcaggttgggatctgggctcaagttgagctgtagtgcctgctggggcctcgatctccggtcccagcaagcctggccctctgtccccagggccgtctacctggtgcggcaccgtgacacacggcagcgctttgccatcaagaagatcaacaaacagaacttgatcctgcgtaaccagatccagcaggtctttgtggagcgtgacattctcacctttgccgagaacccctttgtggtcagcatgttctgctcctttgagacccggcgccacctatgtatggtcatggaatacgtggaaggtacgctcactggggcttgcatgcctccagcgatggggagctcacccctccacgcctgggagaaaatttttagaccaagttgaggtctgttctgtcctccatgaggtctcaccctgctttggggaaccctcaggaaccccagtctggggtagggagcccagccatgggggtttagggctggaggagcccagacaggagtgtgt

SEQ ID NO: 1374 - DNA, 563 bp, Homo sapiens; identical to SEQ ID NO: 1373

SEQ ID NO: 1375 - DNA, 586 bp, Homo sapiens
tttctcatgccctcttttggtcctgcagacactctcgaaagcgatgggaacgctttgtccacagtgaaaatcagcaccttgtcagccctgaggccttggatttcctggacaaactgctgcgatatgaccaccagtcacggcttactgcaagagaggcaatggagcacccctatttctgtgagtccagatatctagcccacagagtttgtgcaggcgcagagtcctatagaacagagtcgtaatcccagctcctgtcagcttgctgcaaagttaattcacccacactgagcctcagattcttccagtggggatagtgatggcaactacattgcagaattactggaagaattcttctgtaacagaatacatgacacaagagcattcctaaataaactcttttcatactgtgaggatgacacttctcagtgcctcagtctggaatggttgaattagaatacacagccctgtatctttcctgtccctagtaatcattcgttggaaagagctaatgaggcttacaaatcttaaaattgtatgaacaccttgacttagatttgtgagtatagccacctgtgccatcctaagt

SEQ ID NO: 1376 - DNA, 586 bp, Homo sapiens; identical to SEQ ID NO: 1375

SEQ ID NO: 1377 - DNA, 592 bp, Homo sapiens
agaaacttcccccatgtttgggagatctttaataatggtgctagactgaattacgtaagagatccagtgattttatacctcaggtttcagatccctgtgcaccactccaacatcatgcatgtggcttacagctgaaacaagcttcctcatgatgtagctggcttccgtctcactgaagtgcttctttttcttaatgcgctcaaacagttctcctccattcagaagttccatcactagaaacgtgtgaagctagaaaagagaaagaataacgtggagggccttcctgaagcacagaagtctattaacatataaaacatttattgactatctaccaccaatacgtttaaataatcccctgttaaaataatcaatggcaatcctcatatcttagagaaaagggctgaaagataatgtagctgttttataattctattttggtaatggaaaatttcaagtactgcagtgaaatctttatactgtatatcctttttcccttctgtgatgaattctttcatttgcagtgttttgttttaagagatgaagtctctaaaaagaaatctgcccttgaattcctgggctcaagggattctct

SEQ ID NO: 1378 - DNA, 528 bp, Homo sapiens
tcccatttttatgatgccaacaaaactacttcaatatgggaaatttaatcttttctttcaaaggacatatggccaatgtgcatgtgcacaggatgggaaattacctgaaacagcttctcagaactctggggcagggctgcgggagaataagtgggatccatttctgtgaactcttctgcaaagttactcacatctaattcatctcgaatgactggcttaaatggtgcaggcacttttttggcggctaaatcatcccaatttattttctaaaacaaagaaagttggtacaaagtagaaatcaatagtcaaaatgtactttctaagaataacaaagataaattaggattttgactggtagggagagaggataaaaataagagaacatatttcaaatcaataataaaaaacatattttctccaaacaagatcacagcagtttatagctccaaccaatgctgtgcctcaaagatgagactatcgctgttgaatctcagagtgtcctctggggggcaccaagacaccctagtt

SEQ ID NO: 1379 - DNA, 528 bp, Homo sapiens; identical to SEQ ID NO: 1378

SEQ ID NO: 1380 - DNA, 514 bp, Homo sapiens
aaaggtgaaaagctaagcaaggatttgaagttgtgaaacatttttgtaaagattgagcatttagtcacatttggtagacaacagggtttaataagatttgattaaacattaaaatgagaatgcttttgaaaacatttccatgttagaaatttagaattattactacagtgtttatattaatgatctaaaatgtttaaatattcttctgacttaggattggccttttgatgatggtgcaccaccatccaaccagattgttgatgactggttaagtcttgtgaaaattaagtttcgtgaagaacctggttgttgtattgctgttcattgcgttgcaggccttgggaggtaaatgaatttatcaatttgattctaggtaaaaatctattgataatgaaaatacagaaacttgaaaaattcttataattttttaatataaagtcaacatttgtcataggtattacttaaataggaagggtggtagataatacttctgagttggggaatgtttggagaa

SEQ ID NO: 1381 - DNA, 562 bp, Homo sapiens
gcaacccaagtcccttctatctaccaatatccttctcccaggaagcaggggagaggatgtgaaccccgcctgggttttcccacacccagctggtgacccagctgacccgggacactgaggcacaaaagaaccgcatgactcctgcagaaactggagctaaaaataccctccagtgcccagcctggcctgcgagaggagccccctggcctgcctcccggcaacctgctgcttccttccccatctgggatggccctggggcaaatcatgcccctggagccacattctgacttcagatccccaaatcctggggtctttcctcctcttggtcccatgggctggccccaggggctccagctggagctaggaacacttacccaggtagatatctccgaaggacccgctcccgatcttccgtcccaggcggtacttgttccccacacgtagctccatggctcactcttgctgcagaggaagcaggaacatgagggtcagcgacgtggggagccgggaaaggggtccagtccaccaaggccaggcagagccaccaggaactcgaaaacct

SEQ ID NO: 1382 - DNA, 562 bp, Homo sapiens; identical to SEQ ID NO: 1381

SEQ ID NO: 1383 - DNA, 565 bp, Homo sapiens
agcaccagcatcttctccaggaggttcacagctgcgggggaaggtgcatcaggccagaccacgggaggccccacactccagcacccggtggcccccacactagccagccgtacccagagggcttgcattggtcaggatagaggcaaaatccttcttctccaattcggggaggcccttcatgtagttcttggcctgtgtgggaagaaagggtgaggggccaacaccaaggcccaggtccgcccccacccccacccagctccccactcaccccttacctcatcgctctgcagccgctgcacaaactcagccggaggcgtccccgtcaccttcatgatctccttcagctggtccaggtctgcaccgaggtcaggaacacagctcgggggccagagatcagggcccccactgcccccacctgggcaggagccatccccacccgcccctggtgccgccctgcggctggaggatacggtcgctgcccttgaacagcgtcttgcctgtgatcatctccgccatgatgcagcccacagaccagatgtccactgagatagaagccctggtcagc

SEQ ID NO: 1384 - DNA, 212 bp, Homo sapiens
gttctgttctggatattattaagcacattgtggcaaaaggggaacacaaaagtggagtcctagatgaatctaccattgctacgatactccgagaagtactggaagggctggaatatctgcataaaaatggacagatccacaggtatgtaaaagacaatactcttgtgttacatcatctcattaaggccattcccactcttttacagaatcgt

SEQ ID NO: 1385 - DNA, 472 bp, Homo sapiens
ttccattgtcttccttaataattggaccttttgatttttcctaatgttgtacctatatgtgtgtgtgtgtgtgtgtttgtgtggtatatgcataaatataaatgtgtatatatatattttctgttgatgctgttttaggtaaggtgtttctcctctgcagagacatagctagcatttttcttgggttcctgtgagtagccaaggcatcgctattgtctgtaatgtctgataacaggcatgttcttgttttctccttaggtggccataaaagtcattgataagaagagagccaaaaaggacacctatgtcaccaaaaacctgcggcgagagggtcagatccagcagatgatccgccaccccaatatcactcagctccttgatattttagaaacggaaaacagctactacctggtcatggagctgtgccctgggggcaacctgatgcacaagatctatgagaagaagcggctgg

SEQ ID NO: 1386 - DNA, 481 bp, Homo sapiens
tttctcaagaacccagagggccaggatttgaggctgccccaattggtggacatggcagcccaggtaactgggccagcagcctttacctcccggacctcccacctattaactgttcacaaattctctgtcccttcaaacgcctgggagggcggccccgccccctgcatcagctgtgcctccagctgtgcctgagaggtactgcctctctttctgggcctcagtctccccctctggaaagtgggtttttcaaatggtccctcacccctcaaacaggccacggtgttgtgagtccacatgagctcccatctctccacactatggtcccccaggtagctgagggcatggcctacatggaacgcatgaactacattcaccgcgacctgagggcagccaacatcctggttggggagcggctggcgtgcaagatcgcagactttggcttggcgcgtctcatcaaggacgatgagtacaacccctgcca

SEQ ID NO: 1387 - DNA, 481 bp, Homo sapiens; identical to SEQ ID NO: 1386

SEQ ID NO: 1388 - DNA, 463 bp, Homo sapiens
cctttggtgtgaccctgtgggaggtgctgatgctctgtagggcccagccctttgggcagctcaccgacgagcaggtcatcgagaacgcgggggagttcttccgggaccagggccggcaggtcagagtggaggagagggaagatgggtccgaggcgggggacagaaggggcagagttgtcatcttggagactaaagaatatttgttccctgactctcatccacactgccacaatgcaggtgtacctgtcccggccgcctgcctgcccgcagggcctatatgagctgatgcttcggtgctggagccgggagtctgagcagcgaccacccttttcccagctgcatcggttcctggcagaggatgcactcaacacggtgtgaatcacacatccagctgcccctccctcagggagcgatccaggggaagccagtgacactaaaacaagaggacacaatggcacctctg

SEQ ID NO: 1389 - DNA, 463 bp, Homo sapiens; identical to SEQ ID NO: 1388

SEQ ID NO: 1390 - DNA, 387 bp, Homo sapiens
tgcggggagaagaaaatagattagatgttttccttgggatttatttattaatattattaagtccagagagaaagatgaatgttattaaagtaacaaagtaacacttcttttcaaggattaattcttcctctaccagccttttattgttaaaaattgtgaatttatggaaaggttgtaggaataagtttctaatgtattaattattctcattcttaggtgcattttatctggtgtttgaatatatggaccatgatctgatgggactactggaatcaggcttggttcattttaatgaaaatcacataaagtcatttatgagacagctcatggagggtctggattattgtcataagaagaactttttgcatagagatattaaatgttcca

SEQ ID NO: 1391 - DNA, 387 bp, Homo sapiens; identical to SEQ ID NO: 1390

SEQ ID NO: 1392 - DNA, 485 bp, Homo sapiens
ggacatggcttcaagtacactgaagaatgagttcagttacacaaaaatcccattgatctgaaaatgtcagccgtggttgcattttagaagacttaaaaacttaggctgtggagaaatgatgctattgcttcatacacatgtggacatgactgcttatgggaggcgggaggctttagtggtggaaccccagagttctcagaggcacttcgcaggaaatggaagaaaacacacttcagcttccgaacaacagaaagtagaggttggtgaaatttggtgagactggctaaagtaacaaagaactagaaaattcatacctgtgaggtaggtgttgtgcgaggaattaatgaaatagtgagaaaggggctgagacatgtcttcattcaaatccagtttctcaggtgaaacgactccgttttcttctccactcagatagcgcatgaacccatccactgatatttgtcctggaggaaatgaagttagaaagg

SEQ ID NO: 1393 - DNA, 485 bp, Homo sapiens; identical to SEQ ID NO: 1392

SEQ ID NO: 1394 - DNA, 482 bp, Homo sapiens
tggcctaaatcttaagtgagcagtttaatatgtgaatgacaataaatttaagttctatgacatgccacatgccgtgttaagcattttacatgcatttccttgcataatccctttaacaagcctaaaaggtagttataattatacctactttacccatgatgaaattgaagctcagagaagcaaagtggcagagcctaggttcaaaccaagatttacccaagtccaaagacaatggcctttaccattatgctgtaatgtttctcattgctatttttcagattttagaggacaagacaataaagggatgtatcagtgtggagccttacatactgggagaatttgtaaaattgtcaaataacacgaaagtggtgaaaacagaatacaaagccacagaatatggcttggcctatggccatttttcttatgagttttctaatcatagagatgttgtggtcgatttacaaggtatgtgaaactgggaa

SEQ ID NO: 1395 - DNA, 482 bp, Homo sapiens; identical to SEQ ID NO: 1394

SEQ ID NO: 1396 - DNA, 482 bp, Homo sapiens
cttgggccacaggtactttcagtttgcactgaattaaaaattcttatcagacttttaaggttagttttccaaaaatgacttttacaaaataaaacacatgagccaggcgtggtagcgcgtacctacgttcccagccacttgggttggttaaggtgggaggatcgcttgagccagggaggttgaggctgcagtgagctatgattgtgcccctgcactccagtctgggcaacggagtaaacctgctccaaaacgaaacaagagatttttacacttccttaactgcacgatattcagatttcggccttagttatgccaaaaatggagaactacttaaatatattcgcaaaatcggttcattcgatgagacctgtacccgattttacacggctgagattgtgtctgctttagagtacttgcacggcaagggcatcattcacaggtaaccgcgggggtggctgggtgggtttgcaggacgtcagttt

SEQ ID NO: 1397 - DNA, 482 bp, Homo sapiens; identical to SEQ ID NO: 1396

SEQ ID NO: 1398 - DNA, 466 bp, Homo sapiens
tgtggatctccgtcttttcagaagtgctgtctctttgtgtccttgtgagacacttggcacagttggctgtgtagaaaaagaaaagcacggaggcttgcggacctctttttatctccctgccagactgtaagctgttggaggtcaaaggctggtttctactgacctttgtgcccacacaacacctaacacagtgttttatgcataatgagtggctgttggttggcttgaaatgcatagcgtttaattaaatctctaaattcttgtgtctgccatagtgacctaaaacttgacaacgtgatgctcgattctgagggacacatcaagattgccgattttggcatgtgtaaggaaaacatctgggatggggtgacaaccaagacattctgtggcactccagactacatcgcccccgaggtgagagctgctgggcacacgttcacattgcggtgatgtaccctctgctccc

SEQ ID NO: 1399 - DNA, 449 bp, Homo sapiens
gcagagaagctggcaacagaaaaaactgttcaaatatagatgaagcagcaactacaaatttaaatggccttttaaagggggacaaaagtaaatacttccaatattaaaatataatgtagctggggcattttccatttcaagggtgcagttatttccagcaattaaacttttccaaaatcttccttatgtgtaacgtttgattcagataccttcaacaactgcaactttgcaagctcccaatgcccccacactgaaatgaagctggctcagctccctcacctgcagaccctgaaggaggaggagcacctgctttctgccactcagtggcctcagctgccattcttctcacatatgcatcatccacacacatcaagatattttccggctttatgtcagtatgaatgatcttgcacttactgtgtaagtaatctaacccttgaaggacctgg

SEQ ID NO: 1400 - DNA, 469 bp, Homo sapiens
tcccttgggattggtatctggaaaaggaaggaaggtgggacgtggggatgaagaacagactgggtgtgtggggtgctggctcctgggaacgagaactactgatagggctgggtctgtgtgagaagggaaagcggcagaggaaggatacaatgaaagaggaaggggagcattggcatccctgactttccctccgcctaccctacctcccaagctgaggcttttttcttcctctcctgtcaggcggcgcctcacagtcgatgactttgaaatcgggcgtcccctgggcaaggggaaatttgggaatgtgtacctggctcggctcaaggaaagccatttcattgtggccctgaaggttctcttcaagtcgcagatagagaaggaaggactggagcaccagctgcgccgggaaattgagatccaggctcatctacagtaaggacagtctctgcttcctctttcatctttgacg

SEQ ID NO: 1401 - DNA, 469 bp, Homo sapiens; identical to SEQ ID NO: 1400

SEQ ID NO: 1402 - DNA, 471 bp, Homo sapiens
ggttgagatgctaagccaaacatcattttaagtctgtggcctaaaaaaaaaagggaatcatactttccaaagatttgtacattcccactctaattgctaaaataaaatgttggattatgaaaataaattttgtaggcatcaataagttataaaggcatggcttatttaaaaaaaaaaaaaaaagtgggccaggttacctacatgaactgcaaagcaagcaaactgaattttctttgaagagcccatcctcacactaaaatttcccatgactacatggaaattctttcacttaccagaaagacctgattggcactttcactgagagttgagtcatctgggctgtcgacaggtgtctgacgtgtaaacttggaatcaaactgacttacatcctcttcagattgctttatacaaacaaaataatttagaaaataataaatagtccatgttacatcaatcaaatgcactgtaagc

SEQ ID NO: 1403 - DNA, 471 bp, Homo sapiens; identical to SEQ ID NO: 1402

SEQ ID NO: 1404 - DNA, 474 bp, Homo sapiens
caaggcactttaagggatcttcaagggagtgtaattttgagcatatggaatctttctaaccctagctaactttagaagtttaactcctatgcaagatgaagcatctatgttcccaagagtttgacttcagcaaaggacaagctgcagaagctgacattattgtttattttggcataaaggctttacttgttggtgaagttcaagtttaatgatctcttcctccctttctctctcttcctcctctccgctttccttcttcccttcctcccaccctgattttctcttttgcagtttgctgctttgtggtgcacaagcggtgccatgaatttgtcacattctcctgccctggcgctgacaagggtccagcctccgatgtaagtaatgggcatcgattgcttttctctgtccacagtcaatgctgccttgtgattaaatgtgagtgagcattcttagacgagtaagtgtggacgatct

SEQ ID NO: 1405 - DNA, 474 bp, Homo sapiens; identical to SEQ ID NO: 1404

SEQ ID NO: 1406 - DNA, 482 bp, Homo sapiens
ccagggaacagttttgatgggtactgggtaagtcaacacatggaacttaattttctcatttcaaaaattgtaaattagaccttttatttagagattataaagcaataatgtttggtaggtatttgcttgttgaataaggaattgtatggttggttactctttacggtcaaagactctaactcatgccattgctgatggtatataataagccaggaataaatacataattaagtctatttatatgtaataaaatcttgtttctttcctcagtatttacatgaaaaacacatccttcatcgagatctgaaaactcaaaatgtcttcctaacaagaacaaacatcatcaaagtaggggacctaggaattgcccgagtgttagagaaccactgtgacatggctagcaccctcattggcacaccctactacatgagccctgaattgttctcaaacaaaccctacaactataaggtaggattgggctc

SEQ ID NO: 1407 - DNA, 482 bp, Homo sapiens; identical to SEQ ID NO: 1406

SEQ ID NO: 1408 - DNA, 471 bp, Homo sapiens
gccaacttgatctcccatttctttaagaaaaaactagttacctaatactatcattgtttagatgaaaaagcatttggaagacttatttttctgggtctcttaatagaatttttattttaaactatcatagccctgcttactaaaagtattattaacctttagtgttactgaatcttagtatgctaaatttgatattcccatctccagtcatgttagaatttaatggaattcttcaaagcaacaaactcctatcattgataacttgtttggtatactttgctttttctaggtatctgaaaaggtttaaagtgatgaagatcaaagttctaagaagctggtgccgtcagatccttaaaggtcttcagtttcttcatactcgaactccacctatcattcaccgcgatcttaaatgtgacaacatctttatcaccggccctactggctcagtcaagattggagacctcggtctgg

SEQ ID NO: 1409 - DNA, 471 bp, Homo sapiens; identical to SEQ ID NO: 1408

SEQ ID NO: 1410 - DNA, 555 bp, Homo sapiens
tcaataccttggggacgaagcgtatcagcgtaagaggtggctgtactgagaggggtcaggctgctcgtgggcagtgctgcttctacacatgtggtactctgagctcctcacctctccaacctgtctctccaggagaagtgtgcccagtactggccatctgatggactggtgtcctatggagatattacagtggaactgaagaaggaggaggaatgtgagagctacaccgtccgagacctcctggtcaccaacaccagggtaagatgggtcgtgggtggactctgcccacaggaaaagcagggttacccctgcctccctgatccccttttttccaaaggagaataagagccggcagatccggcagttccacttccatggctggcctgaagtgggcatccccagtgacggaaagggcatgatcagcatcatcgccgccgtgcagaagcagcagcagcagtcagggaaccaccccatcaccgtgcactgcaggtatggctcacccttgccctcagcgggagagagaaagcgaggaggggcagataggggaagctgatg

SEQ ID NO: 1411 - DNA, 555 bp, Homo sapiens; identical to SEQ ID NO: 1410

SEQ ID NO: 1412 - DNA, 530 bp, Homo sapiens
gtcccgacaacagctactggttcttgagcatttaatcctagtaacagtgccatgaggagcaccctgtcattgtacccattgtacagatggggagactgaggctcagaaagggcccaggctttgactgggtttgtcacatggctgtggaggccacagctgacactggcgcccaggtgggcagatcctggatccctgtgtggtaggagttggggggctccactgagtcagcctgcatccctcctcaacagggacctggaacggtaccaccagggtggccatcaaaaccctgaagcctggcacgatgtctccagaggccttcctgcaggaggcccaggtcatgaagaagctgaggcatgagaagctggtgcagttgtatgctgtggtttcagaggagcccatttacatcgtcacggagtacatgagcaagggtgagtcctgggcggccggggcagggggcaggggcactccggacagggcagggagcatgagcctcatttcctctcatgtctagaatgggcatcttcaaaggt

SEQ ID NO: 1413 - DNA, 530 bp, Homo sapiens; identical to SEQ ID NO: 1412

SEQ ID NO: 1414 - DNA, 598 bp, Homo sapiens
acctcactgtgcaaaacagcatacagcattataaccccggtgctctaaaataagatgtcagcgtaagatgattgaatatcacaagtctgggtcactttgtaacttacagaaagaccaggtagtaaaatatattactctttccaagagaataacttttgaagatcccagtggtcccaaaccaacacaacagtaaaatggacaagaaacaaaagtcaagggaagctttaactccaagtggagtcccttcattcagagaagctgacaaatcatgacccattttgagatttcataccaggtttcatgaaaattaaacctaaaatcaagaaaagaagttgaaaactcagtgtgcataaaacaccaaattctggttataatttacaactgttacttacactgactggatccagaattttcactgcagccaggctcccatctctcttgttagttaccttgtagactttgccataggtgcctttaccaatggtctctataatttcccaggtgtctgtgggatctggaagtgattcaagtccaagcatcataggattatagtgaaataatccatacagatgtttcctggttgggggaaaaatttgtt

SEQ ID NO: 1415 - DNA, 598 bp, Homo sapiens; identical to SEQ ID NO: 1414

SEQ ID NO: 1416 - DNA, 513 bp, Homo sapiens
agtccgtaatccccatttccacctactttcccttagttatttgattccctgtctgtcgtactcagcttaagtggagcatcccctttcctgggagacacgaagcaggaaacactggcaaatatcacagcagtgagttacgactttgatgaggaattcttcagccagacgagcgagctggccaaggactttattcggaagcttctggttaaagagacccggtaagaggacagagaagccactggtttctcaggtactgatcccttcctgtcgcctctgtcaaagacctgtcagtatgtccccactttgacatagctgtcatctgcactgttgtggtctaatccgggcaggtgctggaaagtgtggcctagccaagacgtggcattcatcttgtttgctcaagtctttctgctttcttctcctgttgaaatgtaaataatgtgtgtgtgtgtgtgtgtgtgtgtgtgtgtgtgtgtgtgtgtgcgctacaagtcagcctgggtttctttagggctc

SEQ ID NO: 1417 - DNA, 513 bp, Homo sapiens; identical to SEQ ID NO: 1416

SEQ ID NO: 1418 - DNA, 581 bp, Homo sapiens
ttgatgctgataatttgaccgtttataagtcattttgtttgtgtccacagaaatcaagatgactaccagctggttcgaaaattaggccgaggtaaatacagtgaagtatttgaagccatcaacatcacaaataatgaaaaagttgttgttaaaattctcaaggtgagtacaagagataatttcagaggtatttggaatatagatttttaaaagtagttttgaagacttttttaaaacagcatttaaaaggtttttggtgccaaagcaaataaataaaattttattgtatcctatgaactcaatagaacaagttctgcttatttgacagatcgggaaactgaagcaagagaagtgatttgagttgactcatatagctaggttgtggcagagtaagggagcaaaggtacagtctcttctctcccagttattgcctaatacttatttcctttacttttcattatataatgaggcttttgttttcaataaataaatcattgcctctactttgtaaagatgaggagtcacaggactcgagggggacagacagatgatattagtgcagctagtcgggtgtaattgcc

SEQ ID NO: 1419 - DNA, 581 bp, Homo sapiens; identical to SEQ ID NO: 1418

SEQ ID NO: 1420 - DNA, 551 bp, Homo sapiens
agagctcttctgctttccccagggagggccagggccaatttctgaccagagctgctgcagaaggtctctctcctggatcagggtggatcatgtgcttgagcagactgtaaaagtcttctgagagctcctgaggaatgtctgggaagttactctcatggttatggtgccttgcagcactgttgatgggtaatgtccttactccttcagccattgcagtgattaatcccaaggcaaataggtctgctttgggaaggtactaataatcctcttgcaaaatctcatttgctaggcagcaactatctgctttttccactttgagtttgcttattgatgtcacatggcctaggtcaccaattttatatatcacatgggcagagagaaactaatcagcttcattttcaacttctgtgactccagaggagtcactttgcatcttgtgacaaaggaaggttttacaaggtttcatgtccgggtgcaccatgccagagttgtggctgtatttaagttcaagggaaatctgtagaaggatgtccttgagttttggctcttgg

SEQ ID NO: 1421 - DNA, 551 bp, Homo sapiens; identical to SEQ ID NO: 1420

SEQ ID NO: 1422 - DNA, 515 bp, Homo sapiens
accaggttgactgccaaatgggttgttagtagtgccagaggcaccctgacatcactctctgaactgctttctctttcacattcttgtatttttccagctgacggcccagagggtgggtgccaattccaccagcagctgcaactgaaaagcaaggttcagaaatgtcagatatcctccgggagctgctctgtgtctctgagaaggctgctaacattgcccgggcgtgcagacagcaggaagccctcttccagctgctgatcgaagaaaagaaagagggagaaaagaacaagaagtttgcagttgacttcaagacgctggctgatgtactggtacaggaagttataaaacagaatatggagaacaaggtaagaaaggtcatagccaaggtaactgcaaaatagttgcatctgtggctttctccatcatagaatagcatgccttttgctcctcacccctatcagtatactagcaccttgatttcaagtaaacatcttggattttcttcctccttgtca

SEQ ID NO: 1423 - DNA, 515 bp, Homo sapiens; identical to SEQ ID NO: 1422

SEQ ID NO: 1424 - DNA, 534 bp, Homo sapiens
atgtgtttgcatttttcccccaagagtgtgtattactttgtaatttaaaaaataaacatcctcaaatttagcagtttattctctgaataggtcccaaacttaaatgtggtattagacactttgattaagtcctatttttcacctaagtcatctttgaggtgtaatcttgttttattttgaccatgtttacattcctttaaaaaattgttttaattttacagaattatacccatctaccaaaagcagatatttttgcgcttgccctcacagtggtatgtgctgctggtgctgaacctcttccgagaaatggagatcaatggcatgaaatcagacagggtagattacctcggataccacaagtgctttcccaagaatttacagagttgctaaaagtgagcattttatatatgaagccctttattgacatggttctatattttattaaatgcatgtctttaccttcattttacttttctttttaaggttatgattcatccagatccagagagaagaccttcagcaatggcactggta

SEQ ID NO: 1425 - DNA, 534 bp, Homo sapiens; identical to SEQ ID NO: 1424

SEQ ID NO: 1426 - DNA, 577 bp, Homo sapiens
tatgctaagtgctctggggcacaccaaaatcatgacactatagatcataagttaacttcagattcaactgggcacataaaatcagtataaagaaatgtaaaggtaacatatctatatgccatatgatagaaatgaaaatttaccacataaacatcactttgtctatcctcattttaaaaaattatcgtttacatcagcctaaccgcagaaatgtgatcagttcctttgagaaaacaatgcatttattttattttgtcaaatcttacctagatatctcagcttgggaatttttttctccatcaacagtgaaaggagatgctccagttagtaattcatacattagaacacccaaactccaccagtcaactgcctataaaacaacaataatttcattttatagaattatcaactaaaatattttataagaaagaaaaaatgaataaaagctatctattaggaaaatgttttaaaaaatgattttgtacacctccttctatgtaaggagtattaaattaacacatgcaagaaagacatttagagaacaaatatccaagtatcctcagcacagaaagcatgt

SEQ ID NO: 1427 - DNA, 577 bp, Homo sapiens; identical to SEQ ID NO: 1426

SEQ ID NO: 1428 - DNA, 502 bp, Homo sapiens
cagtcaggcctctaactggctgtacagaaaagaaaccactttgccaattttttcatgaatgtaaggaaacagtgaagagtgagataaggagagaggacaccaaagaaataagcaggtttaatgactgtattgaaaagaactcaccaaaatgacgcccaagctccacaggtcacaggactcatcgtagccgttctgattcaagagctctggggcggcataatgaagggtgaagcatggagtcttcaggggctgattatccggtggctttagccgtgcaaatccaaaatcaattattttaatttccaaattgtcattttcatcggtgaacaataaattctgcaagatatcaatgcttacattagtttctcactaggcatgtcttgggaattgctggtactatttatgtaacactttgtatattgatagttgattcatgtgcagagaggtctcatggggaggcgcgagggcaggacatcaatacactgctgctctctgcttgatg

SEQ ID NO: 1429 - DNA, 502 bp, Homo sapiens; identical to SEQ ID NO: 1428

SEQ ID NO: 1430 - DNA, 572 bp, Homo sapiens
caatgtttgcggattacacgttgaaaggattgcataaagaatgccagatttcttgagcatgaatggcatgtatagctatgaaacaggggcttttctttggagcaagggagacttgtaataaagccttttcatgcttattcttaggatcctagttcagtttctgggaaaacaccagtcatactctattactaaagcatagctaggtcatttggaaactgtaaacagtaatacattgcttaatatgaaataatggttcatttcctccactggcctcctagaggcttagaaaactcttatacagaatatggttctcctactaactagcttcttatcttgtttttcacagttatacactgaagtgtcaaacacagtcagattttgggaaagtgacaatgcaatttgaattagaagtgtgccagcttcaaaaacccgatgtggtgggtatcaggaggcagcggcttaagggcgatgcctgggtttacaaaagattagtggaagacatcctatctagctgcaaggtataattgatggattcttccatcctgccggatgagtgtgggtgtgatacagcc

SEQ ID NO: 1431 - DNA, 572 bp, Homo sapiens; identical to SEQ ID NO: 1430

SEQ ID NO: 1432 - DNA, 294 bp, Homo sapiens
aaaaatgatggcagatttacagtcattcagctggtgggcatgcttcgtggcattgggtctgggatgaagtatttatctgatatgagctatgtgcatcgtgatctggccgcacggaacatcctggtgaacagcaacttggtctgcaaagtgtctgattttggcatgtcccgagtgcttgaggatgatccggaagcagcttacaccaccagggtaagaaagatcggtgacatctgggctttcactctggtgaaactgttcctctcttctcactttgagattgaagccctttgtaat

SEQ ID NO: 1433 - DNA, 137 bp, Homo sapiens
aaatcaagatgactaccagctggttcgaaaattaggccgaggtaaatacagtgaagtatttgaagccatcaacatcacaaataatgaaaaagttgttgttaaaattctcaaggtgagtacaagagataatttcagag

SEQ ID NO: 1434 - DNA, 118 bp, Homo sapiens
cagagctgctgcagaaggtctctctcctggatcagggtggatcatgtgcttgagcagactgtaaaagtcttctgagagctcctgaggaatgtctgggaagttactctcatggttatgg

SEQ ID NO: 1435 - DNA, 178 bp, Homo sapiens
ttatacactgaagtgtcaaacacagtcagattttgggaaagtgacaatgcaatttgaattagaagtgtgccagcttcaaaaacccgatgtggtgggtatcaggaggcagcggcttaagggcgatgcctgggtttacaaaagattagtggaagacatcctatctagctgcaaggtataa

SEQ ID NO: 1436 - DNA, 76 bp, Homo sapiens
atggagctacgtgtggggaacaagtaccgcctgggacggaagatcgggagcgggtccttcggagatatctacctgg

SEQ ID NO: 1437 - DNA, 600 bp, Homo sapiens
gccccccgggcgccccgtcagcggtcacgggatggatagccggcctgccatggccatctttgaactcctggactatattgtgaacgagccacctcctaagctgcccaacggtgtgttcacccccgacttccaggagtttgtcaataaatgcctcatcaagaacccagcggagcgggcggacctgaagatgctcacaaaccacaccttcatcaagcggtccgaggtggaagaagtggattttgccggctggttgtgtaaaaccctgcggctgaaccagcccggcacacccacgcgcaccgccgtgtgacagtggccgggctccctgcgtcccgctggtgacctgcccaccgtccctgtccatgccccgcccttccagctgaggacaggctggcgcctccacccaccctcctgcctcacccctgcggagagcaccgtggcggggcgacagcgcatgcaggaacgggggtctcctctcctgcccgtcctggccggggtgcctctggggacgggcgacgctgctgtgtgtggtctcagaggctctgcttccttaggttacaaaacaaaacagggagagaaaaagcaaaaaaaaaaaaaaaaaaa

SEQ ID NO: 1438 - DNA, 600 bp, Homo sapiens; identical to SEQ ID NO: 1437

SEQ ID NO: 1439 - DNA, 1369 bp, Homo sapiens
attcccgggtcgacgatttcgtggagcccggccgctgctcgcgggctgagtgtctgtcgctgctgccgcctccacccagcctccgccatggacctcttcggggacctgccggagcccgagcgctcgccgcgcccggctgccgggaaagaagctcagaaaggatcagggggacctttgctttttgatgatctcccacccgctagcagtggcgattcaggttctcttgccacatcaatatcccagatggtaaagactgaagggaaaggagcaaagagaaaaacctccgaggaagagaagaatggcagtgaagagcttgtggaaaagaaagtttgtaaagcctcttcggtgatctttggtctgaagggctatgtggctgagcggaagggtgagagggaggagatgcaggatgcccacgtcatcctgaacgacatcaccgaggagtgtaggcccccatcgtccctcattactcgggtttcatattttgctgtttttgatggacatggaggaattcgagcctcaaaatttgctgcacagaatttgcatcaaaacttaatcagaaaatttcctaaaggagatgtaatcagtgtagagaaaaccgtgaagagatgccttttggacactttcaagcatactgatgaagagttccttaaacaagcttccagccagaagcctgcctggaaagatgggtccactgccacgtgtgttctggctgtagacaacattctttatattgccaacctcggagatagtcgggcaatcttgtgtcgttataatgaggagagtcaaaaacatgcagccttaagcctcagcaaagagcataatccaactcagtatgaagagcggatgaggatacagaaggctggaggaaacgtcagggatgggcgtgttttgggcgtgctagaggtgtcacgctccattggggacgggcagtacaagcgctgcggtgtcacctctgtgcccgacatcagacgctgccagctgacccccaatgacaggttcattttgttggcctgtgatgggctcttcaaggtctttaccccagaagaagccgtgaacttcatcttgtcctgtctcgaggatgaaaagatccagacccgggaagggaagtccgcagccgaagcccgctacgaagcagcctgcaacaggctggccaacaaggcggtgcagcggggctcggccgacaacgtcactgtgatggtggtgcggatagggcactgaggggtggcgcgcggccaggagcacgcatggtattgacttaaaaggttcattttgtgtgtgtgcacattgtgtgttttgtgtactcctgtgggactcccatggttgtaaataaaggtttctctttttttttcctaaaaaaaaaaaaaaaaaa

SEQ ID NO: 1440 - DNA, 1369 bp, Homo sapiens; identical to SEQ ID NO: 1439

SEQ ID NO: 1441 - DNA, 600 bp, Homo sapiens
agagacagggacacagcccctatttggaaccctgatcatcaccagaccctgggattggctatgggaaagcatgccacagccactcgccttcctacccccgcccgccatccccagttgcagggggatctggggactaccagagactctgggaaatggacaaggtggggggccccactctttctctcctgcagtcccgtagctggggcctccttccttctcagggtctccccagcccagtccccttgctcccatcccactcggtgctgttgggtaggggccctgccaggaactgaccagctcagcgaggagccataatgtgcatatgtgcacaagcagggttgggggaggggggtgtgaggggttgtgcccaggtgttgccccctatctcctggggagggtgaggcagggcagggacagtctccagggtcagtccctggatgggtggttacctccccttcctccaccctaagccctggggccctgaaatggggtgggagggcaggggtgggagccctcctagtgggtttggggggttgggttcctgaatgcaccataatcgctgtatgaaatattaaaaagtctaaagtgaaaaaaaaaaaa

SEQ ID NO: 1442 - DNA, 600 bp, Homo sapiens; identical to SEQ ID NO: 1441

SEQ ID NO: 1443 - DNA, 1400 bp, Homo sapiens
cctgtcgtgctgaaatggtccgtcacccaggcactggacgtcacagagcagctggatgccggggtgcggtacctggatctgcggatagcccacatgctggagggctcggagaagaacctgcactttgtccatatggtgtacacaacggcgctggtggaggacacactcacggaaatctcggagtggctggagcggcatccacgcgaggtggtcatcctggcctgcagaaacttcgaggggctgagcgaggacctgcacgagtacctggtcgcctgtatcaagaacatcttcggggacatgctgtgtcctcgtggggaggtgccgacactgcggcagctgtggtcccggggccaacaggtcatcgtctcctatgaagacgagagctccttgcgccggcaccacgagctgtggccaggagtcccctactggtggggaaacagggtgaagaccgaggccctcatccgatacctggagaccatgaagagctgcggccgcccaggagggttgttcgtggccggcatcaacctcacggagaacctgcagtacgttctggcgcacccgtccgagtccctggagaagatgacgctgcccaaccttccgcggctgagcgcgtgggtccgagagcagtgcccggggccgggttcacggtgcaccaacatcatcgcgggggacttcatcggcgcagacggcttcgtcagtgacgtcatcgcgctcaatcagaagctgctgtggtgctgacgggacccttctgaagttcgggacgcggcggctgcagtttcacccccgaatttccaagtattgtgactttgtttgggccaaatgttggtgatcataggaccgatgataatacgttttcattttctttaaaatagtgctgggatgacaggcgtgagccaccgcgcccggcctatacctcattttctacatgtcgcttgttggagctgctggttcaagttcccagccagccaatggatgccagcaccatttttactcccctttaccaagcaaatcgtgcatttttgtctaacgagagacatcagtttctcaggatgatcctcaagaacgttatggagtccatgttgcaataggttctctttgggacctaatgactcattttccaaaaatccacttctacttttggtacccggttgctacggtgaaatgaaggtgccccgcatccagaaagacgcactcctggaccacaaccggcggctacctcagccccacggctctgcaggatcagggctcaggcaggccccgcggagatgaagaatttgcagggagcctccctgacttccgtcggctgtgaatccttgtctgtcaggggcgtatccacaaaatcaccgaattcatacagatcgtttaaataaatgaacatcattaaagtcaaaaaaaaaaaa

SEQ ID NO: 1444 - DNA, 1400 bp, Homo sapiens; identical to SEQ ID NO: 1443

SEQ ID NO: 1445 - DNA, 459 bp, Homo sapiens
tgcctaggacaccctcagtctcaactgcactctccccgagactttgcccatgactccctcattctagctgtcctttctctgatttccaggcctggcccgagccaagtcaatcccaacaaagacatactccaatgaggtggtgacactgtggtaccggccccctgacatcctgcttgggtccacggactactccactcagattgacatgtggtaaggacaggtggaagtgtggcaggggccatgtggtaaagggggtggcttggtcacaacagccacccagccagctgcctttctattcactgtgccctccctgcccaggggtgtgggctgcatcttctatgagatggccacaggccgtcccctctttccgggctccacggtggaagaacagctacacttcatcttccgtatcttaagtgaggaggcatgggccctatgcgctgtggagacacacagggt

SEQ ID NO: 1446 - DNA, 459 bp, Homo sapiens; identical to SEQ ID NO: 1445

SEQ ID NO: 1447 - DNA, 1400 bp, Homo sapiens
tgagaccgagtccctttatgtcaccagcgcacacgctgatttgaaccctgcttcgacgtgtgtgtcatggcttaaaaatagctgctaatctgtcaacctgtcttgggcagaaacagcggcggcgacagcagcaggagcgtcatggccgtggcgctgtctgcgccggcgatccgcctttcggactgaggcccagcgcagcgcttgcaaagagcagctacctggcaactgaacccatcatcaccacagccactcctgcagctgccacggtttctgccacctctaagatgtgccctggtaactggctttgggcttctatgacttttatggcccgcttctcccggagtagctcaaggtctcctgttcgaactcgagggaccctggaggagatgccaaccgttcaacatcctttcctcaatgtcttcgagttggagcggctcctctacacaggcaagacagcctgtaaccatgccgacgaggtctggccaggcctctatctcggagaccaggaagatcctggtgcattgtgctgtgggcgtgagccgatccgccaccctggtactggcctacctcatgctgtaccaccaccttaccctcgtggaggccatcaagaaagtcaaagaccaccgaggcatcatccccaaccggggcttcctgaggcagctcctggccctggaccgcaggctgcggcagggtctggaagcatgaggggagggggagagaggtcaggccaggcccgtgggtaggtccctggctcccagctggagataggaggcccaggtggcaggtagcaggaggcccagatcacccatcctcccctggggtcaggagaggccgagccccaggccactgtcactctttgtgggaggggacggggagtgaggttgggcagtgtggtggatgggcacccaggaagggttgaccagggaaggaggcagctaggctgtaaatggaagatggtcctgggattcgaacaccgctgggatctggccagggtgctccctgggattcacagtcccttcccctctttgtgcccaagtgtttccctctctccctcaccaaaacaaaagggccatctctgccctgcacttgtgcagaaagtcagggatacggcaagcatgaatgcaatggtgtagagttgtgtgaaacccctagcatagagacagacagcgaagagatggtgtgaaaagcttgcagaaccagacagagaaccccacagactttccactccaagcacaggaggaggtagctagcgtgtgagggttggcactaggcccacggctgctgcttgggccaaaaacatacagaggtgcatggctggcagtcttgaaattgtcactcgcttactggatccaagcgtctcgaggataaataaagatcatgaaaaagaaaaaaaaaaaaaa

SEQ ID NO: 1448 - DNA, 1400 bp, Homo sapiens; identical to SEQ ID NO: 1447

SEQ ID NO: 1449 - DNA, 1275 bp, Homo sapiens
cccacgcgtccgcctagtcctgggggcagcccgaggcctataccggctacaccattcagaagcacctgaactccacggaaaaatcagaagctcaaacttcctggtaactcaaggctaccaagtgaagatttgggtacctggctgagtttggggctggcagccttcagcacaccaatggtgtcaatggcaggtgtgcatgggacaagaacatatgctgtcatgattgtgctacagtttctttaagaacaccagcttgcaggatttgagttgaggaaaacacagacttccatgagtttgggaactacgagagaaaagacagacagagtcaaatctacagcatatctctcacctcaggaactggaagatgtattttatcaatatgatgtaaagtctgaaatatacagctttggaatcgtcctctgggaaatcgccactggagatatcccgtttcaaggctgtaattctgagaagatccgcaagctggtggctgtgaagcggcagcaggagccactgggtgaagactgcccttcagagctgcgggagatcattgatgagtgccgggcccatgatccctctgtgcggccctctgtggatgaaatcttaaagaaactctccaccttttctaagtagtgtatcaaaatctaaaccaaggagtctctggacaagaagctgggagaggcacaaactggacatctctctctctcatatccttcggcattgggttatctatgggagcaaggagtgggcacgcttctctgttacaaatagaaaacgattccagtcatacaggacacatcccactccaaatgatatttccaaaaacatacctctgacagtaactttgatagatggtttgtcaaatgtatctttctgggtatccacacctcttggcaatgaaatttgcagctcctcccttccataaatgaagtctctttccccaccatttgaatctgggctggcactgtgacttgatttgatcaatagaatgtggaagaagtgactgtatgccagttccaagcctaggtttcaagaggccttataaatgtctgttggaaccttacccagccatggacatgttgagtgagcatgctggagaatgagagaccacatgaagcagaaacatgctttcctagctgaagtcatactagcccaaccaacatggcagctaacacatgaatgaggccaatcaagaccagaagaaccactcaagcagatcccagcccaaattgcccattccacaatcaggagctaaataaattactgttgtcttaacac

SEQ ID NO: 1450 - DNA, 1275 bp, Homo sapiens; identical to SEQ ID NO: 1449

SEQ ID NO: 1451 - DNA, 1400 bp, Homo sapiens
aggtttatggacactgagccactgcatgtccccttcctctcattctgtccaggcctctccccttttgccagagatctgcattcctaacatccactcatctgcacccattcctgtcttcatgcacctgtacttacctgtcttcctcttccctgtccatgtcaccctttttttttttttttttttttttttttgagatggggtttcacttttgttgcctgggtggagtgcaatgacacgatcttggctcactgcagcctcagcctcctgagtagctgagattacaggcatgggccaccacgcccagttgatttttgtatttttagtagagatggggtttcaccatgttggccaggctggtctcgaactcctgacctcaggcaatcttcccccttcggcctccaaaagtgctggaattaccgccgtgagccaccatgcccggccccatgtcaccctttccccagcctcctccaagctgccacaagcagtctcaaagctctctctgtgtctctcctctcagggaagatcctggtgcattgtgctgtgggcgtgagccgatccgccaccctggtactggcctacctcatgctgtaccaccaccttaccctcgtggaggccatcaagaaagtcaaagaccaccgaggcatcatccccaaccggggcttcctgaggcagctcctggccctggaccgcaggctgcggcagggtctggaagcatgaggggagggggagagaggtcaggccaggcccgtgggtaggtccctggctcccagctggagataggaggcccaggtggcaggtagcaggaggcccagatcacccatcctcccctggggtcaggagaggccgagccccaggccactgtcactctttgtgggaggggacggggagtgaggttgggcagtgtggtggatgggcacccaggaagggttgaccagggaaggaggcagctaggctgtagatggaagatggtcctgggattcgaacaccgctgggatctggccagggtgctccctgggattcacagtcccttcccctctttgtgcccaagtgtttccctctctccctcaccaaaacaaaagggccatctctgccctgcacttgtgcagaaagtcagggatacggcaagcatgaatgcaatggtgtagagttgtgtgaaacccctagcatagagacagacagcgaagagatggtgtgaaaagcttgcagaaccagacagagaaccccacagactttccactccaagcacaggaggaggtagctagcgtgtgagggttggcactaggcccacggctgctgcttgggccaaaaacatacagaggtgcatggctggcagtcttgaaattgtcactcgcttactggatccaagcgtctcgaggataaataaagatcatgaaaaagaa

SEQ ID NO: 1452 - DNA, 1400 bp, Homo sapiens; identical to SEQ ID NO: 1451

SEQ ID NO: 1453 - DNA, 518 bp, Homo sapiens
ggggatgaaactgaggctctgactccattcaataccatactttgaattagtggcagagccaggattgaacccaggtctgctcattttcaattccaaactcttaaccagttctccatactgcttgcacctcccttcccactaatggagagaataaaaaagagacatgcaggtccctccaagccctgggtgggagaaagggtaggagatgttgggcagtgggcctaaagcagggctgggctgcctgggtgtcacctggggacatgggctatcttccaggtgtgcctgctgtgcaaggaggcttgctggacctaaaatcaatgatcgagaaggtgacagggaagaacgccctgacaaactacggcttctacggctgttactgcggctggggcggccgaggaacccccaaggatggcaccgattggtgagctgatcgctataactgccctttaggctccaggctctgcacccatgttttcttattcaattccatatcagttctggaagatgagtattaaagt

SEQ ID NO: 1454 - DNA, 518 bp, Homo sapiens; identical to SEQ ID NO: 1453

SEQ ID NO: 1455 - DNA, 172 bp, Homo sapiens
aaagcccccaggaaggacttgtctctgggcttggatgacagcagaaccaacacaccccagggtgtgctgccatcctcacagctgaaatctcagggcactcaaatgtggcacctggtgaaaaacagacagatccatcaacaccacaacaggagtcttcgaaaccgtggaggaa

SEQ ID NO: 1456 - DNA, 600 bp, Homo sapiens
ctctctaccatcactggccccagtttcaaatttaccttttgagagccccctcttgtctactattttgccagtgactagtccatgtcttcctgcaacaggtgtgacagtttgggagttgatgaccttcggggcagagccctatgcagggctacgattggctgaagtaccagacctgctagagaagggggagcggttggcacagccccagatctgcacaattgatgtctacatggtgatggtcaaggtgagttacctgctgagcccaaccattttctctttttttctttttttttcttttttttttttttttgagacagagtctcacaattgtcacccaggctggagtgcaatggtgcaatcaatcttggctcactacaacctccgcctctcgggttcaagagattctcctgcttcagctccggagtagctgggattacagcgcccgccacacctggataactgttacacttttagtagagatggggtttcaccatgttggccaggctggtctcaaactcctgacctcaggtgatccgcctgcctcagcttcccaaagtgctgggattacaggtgtgagccatcatgctcgcctgactgcag

SEQ ID NO: 1457 - DNA, 600 bp, Homo sapiens; identical to SEQ ID NO: 1456

SEQ ID NO: 1458 - DNA, 600 bp, Homo sapiens
ttcttcatgaagacctcacggtaaaaataggtgactttggtctagccacagtgaaatctcggtggagtgggtcccatcagtttgaacagttgtctggatctattttgtggatggcaccagaagtaatcagaatgcaagataaaaacccgtatagctttcagtcagatgtgtatgcgtttgggattgttctgtacgaactgatgaccggccagctaccttattcaaacatcaacaacagggatcagataatttttatggtgggacgaggatacctatctccagatctcagtaaggtacggagtaactgtccaaaagccatgaagagattaatggcagagtgcctcaaaaagaaaagagacgagagaccactctttccccaaattctcgcctccattgagctgctggcccgctcattgccaaaaattcaccgcagtgcatcagaaccttccttgaatcgggctggtttccaaacagaagattttagtctgtatgcttgtgcttctccgaaaacacccatccaagcagggggatatggtgggtttccagtccactgaaacaccctgagtgagacattaaagtaaggtagcaacaaaaaaaaaa

SEQ ID NO: 1459 - DNA, 600 bp, Homo sapiens; identical to SEQ ID NO: 1458

SEQ ID NO: 1460 - DNA, 506 bp, Homo sapiens
ccagtcaagtggatggctcctgaagccctttttgatagagtttacactcatcagagcgatgtctggtccttcggggtgttaatgtgggagatctttactttagggggctcaccctacccagggattcccgtggaggaactttttaagctgctcaaagagggacacaggatggacaagcccaccaactgcaccaatgaactgtacatgatgatgagggattgctggcatgctgtaccctcacagagacccacattcaagcagttggtcgaagacttggatcgaattctgactctcacaaccaatgaggaatacttggatctcacccagcctctcgaacagtattctcctagttaccccgacacaaggagctcttgttcttcaggggacgattctgtgttttctccagaccccatgccttatgaaccctgtctgcctcagtatccacacataaacggcagtgttaaaacatgagtgaatgtgtcttcctgtccccaaacaggacagca

SEQ ID NO: 1461 - DNA, 600 bp, Homo sapiens
acgtaaacacccacacacacacaaaagtcgtttaaggtctaaacaaaggaaaaccggaggacgtttcagaggtcttcttttaaacggttagaaaggatgaaagataaaaatactactgttagtttcggccggactctttgtgataaacactgaaaaatttgctaatcactacaggaattttacaccagacggttagacatgttttaccaggataaaaacacttctccctgtattctattttactacaatatgtagttatacatatatacataaagatatatctgaacctcttatgacggttttgtaaatactgttcgacatagtgacggaagcaaatataaaaaaattgacactattaggggtgtccgtgtaattgacaacgtgaaaacttacaggttttaaatataaaatctttattatttttctttctatgaatgtacaagggttttgttaccacaccacttacacactctttttgattgaactatcccagatggttatgttttacataatgcttacggggacaagtacaaaaacaaaattttgcacatttacttctagaaatataaagttatttactatatattaaatttccttaag

SEQ ID NO: 1462 - DNA, 600 bp, Homo sapiens; identical to SEQ ID NO: 1461

SEQ ID NO: 1463 - DNA, 1400 bp, Homo sapiens
aacctcgattcccctcgctgtctctcgccccaccgctgagggctgggctgggctccgatcgggtcacctgtcccttctctctccagctagatggccccccggccgtggctgtgggccagtgcccgctggtggggccaggccccatgcaccgccgccacctgctgctccctgccagggtacgtccggctgcccacgcccccctccgccgtcgcgccccgcgctccacccgccccttgccacccgcttagctgcgcatttgcggggctgggcccacggcaggagggcggatcttcgggcagccaatcaacacaggccgctaggaagcagccaatgacgagttcggacgggattcgaggcgtgcgagtggactaacaacagctgtaggctgttggggcgggggcggggcgcagggaagagtgcgggcccacctatgggcgtaggcggggcgagtcccaggagccaatcagaggcccatgccgggtgttgacctcgccctctccccgcaggtccctaggcctggcctatcggaggcgctttccctgctcctgttcgccgttgttctgtctcgtgccgccgccctgggctgcattgggttggtggcccacgccggccaactcaccgcagtctggcgccgcccaggagccgcccgcgctccctgaaccctagaactgtcttcgactccggggccccgttggaagactgagtgcccggggcacggcacagaagccgcgcccaccgcctgccagttcacaaccgctccgagcgtgggtctccgcccagctccagtcctgtgtaccgggcccgccccctagcggccggggagggaggggccgggtccgcggccggcgaacggggctcgaagggtccttgtagccgggaatgctgctgctgctgctgctgctgctgctgctgctggggggatcacagaccatttctttctttcggccaggctgaggccctgacgtggatgggcaaactgcaggcctgggaaggcagcaagccgggccgtccgtgttccatcctccacgcacccccacctatcgttggttcgcaaagtgcaaagctttcttgtgcatgacgccctgctctggggagcgtctggcgcgatctctgcctgcttactcgggaaatttgcttttgccaaacccgctttttcggggatcccgcgcccccctcctcacttgcgctgctctcggagccccagccggctccgcccgcttcggcggtttggatatttattgacctcgtcctccgactcgctgacaggctacaggacccccaacaaccccaatccacgttttggatgcactgagaccccgacattcctcggtatttattgtctgtccccacctaggacccccacccccgaccctcgcgaataaaaggccctccatctgccc

SEQ ID NO: 1464 - DNA, 1400 bp, Homo sapiens; identical to SEQ ID NO: 1463

SEQ ID NO: 1465 - DNA, 160 bp, Homo sapiens
ggatcctgtgcatcagtgacttagggctaggaacattctgctgtcggaaagcgacgtggtgaagatctgtgactttggccttgcccgggacatctacaaagaccccagctacgtccgcaagcatgcccggctgcccctgaagtggatggcgccagaattc

SEQ ID NO: 1466 - DNA, 147 bp, Homo sapiens
ggatccattcacagagacctagcagcacgcaacatcctggtctcagaggacctggtaaccaaggtcagcgactttggcctggccaaagccgagcggaaggggctagactcaagccggctgcccgtcaaatggatggctcccgaattc

SEQ ID NO: 1467 - DNA, 600 bp, Homo sapiens
ttcgttgtaaataaagagatggagtttggagttgtatacagctgtgtggaagataagatgtacacgggcaggaaaggaaaaggcgccttttgtaacggtcagaagcttcgggtctcgcagcaggaagacattaccaaatcactcttggtgaccgagctgggatcgtccagaaagccggagactttgcggattgttctctccaacatggaaaggctttgctccattcctatccatggaatccggagtgttgggacagcggctgttaatatgtgccttgtggcaacgggaggagcggatgcctattacgagatggggatccactgctgggacatggctggagctggcatcatcgtcatagaggctggcggagtgctgctggatgtgacaggtggaccattcgatttgatgtctcggagaataattgctgcaagtaatatagcattagcagaaagaatagccaaagaacttgagataatacctttacaacgagacgacgaaagttaggcacgtagaaccgcatccagctccgtcacacctgctctccctgggatgtttaaagatgtatgatgtcactgatttaaatttaactttgcagtcctg

SEQ ID NO: 1468 - DNA, 418 bp, Homo sapiens
ctgagttgcctgaggtcattcacatgcttcagcaccagttcccatctgttcaggcaaatgcagcggcctacctgcagcacctgtgctttggtgacaacaaagtgaagatggaggtgtgtaggttagggggaatcaagcatctggttgaccttctggaccacagagttttggaagttcagaagaatgcttgtggtgcccttcgaaacctcgtttttggcaagtctacagatgaaaataaaatagcaatgaagaatgttggtggggatacctgccttgttgcggctgttgagaaaaatctatttgatgcagaagtaagggagcttgttacaggagtctttggaattatccctcatgtgatgcctgtaaaaatgacattcattcgagatgctctctcaaccttaacaaacactgtgattgt

SEQ ID NO: 1469 - DNA, 418 bp, Homo sapiens; identical to SEQ ID NO: 1468

SEQ ID NO: 1470 - DNA, 143 bp, Homo sapiens
  misc_feature (55)..(55): n is a, c, g, or t
  misc_feature (87)..(87): n is a, c, g, or t
cgaccatcccaacgtcatccacctggagggtgtcgtgaccaagagcacacctgtnatgatcatcaccgagttcattgagaatggctncctgggactccctttcttccggcaaaacgatgggcagtttcacagttcatccagct

SEQ ID NO: 1471 - DNA, 216 bp, Homo sapiens
gctgacattagctcccactttcaagaagcaattgattttattgactgcgtcagggaaggaggaggcaaggtcctagtccactgtgaggctggggtctcgaggtcacccaccatctgcatggcgtacctcatgaagaccaagcagttccgcctgaaggaggccttcgacatcgtcaagcagaggaggagcgtgatctctcccaactttggctttatg

SEQ ID NO: 1472 - DNA, 135 bp, Homo sapiens
atccttgtggaagaaggccacatggctgacattagctctcactttcaagaagcaatagacttcattgactgtgtcagagaaaagaaaggcaaggtcctggtccactgtgaagctgggttctcctgttcacccacc

SEQ ID NO: 1473 - DNA, 1400 bp, Homo sapiens
tcaatgataagttggcagcccctttaccagaaatacctccagatgttgtgacagaatgtagattgggactgaaggaggagaacccttccaaaaaagcctttgaggaatgtactagagttgcccataactacctaagaggggaaccatttgaagaataccaagaaagctcatatttttctcagtttttacaatggaaatggctggaaaggcaacccgtaacaaagaacacatttagacattacagagttctaggaaaaggcggatttggagaggtttgcgcctgtcaagtgcgagccacaggaaaaatgtatgcctgcaaaaagctacaaaaaaaaagaataaagaagaggaaaggtgaagctatggctctaaatgagaaaagaattctggagaaagtgcaaagtagattcgtagttagtttagcctacgcttatgaaaccaaagatgccttgtgcttggtgctcaccattatgaatggaggggatttgaagtttcacatttacaacctgggcaatcccggctttgatgagcagagagccgttttctatgctgcagagctgtgttgcggcttggaagatttacagagggaaagaattgtatacagagacttgaagcctgagaatattctccttgatgatcgtggacacatccggatttcagacctcggtttggccacagagatcccagaaggacagagggttcgaggaagagttggaacagtcggctacatggcacctgaagttgtcaataatgaaaagtatacgtttagtcccgattggtggggacttggctgtctgatctatgaaatgattcagggacattctccattcaaaaaatacaaagagaaagtcaaatgggaggaggtcgatcaaagaatcaagaatgataccgaggagtattctgagaagttttcagaggatgccaaatctatctgcaggatgttactcaccaagaatccaagcaagcggctgggctgcaggggcgagggagcggctggggtgaagcagcaccccgtgttcaaggacatcaacttcaggaggctggaggcaaacatgctggagccccctttctgtcctgatcctcatgccgtttactgtaaggacgtcctggatatcgagcagttctcggcggtgaaagggatctacctggacaccgcagatgaagacttctatgctcggtttgctaccgggtgtgtctccatcccctggcagaatgaggactgcctgaccatggtccccagtgagaaggaagtggaacccaagcaatgctgagcaccccggtgcggaccacagagcagaccctggcgccaggaaggagcatgtgttagcgtctcgtcccacctggaattgtaataaatacatctaaataaaacatgccttgggagtgtacagacaaaaaaa

SEQ ID NO: 1474 - DNA, 1400 bp, Homo sapiens; identical to SEQ ID NO: 1473

SEQ ID NO: 1475 - DNA, 142 bp, Homo sapiens
  misc_feature (25)..(25): n is a, c, g, or t
  misc_feature (32)..(32): n is a, c, g, or t
accccacatgcccagatgtccacgngcttgcnatacgcctctttgcaaaggacctcaggggacaggtacctggtgtgccagcgaaaccaaaccatgcctgctcgttcccctgacctcgatagctaggccaagtttgccagct

SEQ ID NO: 1476 - DNA, 142 bp, Homo sapiens; identical to SEQ ID NO: 1475
  misc_feature (25)..(25): n is a, c, g, or t
  misc_feature (32)..(32): n is a, c, g, or t

SEQ ID NO: 1477 - DNA, 600 bp, Homo sapiens
ctgcccccaccctgcaaaaaagcctgggctagcctgctggaggatgagagcccacctggatcagttgtctcagctgatttcagacacgtgagagagagctcagcgagactcagcttgtagctgactacagatgtgtgagggaacctggctgagaccaaaacaactgtccagctgagcccaggctaaactgccaacatgcagaattgtgagctaaataaaggctgctgttctaagtcactgggttttggtatggtttgttaggcagccataactaacaggtgtaattggtccttattcccttattcactgagagtgatgggttctcagccctgagctggacttggaggccatggaaatgcagtggacatggcctttgttccttaccttgaagctgtggaaggaggtcaagttcatggaataatggagaacacacagctgtaatcgtttgcttgttcagggaacacacatttattgagcacttgctatgtgccaggcacagtgccaggcagtagggatccagatatttaaagaaaacaaacaaaaatcaggtccaaaactcctggggagaatgctgagagtggtatcagcttttaggaattc

SEQ ID NO: 1478 - DNA, 600 bp, Homo sapiens; identical to SEQ ID NO: 1477

SEQ ID NO: 1479 - DNA, 600 bp, Homo sapiens
cccttgatcgccctgtgataggatctaacttcagagtgcagtctacaacttcaccaaatttggaaaagtagtccttcagatctttctttgtagtgtcccagctaaggcctcctataaacattttcccttcatcctcctcgttcttactggcgtcaatcttcgccccctccgactcggcgctgcccttcggtgcctccagacgcggttccgcccccggtcccgcgtccgcttcccgcgccgccgctgccccctgtgtcgccgccaccatggctccctcctgctcgcccgccgcagcgcctaccgccgccgttgccgctgccgccgccccgtccccgccgaactgctcctccgacatagtgctagtgtctccgccgctgccgccgagactacacccgccgctgccggcaaccgaaactagcagcaaagtaatccccgccgctgccggcgcccgctctacctcgcgaagcacacaagacagggaagcgcgcgcgcgtggctgcaaaggctcctgcgcctctccctggcctgcccccttcgcctcccactctcgcgcggcgcacactcccgctctttccgacgcattcggaattccggaattcc

SEQ ID NO: 1480 - DNA, 600 bp, Homo sapiens; identical to SEQ ID NO: 1479

SEQ ID NO: 1481 - DNA, 600 bp, Homo sapiens
tgaaaaaagtaattcttttgtctgaaggggaaaggcattctttcatttttttcttttttttttttttttttttatgacttgcaggcacaatatctagtactgcaactgccagaacttggtattgtagctgctgcccgctgactagcagctggactgattttgaataaaaatgaaagcagtactgggattacaggtgagccacagtgcctggcccttttttgtttttattgtctgtctccccactagaaggtacgctctacaagggcagggatttgtgcatcttattcatagtgtttcccacgtggcagatgctcactaaagatttcaaaggagaaactgtgatggactcgttctgtagatgagagaacagaggcacagagacctgtccatggtcccctggcagaaggaggtggggtctggattccaccccagggctgcgtggctgcaggacctcagtgcttgactccacactgctgagggctgtgagtccctggccagcccagacacagtcctgcagcccaggctgagcattctcagaccttcatggagatgcccactctcctgtgagcctcctgcttcctttgcccagggccggaattc

SEQ ID NO: 1482 - DNA, 600 bp, Homo sapiens; identical to SEQ ID NO: 1481

SEQ ID NO: 1483 - DNA, 1290 bp, Homo sapiens
catggagctaacatcacaaggtgctggtacttattggtatttacctccagagtgttttgtggttgggaaagaaccaccaaagatctcaaataaagttgatgtgtggtcggtgggtgtgatcttctatcagtgtctttatggaaggaagccttttggccataaccagtctcagcaagacatcctacaagagaatacgattcttaaagctactgaagtgcagttcccgccaaagccagtagtaacacctgaagcaaaggcgtttattcgacgatgcttggcctaccgaaaggaggaccgcattgatgtccagcagctggcctgtgatccctacttgttgcctcacatccgaaagtcagtctctacaagtagccctgctggagctgctattgcatcaacctctggggcgtccaataacagttcttctaattgagactgactccaaggccacaaactgttcaacacacacaaagtggacaaatggcgttcagcagcgggtttggaacatagcgaatccgaatggatctgatgaaacctgtaccaggtgcttttattttcttgcttttttcccatccatagagcatgacagcccgcccgaggttccagcgtcaacggccactgtgtgtggctgctctgagtgaggaaaaaattaaaaagaaaaactggttccatgtactgtgaacttgaaaacttgcagactcaggggggtccctgatgcagtgcttcagatgaagaatgtggacttgaaaatacagactgggctagtccagtgtctatatttaaacttgttcttttcttttaataaagtttaggtaacatctcctgaaaagcttgtaccacaaaggctcagctggggatggtgtttgacttcggaggaaaaaagttgctattgcccgttaaaggcactagagttagtgttttatccctaaataatttcaatttttaaaaacatgcagcttccctctccccttttttatttttgaaagaatacatttggtcataaagtgaaacccgtattagcaagtacgtggcaatgttcattccaatcagatgcagctttctcctccgtctggtctcctgtttgcaattgcttccctcatctcagtagggaaaaaattgagtgggagtactgagatgtgtgggtttttgccattggacaaagaatgaggttagaagactgcagcttggagtctctctaggttttcaactatttcttcacaatttgaacacttgacggttgtcccttttaatttatttgaagtgctatttttttaaataaaggttcatctgtcc

SEQ ID NO: 1484 - DNA, 1400 bp, Homo sapiens
gcccccagaggccttcatggaaggaatattcacttctaaaacagacacatggtcctttggagtgctgctatgggaaatcttttctcttggatatatgccataccccagcaaaagcaaccaggaagttctggagtttgtcaccagtggaggccggatggacccacccaagaactgccctgggcctgtataccggataatgactcagtgctggcaacatcagcctgaagacaggcccaactttgccatcattttggagaggattgaatactgcacccaggacccggatgtaatcaacaccgctttgccgatagaatatggtccacttgtggaagaggaagagaaagtgcctgtgaggcccaaggaccctgagggggttcctcctctcctggtctctcaacaggcaaaacgggaggaggagcagcccagctgccccaccacctctgcctaccacctcctctggcaaggctgcaaagaaacccacagctgcagaggtctctgttcgagtccctagagggccgcccggggaagcttgcacaggtccacggatccagaaacaagcccaccagcttgtggaacccaacgtacggctcctggtttacagagaaacccaccaaaaagaataatcctatagcaaagaaggagccacacgacaggggtaacctggggctggagggaagctgtactgtcccacctaacgttgcaactgggagacttccgggggcctcactgctcctagagccctcttcgctgactgccaatatgaaggaggtacctctgttcaggctacgtcacttcccttgtgggaatgtcaattacggctaccagcaacagggcttgcccttagaagccgctactgcccctggagctggagctggtcattacgaggataccattctgaaaagcaagaatagcatgaaccagcctgggccctgagctcggtagcacactcacttctcttccttgggatccctaagaccgtggaggagagagaggcaatggctccttcacaaaccagagaccaaatgtcacgttttgttttgtgccaacctattttgaagtaccaccaaaaaagctgtattttgaaaatgctttagaaaggttttgagcatgggttcatcctattctttcgaaagaagaaaatatcataaaaatgagtgataaatacaaggcccagatgtggttgcataaggtttttatgcatgtttgttgtatacttccttatgcttcttttaaattgtgtgtgctctgcttcaatgtagtcagaattagctgcttctatgtttcatagttggggtcatagatgtttccttgccttgttgatgtggacatgagccatttgaggggagagggaacggaaataaaggagttatttgtaatgacaaaaaaaaaaaaaaaaaaaa

SEQ ID NO: 1485 - DNA, 1400 bp, Homo sapiens; identical to SEQ ID NO: 1484

SEQ ID NO: 1486 - DNA, 1400 bp, Homo sapiens
caagaaggagcagctttcaggatccccgtggattctgctaagggaaaatgaagtcagcacactttataaaggagaataccacagagctccagtggccataaaagtattcaaaaaactccaggctggcagcattgcaatagtgaggcagactttcaataaggagatcaaaaccatgaagaaattcgaatctcccaacatcctgcgtatatttgggatttgcattgatgaaacagtgactccgcctcaattctccattgtcatggagtactgtgaactcgggaccctgagggagctgttggatagggaaaaagacctcacatttggcaagcgcatggtcctagtcctgggggcagcccgaggcctataccgcttgcaggatttgagttgaggaaaacacagacttccatgagtttgggaactacgagagaaaagacagacagagtcaaatctacagcatatctctcacctcaggaactggaagatgtattttatcaatatgatgtaaagtctgaaatatacagctttggaatcgtcctctgggaaatcgccactggagatatcccgtttcaaggctgtaattctgagaagatccgcaagctggtggctgtgaagcggcagcaggagccactgggtgaagactgcccttcagagctgcgggagatcattgatgagtgccgggcccatgatccctctgtgcggccctctgtggatgaaatcttaaagaaactctccaccttttctaagtagtgtatcaaaatctaaaccaaggagtctctggacaagaagctgggagaggcacaaactggacatctctctctctcatatccttcggcattgggttatctatgggtgcaaggagtgggcacgcttctctgttacaaatagaaaacgattccagtcatacaggacacatcccactccaaatgatatttccaaaaacatacctctgacagtaactttgatagatggtttgtcaaatgtatctttctgggtatccacacctcttggcaatgaaatttgcagctcctcccttccataaatgaagtctctttccccaccatttgaatctgggctggcactgtgacttgatttgatcaatagaatgtggaagaagtgactgtatgccagttccaagcctaggtttcaagaggccttataaatgtctgttggaaccttacccagccatgaacatgttgagtgagcatgctggagaatgagagaccacatgaagcagaaacatgctttcctagctgaagtcatactagcccaaccaacatggcagctaacacatgaatgaggccaatcaagaccagaagaaccactcaagcagatcccagcccaaattgcccattcacacaatcaggagctaaataaattactgttgtcttaaaaaaaaaaag

SEQ ID NO: 1487 - DNA, 1400 bp, Homo sapiens; identical to SEQ ID NO: 1486

SEQ ID NO: 1488 - DNA, 600 bp, Homo sapiens
tgcggcctcactgggacccccaggaggtgaccctgcagctcttcacagatggaatcacaaataaacttattggctgttacgtgggaaacaccatggaggatgtagtcctggtgagaatttatggcaataagactgagttattagtcgatcgagatgaggaagtaaagagttttcgagtgttgcaggctcatgggtgtgcaccacaactctactgtaccttcaataatggactatgctatgaatttatacaaggagaagcactggatccaaagcatgtctgcaacccagccattttcagatcagaagagcagaaacggcttagttctaaagagactgtttggaaaacatttccaaataactgcagcacttggatgactacttccctgagttttgcttattcactgaaagcagaactactgtgccgagccctccagtgacatgggccttctgctctcccagacatttgcctctcttcacacctgttctgaatccagcatggagcagacgagaagtcatggagttctgacagttccagcacgtgtgtcccctttgcaaaggggaaaattacgttttgtaagagaccccaaatcagggtctctt

SEQ ID NO: 1489 - DNA, 600 bp, Homo sapiens; identical to SEQ ID NO: 1488

SEQ ID NO: 1490 - DNA, 321 bp, Homo sapiens
gcagagcttagaatgtcacctgtgtgggtattttataaatgccttttcattataataggagtcatatatagatacatttagtcatcgatttatcaatcccgttttgacatgttcactgtttaactacattaattatggggtggaagctctcaaatacattgcgaagtctagaaaggctaaaacagaggagaggagggtcctattgtttgggacacagacccaggataaaggggaagcctgagaatgtgccatccttcagatgtaagtgccatcacccacaacataatcactgcggtgatacttaagtgctctgaataatga

SEQ ID NO: 1491 - DNA, 600 bp, Homo sapiens
cagctttggcaaggtcatgttggcagaactcaagggcaaagatgaagtatatgctgtgaaggtcttaaagaaggacgtcatccttcaggatgatgacgtggactgcacaatgacagagaagaggattttggctctggcacggaaacacccgtaccttacccaactctactgctgcttccagaccaaggtatgttaggaagaagctggctggctgccatgttggggcatcttgactatcagataaaataccaattttagaccctctacattgttctctcaaagactttgtaaagtgggatgggttttacccttgaaaagatcaggatgtatttgaacagcatcttcttttttagggcacaggattttccattcaaggttgtgcttgtgaagggatgagagagctgtagaattctttgcagccagagttggacaaagccaaatggctaaactcactgtttgctcattggaaaaaccaacaagtgtggttagtccttgctctgctcctaactttctatcactaatcaaatcacttaacttctaagttattttcatgtcatatgaaaaagagtaaaggccaccttaatctcttctaatctgtgt

SEQ ID NO: 1492 - DNA, 600 bp, Homo sapiens; identical to SEQ ID NO: 1491

SEQ ID NO: 1493 - DNA, 1400 bp, Homo sapiens
cagcagctttatgggaatatctaatatgacacaactggaaagctcaactagtaaaatgcttaaagcaggcataagaggaattccgcctaaaattgaagctcttccatctgatatcagcattgatgaaggcaaagttctaacagtagcctgtgctttcacgggtgagcctaccccagaagtaacatggtcctgtggtggaagaaaaatccacagtcaagaacaggggaggttccacattgaaaacacagatgacctgacaaccctgatcatcatggacgtacagaaacaagatggtggactttataccctgagtttagggaatgaatttggatctgactctgccactgtgaatatacatattcgatccatttaagagggcctgtgcccttatactctacactcattcttaacttttcgcaaacgtttcacacggactaatctttctgaactgtaaatatttaaagaaaaaaagtagttttgtatcaacctaaatgagtcaaagttcaaaaatattcatttcaatcttttcataattgttgacctaagaatataatacatttgctagtgacatgtacatactgtatatagccggattaacggttataaagttttgtaccatttattttatgacattttacaatgtaagttttgaaactaactgttggtaggagaaagtttcttatggaacgaataccctgctcaacatttaatcaatctttgtgcctcaacatactgttgatgtctaagtatgcctcagtgggttgagaaaatccccattgaagatgtcctgtccacctaaaagagaatgatgctgtgcatatcacttgatatgtgcaccaatacctactgaatcagaaatgtaaggcattggtgatgtttgcatttaccctcctgtaagcaacactttaacgtcttacattttctctgatgatgtcacacaaaattatcatgacaaatattaccagagcaaagtgtaacggccaacactttgttcgctcattttacgctgtctctgacataaggagtgcctgaatagcttggaaaagtaacatctcctggccatcccttcatttaaccaagctattcaagtattcctatgccagagcagtgccaactcttggaggtcccagagtgcagccaatgcctttgtgtggtagttctaaattttaattgcacctgaaaaacctgggcacctaagcaatgagccacagcaaaaagtaaagaacaacaacaaaataaagctgttgttaaattttaaacaatattactaattgcccaaaatgtcaatttgatgtagttcttttcatgcaagtataaattcaattgttagttataattgttggacctccttgagatagtaacaacaaaataaagcaagctatctgcacctcaaaaaaaaa

SEQ ID NO: 1494 - DNA, 975 bp, Homo sapiens
cgggcaattctattgggttttctcatcactctgcgtggctggtggtgctgccagccgaggaggagctggtggaggctgacgaggcgggcagtgtgtatgcaggcatcctcagctacggggtgggcttcttcctgttcatcctggtggtggcggctgtgacsstctgccgcctgcgcagcccccccaagaaaggcctgggctcccccaccgtgcacaagatctcccgcttcccgctcaagcgacaggtgtccctggagtccaacgcgtccatgagctccaacacaccactggtgcgcatcgcaaggctgtcctcaggggagggccccacgctggccaatgtctccgagctcgagctgcctgccgaccccaaatgggagctgtctcgggcccggctgaccctgggcaagccccttggggagggctgcttcggccaggtggtcatggcggaggccatcggcattgacaaggaccgggccgccaagcctgtcaccgtagccgtgaagatgctgaaagacgatgccactgacaaggacctgtcggacctggtgtctgagatggagatgatgaagatgatcgggaaacacaaaaacatcatcaacctgctgcaggttccgatgttattagatgttacaagtttatatatatctatatatataatttattgagtttttacaagatgtatttgttgtagacttaacacttcttacgcaatgcttctagagttttatagcctggactgctacctttcaaagcttggagggaagccgtgaattcagttggttcgttctgtactgttactgggccctgagtctgggcagctgtcccttgcttgcctgcagggccatggctcagggtggtctcttcttggggcccagtgcatggtggccagaggtgtcacccaaaccggcaggtgcgattttgttaacccagcgacgaactttccgaaaaataaagacacctggttgctaacctgaa

SEQ ID NO: 1495 - DNA, 600 bp, Homo sapiens
ttcctcatctggcaggcgtcgggccagccccgggaccgccctcagccctggttcggcctggcccccgcggccgacgcgcttctgcgggggctgctggaccctcacccccgaaggaggagcgctgtgatcgccatcagggagcacctggggcgcccctggaggcagcgggagggcgaggcggaggcagtgggagcggtggaagaggaggctgggcaggcgcctgctgtggccaccgaggtgttgcctggagcggggctgacagcaggtgtgctcctgtggagtgaccccaaggagccttcgaatccaggttcaagccatagagttggggcctctgacctggacaatccggggatgtcctgccgtgctcagcgggaggaggggcttgggggcacgggggtgtgggagcagaccgtccatctatcaggacccccagacgttatccgcaccccgccacccccccgcccaagtaactggaccctgttggcctttgcaggactgcgggggcgccagccttcatcaccttccacgacctctaagccgagagaggaggaggaggaggaaatggtttcctgcctgaggctgcaggacccagaatcagag

SEQ ID NO: 1496 - DNA, 600 bp, Homo sapiens; identical to SEQ ID NO: 1495

SEQ ID NO: 1497 - DNA, 467 bp, Homo sapiens
cgacccccgccccaccagtgcctctgcccacggcaccgcctgagctctgtctcctgctaccgcccgacaccctgcctctgcggccagccgtggactcctggggcctgggggtgcttctcttctgtgctgccactgcctgtttcccttgggacgtggcactggcccccaaccctgagttcgaggccttcgctggctgggtgaccaccaagcctcagccacctcagccaccaccaccctgggaccagtttgcgcccccagccctggccttgctccaggggcttctggacctggatcccgagactaggagccccccactggctgtcctggacttcctgggggacgactgggggttgcaagggaacagagagggacctggggttttggggagcgccgtgtcctatgaggacagggaggagggaggctcaagcctggaggagtggacagatgagggtgatgacagcaaaagt

SEQ ID NO: 1498 - DNA, 600 bp, Homo sapiens
catcctatgtctccagatacaaaacttgtaaccattgaaccaccaaaccctatcaatcccagcactaactgtaatggcttgaaagaaaatccacattgcggaggttctgtgacaatgccacccatcaatctaactaacagtaatttgatggctgcaaatctcagttcaaatctctttcaccccagtgtgaggttaactgaaagagcaaaaaagagacgcacttcttcacaatctattggacaagttatgcctaatagcaggcaagaggatccaggtcctattcaaagccaaatggagaagggtatatttaatgagcgaacaggtcacagtgaccaaatggcaaatgagaacaaaaggaagctgaatttttccagatctgacaggaaagaattccattttccagaattgcctgtcacaatacagtcaaaagatacaaaaggaatggaagttaaacagataaaaatgctgaagagggagtcaaagaaaacagagtcatctaagataccaactttacttaacgtggatcaaaatcaagaaaaacaagagggtggagatggccattgcgaggggaagaatttgaagagaaacaggttttttttc

SEQ ID NO: 1499 - DNA, 600 bp, Homo sapiens; identical to SEQ ID NO: 1498

SEQ ID NO: 1500 - DNA, 600 bp, Homo sapiens
cctgatctgattgatgcatttgcagttccaggagatgcctacaccgattatgtagctacgagatggtaccgagctcctgaacttcttgtgggagatactcagtatggttcttcagtcgatatatgggctattggttgtgtttttgcagagctcctgacaggccagccactgtggcctggaaaatcagatgtggaccaactttatctgataatcagaacactaggaaaattaatcccaagacatcaatcaatctttaaaagtaacgggtttttccatggcatcagtatacctgagccagaagacatggaaactcttgaggaaaagttctcagatgttcatcctgtggctctgaacttcatgaaggggtgtctgaagatgaatccagatgacagattaacctgttcccaactcctggagagctcctactttgattcttttcaagaggcccaaattaaaagaaaagcacgtaatgaaggaagaaacagaagacgccaacagaatcaactgttgcctctcataccaggaagccacatctcccccacacctgatggaagaaaacaagtcctccagttaaaatttgatcaccttccaaacatttag

SEQ ID NO: 1501 - DNA, 600 bp, Homo sapiens; identical to SEQ ID NO: 1500

SEQ ID NO: 1502 - DNA, 600 bp, Homo sapiens
cagatgatcctggagtgtggaggcagcagcggcacctcgagagagaagggcccggagggtgtctccccaagccaggcacacctgcacaaacccagagccgaccctcagctgccttctaggacacctgtgcagggtcccagacccaggccccagagcagcccaggccatgaccctgccgagcacgccaagaacgttcccaggcagaactccgctcccctgctccaaactgctctcctagggaatggggaaaggccccctggggcgaaggaagcgccccccttgacactctcgctggtgaagccaagcgggaggggagctgcgccctccctgacctcccaggctgcggctcaggtggccaaccaggccctgatccggggtgactggaaccggggcggtggggtgagggtggccagcgtacaacaggtccctccccggcttcctccggaggcccggcccggccggaggatgttcagcacctctgccttgcagggtgcccaggggggtgccagggctttgcttggaggctactcccaagcctacgggactgtctgccactcggcactgggccacctgcccctgctggaggggcaccatgtgtga

SEQ ID NO: 1503 - DNA, 600 bp, Homo sapiens
agagataataagagagagtctcagaattggagggctctgaaacagcagcttgtcaacaagtttactctccgtcttgtgtcatgtgttcagctggccagcaaactttccttccgaaacaaaataatcagcaacattccagtcttgaatttcctccaggctctaggctatctacacactaaagaagaactgctggaatcagagcttgatgttttgaagtccttgaacttccgaattaatctgcccactcccctggcatatgtggagacgctcctagaggttttaggatacaatggctgtttggttccagccatgaggctgcatgcaacctgcctgacactgctcgacctggtctatcttctgcatgaacccatatatgagagcctgttgagggcttcaattgagaactccactcccagtcagctgcaaggggaaaagtttacttcagtgaaggaagacttcatgctgttggcagtaggaatcattgcagcaagtgctttcatccaaaaccatgagtgttggagccaggtatgcaccactgagcaggaccagcatgagagagttaaggtggacgagcatgccctttttgtcatatcagcctga

SEQ ID NO: 1504 - DNA, 600 bp, Homo sapiens; identical to SEQ ID NO: 1503

SEQ ID NO: 1505 - DNA, 600 bp, Homo sapiens
cgctatgaagttctggagacaatcgggaaggggtcctttggacaggtggccaagtgcttggatcacaaaaacaatgagctggtggccctgaaaatcatcaggaacaagaagaggtttcaccagcaggccctgatggagctgaagatcctggaagctctcagaaagaaggacaaagacaacacctacaatgtggtgcatatgaaggactttttctactttcgcaatcacttctgcatcacctttgagctcctgggaatcaacttgtatgagttgatgaagaataacaactttcaaggcttcagtctgtccatagttcggcgcttcactctctctgttttgaagtgcttgcagatgctttcggtagagaaaatcattcactgtgatctcaagcccgaaaatatagtgctataccaaaagggccaagcctctgttaaagtcattgactttggatcaagctgttatgaacaccagaaaggtcacctgccttctaggctgcgctcagctgtcaccactaccagtatgattttgaacaaggtgcttcgcttctctgagcccaagttgcctcatctacaatttgagaaagttgtatccaaatactag

SEQ ID NO: 1506 - DNA, 600 bp, Homo sapiens; identical to SEQ ID NO: 1505

SEQ ID NO: 1507 - DNA, 600 bp, Homo sapiens
caacagtaccacaatgacatgaaagaaattagaaagaagatggggagagaaccagaggacattgaaaaagacttgaaacaaatgaggcttcagaacacaaaggaaagtaaaaatccagaacagaaatataaagctaagaagggggtaaaatttgaaattaatttagacaaatgtatttctgatgaaaacatcctccaagaggaagaggcaatggatataccaaatgaaactttgacctttgaggatggcatgaagtttaaggaatatgaatgtgtaaaggagcatggagattatacagacaaagcatttgaaaaacttcactgcccagaagcagggttttccacgcagactgtagctgctgtgggaaacaggaggcagtgggatggaggagcgcctcagactctgctgcagatgatggcagtggccgacatcacctccacctgccccacggggcctgacaatggccaagttattgtgattgaaggcattccaggaaacaggaaacagtggcggcatgaagctccaggaactttaatgagtgttttggcagcagcacatctaacgagtagctcattttctgccgatgaagaatttggtatg

SEQ ID NO: 1508 - DNA, 600 bp, Homo sapiens; identical to SEQ ID NO: 1507

SEQ ID NO: 1509 - DNA, 600 bp, Homo sapiens
acatgcttgcaagagaacactgtgagcattttcatggagtttgttcctggtggctcaatctctagtattataaaccgttttgggccattgcctgagatggtgttctgtaaatatacgaaacaaatacttcaaggtgttgcttatctccatgagaactgtgtggtacatcgcgatatcaaaggaaataatgttatgctcatgccaactggaataataaagctgattgactttggctgtgccaggcgtttggcctgggcaggtttaaatggcacccacagtgacatgcttaagtccatgcatgggactccatattggatggccccagaagtcatcaatgagtctggctatggacggaaatcagatatctggagcattggttgtactgtgtttgagatggctacagggaagcctccactggcttccatggacaggatggccgccatgttttacatcggagcacaccgagggctgatgcctcctttaccagaccacttctcagaaaatgcagcagactttgtgcgcatgtgcctgaccagggaccagcatgagcgaccttctgctctccagctcctgaagcactccttcttggagagaagtcac

SEQ ID NO: 1510 - DNA, 600 bp, Homo sapiens; identical to SEQ ID NO: 1509

SEQ ID NO: 1511 - DNA, 600 bp, Homo sapiens
tcaagttctttgcctccacatttcagtgctgggaaagccaaggtggacactctggaggtgatacggcatccggaagaaaccaccaacatgaagaggcaaactgtggcttcttacttccggtattctctgatggacctgctctccaaaatggtggttggacagccccactttgtgcgctgcattaaacccaatgatgaccgagaggccctgcagttctctcgagagagggtgctggcccagctccgctccacagggattctggagacagtcagcatccgccgccagggctattcccaccgcatcctttttgaagaatttgtgaaaaggtattattacttggcattcacagcacatcaaacacctcttgctagcaaagagagctgtgtggctatcttggaaaagtccagattagatcactgggtgctgggaaaaacaaaggtttttctcaaatattaccatgttgagcaattaaatttgctgcttcgagaagtcataggcagagtggttgtgctgcaggcatataccaaggggtggcttggagccaggagatacaaaaaggtcagagagaagagagagaagggagccattgccatccagtca

SEQ ID NO: 1512 - DNA, 600 bp, Homo sapiens
gctcccgagacacttcagtttggccacttcagctctgccagtgacgtgtggagcttcggcatcatcatgtgggaggtgatggcctttggggagcggccttactgggacatgtctggccaagacgtgatcaaggctgtggaggatggcttccggctgccaccccccaggaactgtcctaaccttctgcaccgactaatgctcgactgctggcagaaggacccaggtgagcggcccaggttctcccagatccacagcatcctgagcaagatggtgcaggacccagagccccccaagtgtgccctgactacctgtcccaggcctcccaccccactagcggaccgtgccttctccaccttcccctcctttggctctgtgggcgcgtggctggaggccctggacctgtgccgctacaaggacagcttcgcggctgctggctatgggagcctggaggccgtggccgagatgactgcccagagggacctggtgagcctaggcatctctttggctgaacatcgagaggccctcctcagcgggatcagcgccctgcaggcacgagtgctccagctgcagggccagggggtgcaggtgtgagtggacccc

SEQ ID NO: 1513 - DNA, 600 bp, Homo sapiens; identical to SEQ ID NO: 1512

SEQ ID NO: 1514 - DNA, 600 bp, Homo sapiens
gagaagggcaatgaaaagatcgtggccatggtgagggtgtgttgggatgaatctctggagaaaagacccagtttctcttccatcaagaaaactttacgagaggccagtcccagaggtcatgtgagcatactggccagtgtgatgagcaagctggaagtgtatgccaattacctggaggaagtggtgcaagagaggaccagccagctgactgcagagaagaggaaggtggagaagcttctgtccaccaaagtgcccagcttcactggagaacaactactagccggaaggtccgtggaaccagaacatttcgaatctgtgacaatctttttatctgatattgttggattcacaaagctgtgttctctcagctcccctttgcaagtcgtcaagctcctcaatgacgtgtacagtttattcgatcacatcatcacaacttatgatgtttataagggcaaaggagagcaaacaactttctggttgaaagataaagaaggcttcactcttccactcccgaatttactgaggaaaaagccaaagtcccagagatattgtgagctaatcagcttgcaaggagataggagctcatatctgacagcatct

SEQ ID NO: 1515 - DNA, 600 bp, Homo sapiens; identical to SEQ ID NO: 1514

SEQ ID NO: 1516 - DNA, 271 bp, Homo sapiens
  misc_feature (16)..(16): n is a, c, g, or t
  misc_feature (204)..(204): n is a, c, g, or t
  misc_feature (237)..(237): n is a, c, g, or t
cgaccacgcgtccgcncaacccaccaacgccacgctcagcaccttcattgaggacctgaagaagtacggggctaccactgtggtgcgtgtgtgtgaagtgacctatgacaaaacgccgctggagaaggatggcatcaccgttgtggactggccgtttgacgatggggcgcccccgcccggcaaggtagtggaagactggctgancctggtgaaggccaagttctgtgaggcccccgncagctgcgtggctgtgcactgcgtggcgggcctg

SEQ ID NO: 1517 - DNA, 1400 bp, Homo sapiens
caaaaccaacatccgcttcatggagcccctgtccatgttctgtgccatgccgcccgaatataaagggcaccaggtgaaggaagttttaatccaggattcgagtgaacagtgcctcccaatgatatctcacgacagcttcccaaatcgtttaaacgtggatatcggcacgacggttttcctagactgtcgagccatggctgagccagaacctgaaatttactgggtcactcccattggaaataagataactgtggaaaccctttcagataaatacaagctaagtagcgaaggtaccttggaaatatctaacatacaaattgaagactcaggaagatacacatgtgttgcccagaatgtccaaggggcagacactcgggtggcaacaattaaggttaacgggacccttctggatggtacccaggtgctaaaaatatacgtcaagcagacagaatcccattccatcttagtgtcctggaaagttaattccaatgtcatgacgtcaaacttaaaatggtcgtctgccaccatgaagattgataaccctcacataacatatactgccagggtcccagtcgatgtccatgaatacaacctaacgcatctgcagccttccacagattatgaagtgtgtctcacagtgtccaatattcatcagcagactcaaaagtcatgcgtaaatgtcacaaccaaaaatgccgccttcgcagtggacatctctgatcaagaaaccagtacagcccttgctgcagtaatggggtctatgtttgccgtcattagccttgcgtccattgctgtgtactttgccaaaagatttaagagaaaaaactaccaccactcattaaaaaagtatatgcaaaaaacctcttcaatcccactaaatgagctgtacccaccactcattaacctctgggaaggtgacagcgagaaagacaaagatggttctgcagacaccaagccaacccaggtcgacacatccagaagctattacatgtggtaactcagaggatattttgcttctggtagtaaggagcacaaagacgtttttgctttattctgcaaaagtgaacaagttgaagacttttgtatttttgactttgctagtttgtggcagagtggagaggacgggtggatatttcaaatttttttagtatagcgtatcgcaagggtttgacacggctgccagcgactctaggcttccagtctgtgtttggtttttattcttatcattattatgattgttattatattattattttattttagttgttgtgctaaactcaataatgctgttctaactacagtgctcaataaaatgattaatgacaggaaaaaaaaaaaaaaaaaaaaaaaaaaaaaaaaaaaaaaaaaaaaaaaaaaaaaaaaaaaaaaaaaaaaaaaaa

SEQ ID NO: 1518 - DNA, 1400 bp, Homo sapiens
  misc_feature (241)..(241): n is a, c, g, or t
tcgacctcaagttgtgacagaagagtttcttttcagctatggaactattcttagtcatattaaatctgtagactcaggagaaacgaacatagatggagccataggactgacagcatcagaagaatttatcaagatcacattgtcagcttttgaagcaataatacagtatcctattttattgaaagactatcgctccacggttgttgactatatactgccacccttggtgtccttggttcanagccaaaatgtggagtggagactctttagcttgcggttgctctcagaaaccacatctctactcgtgaaccaggaatttggggatggcaaggaaaaagccagtgttgattctgacagcaatcttctggctctcattcgagatgtcttacttccccagtatgagcacattcttttagaacctgacccagtaccagcatatgctctgaaactgctagtcgcgatgactgaacacaacccaactttcacaagacttgtggaagaaagcaaactgatcccactcatttttgaagtaactctggaacatcaggagagcattctgggtaataccatgcaaagtgtgattgcattactcagcaatctagttgcctgcaaagattcgaatatggaactactttatgaacaaggacttgtcagtcacatctgtaacctgctcactgaaactgccacactgtgcttggatgtggacaataaaaacaacaatgagatggcagctccactgctcttttccctgcttgatattttgcacagcatgctgacctatacctccggtattgtacggctggctttgcaggcccagaagtctggctcaggagaggaccctcaaggctgcagaaagacctgctgctgctcaacaagacctcttgacagacctgattaagcctgctcatttccacttgctttcctaatgaagattcctgaagatttttgatggtttcatccaagtgcctgtccaatactgggttcagctgtatggaggggaaaacccggacagcctctctcctgaaaatgtggaaatttttgctcatttactgacatccaaggaggacccaaaggagcagaagcttctgttaaggattctcagaagaatgatcacctccaatgagaagcacttggagagcctcaagaatgcaggcagcctcctgcgggctctggagcggctggcccctgggagtggttcatcttgccgacagtgcggtggctcccttggccctggagatcctccaagccgttgggcactaggcaagaaggtgcttagcacaagcccgccctgtggccccagccctcggatgcataagcaaggtcagctcccagacacctttgccacatcccctcacagctgtctttggacctaataaagtcagcttaacccagaaaaaaaa

SEQ ID NO: 1519 - DNA, 1400 bp, Homo sapiens; identical to SEQ ID NO: 1518
  misc_feature (241)..(241): n is a, c, g, or t

SEQ ID NO: 1520 - DNA, 600 bp, Homo sapiens
atggattgtcctgctgctctctatcagttaatgctggattgctggcagaaagagcgaaatagcaggcccaagtttgatgaaatagtcaacatgttggacaagctgatacgtaacccaagtagtctgaagacgctggttaatgcatcctgcagagtatctaatttattggcagaacatagcccactaggatctggggcctacagatcagtaggtgaatggctagaggcaatcaagatgggccggtatacagagattttcatggaaaatggatacagttcaatggacgctgtggctcaggtgaccttggaggatttgagacggcttggagtgactcttgtcggtcaccagaagaagatcatgaacagccttcaagaaatgaaggtgcagctggtaaacggaatggtgccattgtaacttcatgtaaatgtcgcttcttcaagtgaatgattctgcactttgtaaacagcactgagatttattttaacaaaaaaagggggaaaagggaaaacagtgatttctaaaccttagaaaacatttgcctcagccacagaatttgtaatcatggttttactgaagtatccagttcttagtccttagtct

SEQ ID NO: 1521 - DNA, 600 bp, Homo sapiens; identical to SEQ ID NO: 1520

SEQ ID NO: 1522 - DNA, 133 bp, Homo sapiens
cacaacttacattactattccataactccagacatcactggcagaagtaaactttcggaaagctatgcttctgggcgtccatctgattggaattttccttgtgtgtagctgctcggacactcagaccgagcag

SEQ ID NO: 1523 - DNA, 133 bp, Homo sapiens; identical to SEQ ID NO: 1522

SEQ ID NO: 1524 - DNA, 600 bp, Homo sapiens
tattaccgccaaggccgcattgctaagatgcctgttaaatggatcgccatagaaagtcttgcagaccgagtctacacaagtaaaagtgatgtgtgggcatttggcgtgaccatgtgggaaatagctacgacgctgcggggaatgactccctatcccggagttcagaaccatgagatgtacgactaccttctccacggccacaggctgaagcagcctcgaaccgcttggaactgtacagaaatccgaatccgactcctaaaactaccaatcctggggagtcgaacaatgcgtccaatgacaatattttcaatggccacgcgactatcatcacccaaaacagcttggatgaactgtatgaaaaaatgtacactagcaggggaacccataccaaagactggaccgacattctcggtactaagactacagctggaaaaattgctagagagcttaccggacgttagaaatcaagcagatgtaatttatgttaacactcaattgctagagagcgaaggccttgccagggttcatccctgtagtaccgggctcgaacaccatccatgcagcgaacatcgaccgcgtccgcacctctataattgctaa

SEQ ID NO: 1525 - DNA, 600 bp, Homo sapiens; identical to SEQ ID NO: 1524

SEQ ID NO: 1526 - DNA, 417 bp, Homo sapiens
  misc_feature (315)..(315): n is a, c, g, or t
  misc_feature (370)..(370): n is a, c, g, or t
  misc_feature (377)..(377): n is a, c, g, or t
  misc_feature (417)..(417): n is a, c, g, or t
gatctgcctgcccaccaactggtgatggaaggttacaagtggcacttcaatgagacggtgctcactgtgtggtcggcaccaactactgctaccgtgtgggaatgtggcagcatcttggagctggacgagcatctccagaaagatttcatcatctttgagctgctcccaagagcacggggcatccctccaagagccgtgccgctattcctgtgacccgccggcctgccctcacctttggctcgacatgtgcttgcatttctagcgagctggcgtgggggctgtctggttgtgtcccaagaggtgttgaggtaggtnttgagagctgagactagtcatgtctctctttccattacatgagttcatatttttnttttctnttttgtgttagtaatttggaaatgaaattataaggaatgn

SEQ ID NO: 1527 - DNA, 417 bp, Homo sapiens; identical to SEQ ID NO: 1526
  misc_feature (315)..(315): n is a, c, g, or t
  misc_feature (370)..(370): n is a, c, g, or t
  misc_feature (377)..(377): n is a, c, g, or t
  misc_feature (417)..(417): n is a, c, g, or t

SEQ ID NO: 1528 - DNA, 222 bp, Homo sapiens
  misc_feature (55)..(55): n is a, c, g, or t
  misc_feature (194)..(194): n is a, c, g, or t
gatcttctggacaaacttctgcgatacgaccatcaacagagactgactgccaaanaggccatggagcacccatacttctaccctgtggtgaaggagcagtcccagccttgtgcagacaatgctgtgctttccagtggtctcacggcagcacgatgaagactggaaagcgacgggtaatgcggcattgatgcttnccaataaaaccaaccaaccaaacacaaa

SEQ ID NO: 1529 - DNA, 222 bp, Homo sapiens; identical to SEQ ID NO: 1528
  misc_feature (55)..(55): n is a, c, g, or t
  misc_feature (194)..(194): n is a, c, g, or t

SEQ ID NO: 1530 - DNA, 386 bp, Homo sapiens
  misc_feature (11)..(11): n is a, c, g, or t
  misc_feature (39)..(39): n is a, c, g, or t
  misc_feature (128)..(128): n is a, c, g, or t
  misc_feature (215)..(215): n is a, c, g, or t
  misc_feature (223)..(223): n is a, c, g, or t
  misc_feature (252)..(252): n is a, c, g, or t
  misc_feature (303)..(303): n is a, c, g, or t
  misc_feature (335)..(335): n is a, c, g, or t
  misc_feature (377)..(377): n is a, c, g, or t
  misc_feature (386)..(386): n is a, c, g, or t
gatcttatttnacttcatccttcttgtaaccatattgtnaatcaggaaagctcaatcagatacaaaaacaggaaattcgttaaaagtaacgtttgtagaagatactagttgaggaggagagacttttnagaaagcctgtgtgtgtttgtaacactcttgtgaccgtgccaagaaaacgtaagcaaatatcaagcctccaaatcctaatgcaacangtcctgantcccttgcaggtatgtcctggatgatgantacacaagctcagtaggctccaaatttccagtccggtggtccccaccggangtcctgatgtatagcaagttcagcagcaaatntgacatttgggcttttggggttttgatgtgggaaatttactncctggggan

SEQ ID NO: 1531 - DNA, 1400 bp, Homo sapiens
gtggacagagctggccctgctgattcaacagtgcatggcctatgagccggtccagaggccctccttacgagccgtcattcgtgacctcaatagtctcatctcttcagactatgagctcctctcagaccacacctggtgccctggcactcgtgatgggctgtggaatggtgcccagctctatgcctgccaagaccccacgatcttcgaggagagacacctcaagtacatctcacagctgggcaagggcttctttggcagcgtggagctgtgccgctatgacccgctaggcgacaatacaggtgccctggtggccgtgaaacagctgcagcacagcgggccagaccagcagagggactttcagcgggagattcagatcctcaaagcacagcacagtgatttcattgtcaagtatcgtggtgtcagctatggcccgggccgccagagccctgcgctggtcatggagtacctgcccagcggctgcttgcgcgacttcctgcagcggcaccggggcctcgatgccagccgcctccttctctattcctcgcagatctgcaagggcatggagtacctgggctcccgccgctgcgtgcaccgcgacctggccgcccgaaacatcctcgtggagagcgaggcacacgtcaagatcgctgacttcggcctagctaagctgctgccgcttgacaaagactactacgtggtccgcgagccaggccagagccccattttctggtatgcccccgaatccctctcggacaacatcttctctcgccagtcagacgtctggagcttcggggtcgtcctgtacgagctcttcacctactgcgacaaaagctgcagcccctcggccgagttcctgcggatgatgggatgtgagcgggatgtcccccgcctctgccgcctcttggaactgctggaggagggccagaggctgccggcgcctccttgctgccctgctgaggtgagttgctacagtggctggagagacgacatctgcctgcctgctgagtgagttgctacagtggctgagagacgacatctgctccatggctggtggccgacagtaatctcacgccggacctgccgcagcccctgccccagacctctcaccatcaccgccaccaccgtgcagctgccaccaaccctgcacgctactgctgcctcagtggctgtacccaacaagacctgctgaccctctgtccctactgattcctccttgggtgcagcctcagagtgcctgaggcccagagggtctggtctggtgagctcctgaggccacacagcaccataaagtctcgcatctacaggcctttgattacctcctgggatgggtgctcactatctaccccagaccaacgccacctgcagcctgtggagtcaactgcagaataaatcacacccta

SEQ ID NO: 1532 - DNA, 600 bp, Homo sapiens
gaacaaatggaagagtgccggtgctgagacccttgaagtgcatccctgcgagcaagaagacagatccgcagaaggaccttaagcctgccccgcagcagtgtcgcctgcccaccatagtgcggaaaggcggaagataactgagcagcaccgtcgtctcgacttcggaggcaacaccaagcccgaccgggccaggcctgggtgatctgctgctgagacgccacggagggctggggatgcgcctgcgtccgtttcgcgctggccggggctctgggtgctgccctgcgccctgccgcacccgcggcccgcgcagctgcctaggatgttctgggctaatatacttgtaaaaccaccgcattctagggttttctttcattttcgttaagaatttggggcaggaaatactttgtaactttgtatatgaatcaaaacaaacgagcaggcatttctgtgatgtgttgggcgtggttggaaggtgggttctgcgtgtcccttcccagcgctgctggtcagtcgtggagcgccatcatgtcttaccagtgacgctgctgacacccctgacttttattaaagaataagctgtcgttacagtattgcaaaaaa

SEQ ID NO: 1533 - DNA, 1317 bp, Homo sapiens
agaactcaggggatttctatgacctgtatggaggggagaagtttgcgactctgacagagctggtggagtactacactcagcagcagggtgtggtgcaggaccgcgacggcaccatcatccacctcaagtacccgctgaactgctccgatcccactagtgagaggtggtaccatggccacatgtctggcgggcaggcagagacgctgctgcaggccaagggcgagccctggacgtttcttgtgcgtgagagcctcagccagcctggagacttcgtgctttctgtgctcagtgaccagcccaaggctggcccaggctccccgctcagggtcacccacatcaaggtcatgtgcgagggtggacgctacacagtgggtggtttggagaccttcgacagcctcacggacctggtggagcatttcaagaagacggggattgaggaggcctcaggcgcctttgtctacctgcggcagccgtactatgccacgagggtgaatgcggctgacattgagaaccgagtgttggaactgaacaagaagcaggagtccgaggatacagccaaggctggcttctgggaggagtttgagagtttgcagaagcaggaggtgaagaacttgcaccagcgtctggaagggcaacggccagagaacaagggcaagaaccgctacaagaacattctcccctttgaccacagccgagtgatcctgcagggacgggacagtaacatccccgggtccgactacatcaatgccaactacatcaagaaccagctgctaggccctgatgagaacgctaagacctacatcgccagccagggctgtctggaggccacggtcaatgacttctggcagatggcgtggcaggagaacagccgtgtcatcgtcatgaccacccgagaggtggagaaaggccggaacaaatgcgagtacgggaacatcacctatcccccagccatgaagaatgcccatgccaaggcctcccgcacctcgtccaaacacaaggaggatgtgtatgagaacctgcacactaagaacaagagggaggaaagtgaagaagcagcggtcagcagacaaggagaagagcaagggttccctcaagaggaagtgagcggtgctgtcctcaggtggccatgcctcagccctgaccctgtggaagcatttcgcgatggacagactcacaacctgaacctaggagtgccccattcttttgtaatttaaatggctgcatcccccccacctctccctgaccctgtatatagcccagccaggccccaggcagggccaacccttctcctcttgtaaataaagccctgggatcact

SEQ ID NO: 1534 - DNA, 1317 bp, Homo sapiens; identical to SEQ ID NO: 1533

SEQ ID NO: 1535 - DNA, 600 bp, Homo sapiens
gtacagcctccggaagcagccctacaacaacctgaagcacaagttcccatggctgtcggaggccgggctgcgcctgctgcacttcctgttcatgtacgaccctaagaaaagggcgacggccggggactgcctggagagctcctatttcaaggagaagcccctacgtcttccgatcagtggtgtctgtgaagggtgccgcgagccaggctgaccaggcgcccgggatccagctcatccccttggctgggaacatcctccactgacttcctcccactgtctgccctgaacccactgctgcccccagaaaaaggccgggtgacaccggggggctcccagcccgtgcaccctggaagggcaggtctggcggctccatccgtggctgcaggggtctcatgtggtcctcctcgctatgttggaaatgtgcaaccactgcttcttgggaggagtggtgggtgcagtccccccgctgtctttgagttgtggtggacgctggcctgggatgagagggcccagaagaccttcgtatcccctctcagtcgcccggggctgtcccgtgcatgggttggctgtggggaccccaggtgggcctggcaggactcc

SEQ ID NO: 1536 - DNA, 600 bp, Homo sapiens; identical to SEQ ID NO: 1535

SEQ ID NO: 1537 - DNA, 1400 bp, Homo sapiens
tcgtgaatctgctgggggcatgcacactgtcagggccagtgtacttgatttttgaatattgttgctatggtgacctcctcaactacctaagaagtaaaagagagaagtttcacaggacatggacagagatttttaaggaacataatttcagttcttaccctactttccaggcacattcaaattccagcatgcctggttcacgagaagttcagttacacccgcccttggatcagctctcagggttcaatgggaattcaattcattctgaagatgagattgaatatgaaaaccagaagaggctggcagaagaagaggaggaagatttgaacgtgctgacgtttgaagacctcctttgctttgcgtaccaagtggccaaaggcatggaattcctggagttcaagtcgtgtgtccacagagacctggcagccaggaatgtgttggtcacccacgggaaggtggtgaagatctgtgactttggactggcccgagacatcctgagcgactccagctacgtcgtcaggggcaacgcacggctgccggtgaagtggatggcacccgagagcttatttgaagggatctacacaatcaagagtgacgtctggtcctacggcatccttctctgggagatattttcactgggtgtgaacccttaccctggcattcctgtcgacgctaacttctataaactgattcagagtggatttaaaatggagcagccattctatgccacagaagggatatactttgtaatgcaatcctgctgggcttttgactcaaggaagcggccatccttccccaacctgacttcatttttaggatgtcagctggcagaggcagaagaagcatgtatcagaacatccatccatctaccaaaacaggcggcccctcagcagagaggcgggctcagagcccagtcgccacagcgccaggtgaagattcacagagaaagaagttagcgaggaggccttggaccccgccaccctagcaggctgtagaccgcagagccaagattagcctcgcctctgaggaagcgccctacagcgcgttgcttcgctggacttttctctagatgctgtctgccattactccaaagtgacttctataaaatcaaacctctcctcgcacaggcgggagagccaataatgagacttgttggtgagcccgcctaccctgggggcctttccacgagcttgaggggaaagccatgtatctgaaatatagtatattcttgtaaatacgtgaaacaaaccaaacccgttttttgctaagggaaagctaaatatgatttttaaaaatctatgttttaaaatactatgtaactttttcatctatttagtgatatattttatggatggaaataaactttctactgtaaaaaaaaaaaaaaaaaaaaaaaaaaa

SEQ ID NO: 1538 - DNA, 304 bp, Homo sapiens
acccagtagggatttttcgtctattgtaagaattatacattcatgaccccaaagaatcacaccaagactttattgttaggatcatgggaaattgatccaaaggacctgaccttcttgaaggagctggggactggacaatttggggtagtgaagtatgggaaatggagaggccagtacgacgtggccatcaagatgatcaaagaaggctccatgtctgaagatgaattcattgaagaagccaaagtcatgatgtgagttatagcccaaactcaactctcaatctatttgctggagtctaggaatt

SEQ ID NO: 1539 - DNA, 304 bp, Homo sapiens; identical to SEQ ID NO: 1538

SEQ ID NO: 1540 - DNA, 243 bp, Homo sapiens
gtgccaagaatacgtaagcaaatatcaagcctccaaatcctaatgcaacaagtcctgaatcccttgcaggtatgtcctggatgatgaatacacaagctcagtaggctccaaatttccagtccggtggtccccaccggaagtcctgatgtatagcaagttcagcagcaaatctgacatttgggcttttggtaagtggataagattacacagattatacagctctaaggataagaaatgcaatgg

SEQ ID NO: 1541 - DNA, 1400 bp, Homo sapiens
actcctactcctgcatggccctcagggacagtgaggtcccaggccccacacccatggaactggaggccgagcagctgcttgagccacacgtgcaagcgcccagcctggagccctcggtgtccccacaggatgaaacagctgaagtggcagttccagcggctgtccctgcggcagaggctgaggccgaggtgacgctgcgggagctccaggaagccctggaggaggaggtgctcacccggcagagcctgagccgggagatggaggccatccgcacggacaaccagaacttcgccagtcaactacgcgaggcagaggctcggaaccgggacctagaggcacacgtccggcagttgcaggagcggatggagttgctgcaggcagagggagccacagctgtcacgggggtccccagtccccgggccacggatccaccttcccatctagatggccccccggccgtggctgtgggccagtgcccgctggtggggccaggccccatgcaccgccgccacctgctgctccctgccagggtccctaggcctggcctatcggaggcgctttccctgctcctgttcgccgttgttctgtctcgtgccgccgccctgggctgcattgggttggtggcccacgccggccaactcaccgcagtctggcgcccgcccaggagccgcccgcgctccctgaaccctagaactgtcttcgactccggggccccgttggaagactgagtgcccggggcacggcacagaagccgcgcccaccgcctgccagttcacaaccgctccgagcgtgggtctccgcccagctccagtcctgtgaccgggcccgccccctagcggccggggagggaggggccgggtccgcggccggcgaacggggctcgaagggtccttgtagccgggaatgctgctgctgctgctggggggatcacagaccatttctttctttcggccaggctgaggccctgacgtggatgggcaaactgcaggcctgggaaggcagcaagccgggccgtccgtgttccatcctccacgcacccccacctatcgttggttcgcaaagtgcaaagctttcttgtgcatgacgccctgctctggggagcgtctggcgcgatctctgcctgcttactcgggaaatttgcttttgccaaacccgctttttcggggatcccgcgcccccctcctacttgcgctgctctcggagccccagccgctccgcccgcttcggcggtttggatatttattgacctcgtcctccgactcgctgacaggctacaggacccccaacaaccccaatccacgttttggatgcactgagaccccgacattcctcggtatttattgtctgtccccacctaggacccccacccccgaccctcgcgaataaaaggccctccatcg

SEQ ID NO: 1542 - DNA, 1400 bp, Homo sapiens; identical to SEQ ID NO: 1541

SEQ ID NO: 1543 - DNA, 240 bp, Homo sapiens
gatctttcacatggaaatccaaatgtctggggaaatctatcttgtctgcaagaattttctgataaatgccaaacatgttgtcacacacacacacacacacacacacacacacacacacacacacaaatggaggaaatcctgagagcatctcgaatatcaggatgctgagggcccaccagtccacagcccttccgtgaccctcgctctgaatgacttcgggggccaggtactcgggtattc

SEQ ID NO: 1544 - DNA, 240 bp, Homo sapiens; identical to SEQ ID NO: 1543

SEQ ID NO: 1545 - DNA, 600 bp, Homo sapiens
gaaataagttgtccaaggcaagaagatagtaaattataagtacaagtgtaatatggacagtatctaacttgaaaagatttcaggcgaaaagaatctggggtttgccagtcagttgctcaaaaggtcaatgaaaaccaaatagtgaagctatcagagaagctaataaattatagactgcttgaacagttgtgtccagattaagggagataatagctttcccaccctactttgtgcaggtcatacctccccaaagtgtttacctaatcagtaggttcacaaactcttggtcattatagtatatgcctaaaatgtatgcacttaggaatgctaaaaatttaaatatggtctaaagcaaataaaagcaaagaggaaaaactttggacatcgtaaagactagaatagtcttttaaaaagaaagccagtatattggtttgaaatatagagatgtgtcccaatttcaagtattttaattgcaccttaatgaaattatctattttctatagattttagtactattgaatgtattactttactgttacctgaatttattataaagtgtttttgaataaataattctaaaagcaaaaaaaaaaaaaaaaa

SEQ ID NO: 1546 - DNA, 600 bp, Homo sapiens; identical to SEQ ID NO: 1545

SEQ ID NO: 1547 - DNA, 600 bp, Homo sapiens
aatggttggttatattctggggcttggagaccgtcatggtgaaaatattctctttgattctttgactggtgaatgcgtacatgtagatttcaattgtcttttcaataagggagaaacctttgaagttccagaaattgtgccatttcgcctgactcataatatggttaatggaatgggtcctatgggaacagagggtctttttcgaagagcatgtgaagttacaatgaggctgatgcgtgatcagcgagagcctttaatgagtgtcttaaagacttttctacatgatcctcttgtggaatggagtaaaccagtgaaagggcattccaaagcgccactgaatgaaactggagaagttgtcaatgaaaaggccaagacccatgttcttgacattgagcagcgactacaaggtgtaatcaagactcgaaatagagtgacaggactgccgttatctattgaaggacatgtgcattaccttatacaagaagctactgatgaaaacttactatgccagatgtatcttggttggactccatatatgtgaaatgaaattatgtaaaagaatatgttaataatctaaaagtaaaaaaaaaaaaaaaaaaa

SEQ ID NO: 1548 - DNA, 600 bp, Homo sapiens; identical to SEQ ID NO: 1547

SEQ ID NO: 1549 - DNA, 600 bp, Homo sapiens
  misc_feature (115)..(115): n is a, c, g, or t
  misc_feature (161)..(161): n is a, c, g, or t
  misc_feature (179)..(179): n is a, c, g, or t
  misc_feature (186)..(186): n is a, c, g, or t
  misc_feature (201)..(201): n is a, c, g, or t
  misc_feature (279)..(279): n is a, c, g, or t
  misc_feature (331)..(331): n is a, c, g, or t
  misc_feature (403)..(403): n is a, c, g, or t
  misc_feature (425)..(425): n is a, c, g, or t
  misc_feature (429)..(429): n is a, c, g, or t
  misc_feature (437)..(437): n is a, c, g, or t
  misc_feature (443)..(443): n is a, c, g, or t
  misc_feature (451)..(451): n is a, c, g, or t
  misc_feature (463)..(463): n is a, c, g, or t
  misc_feature (484)..(484): n is a, c, g, or t
  misc_feature (496)..(500): n is a, c, g, or t
  misc_feature (503)..(504): n is a, c, g, or t
  misc_feature (527)..(527): n is a, c, g, or t
  misc_feature (533)..(533): n is a, c, g, or t
  misc_feature (538)..(538): n is a, c, g, or t
  misc_feature (554)..(554): n is a, c, g, or t
  misc_feature (560)..(560): n is a, c, g, or t
  misc_feature (565)..(566): n is a, c, g, or t
  misc_feature (571)..(572): n is a, c, g, or t
  misc_feature (587)..(587): n is a, c, g, or t
  misc_feature (590)..(590): n is a, c, g, or t
  misc_feature (593)..(595): n is a, c, g, or t
atccatggatgaagatataaataataatattattaataataataatggtcaggtgccatgtgctgtattaagtgctttatgaacatttgttaggctggcctccggagctgaggtnccagtcaacctgaaccctaagcccagacccaccgatcccaaatggngggtcctgagatgtttanacaaagnattaaggaaaccagnagtctcctagagctagccggatggactctaatgcagggacctgaacagactgcacagctaatggcacaggaggccggncctgtccagcttcagagatataagctgctttagctggggttctgtcacaggnctgagcctcttgggtttctactgggttttgggtctaccagagtcagagatcagctccactggaagggggagnggatcttggcctcaatctttgncagncacttcanaccccngttgatcnggggggccaatnacaatccctgtgcatagaggnggacatccggtnnnnnggnncaacccacccccttacccgagantctgtntctgnggaggatttcacaccncccagnatttnnctctnnttttaggaaggggcnggnccnnntaaaa

SEQ ID NO: 1550 - DNA, 600 bp, Homo sapiens; identical to SEQ ID NO: 1549
  misc_feature (115)..(115): n is a, c, g, or t
  misc_feature (161)..(161): n is a, c, g, or t
  misc_feature (179)..(179): n is a, c, g, or t
  misc_feature (186)..(186): n is a, c, g, or t
  misc_feature (201)..(201): n is a, c, g, or t
  misc_feature (279)..(279): n is a, c, g, or t
  misc_feature (331)..(331): n is a, c, g, or t
  misc_feature (403)..(403): n is a, c, g, or t
  misc_feature (425)..(425): n is a, c, g, or t
  misc_feature (429)..(429): n is a, c, g, or t
  misc_feature (437)..(437): n is a, c, g, or t
  misc_feature (443)..(443): n is a, c, g, or t
  misc_feature (451)..(451): n is a, c, g, or t
  misc_feature (463)..(463): n is a, c, g, or t
  misc_feature (484)..(484): n is a, c, g, or t
  misc_feature (496)..(500): n is a, c, g, or t
  misc_feature (503)..(504): n is a, c, g, or t
  misc_feature (527)..(527): n is a, c, g, or t
  misc_feature (533)..(533): n is a, c, g, or t
  misc_feature (538)..(538): n is a, c, g, or t
  misc_feature (554)..(554): n is a, c, g, or t
  misc_feature (560)..(560): n is a, c, g, or t
  misc_feature (565)..(566): n is a, c, g, or t
  misc_feature (571)..(572): n is a, c, g, or t
  misc_feature (587)..(587): n is a, c, g, or t
  misc_feature (590)..(590): n is a, c, g, or t
  misc_feature (593)..(595): n is a, c, g, or t

SEQ ID NO: 1551 - DNA, 600 bp, Homo sapiens
caagctctgtgactttggggtcagcgggcagctcatcgactccatggccaactccttcgtgggcacaaggtcctacatgtcgccagaaagactccaggggactcattactctgtgcagtcagacatctggagcatgggactgtctctggtagagatggcggttgggaggtatcccatccctcctccagatgccaaggagctggagctgatgtttgggtgccaggtggaaggagatgcggctgagaccccacccaggccaaggacccccgggaggccccttagctcatacggaatggacagccgacctcccatggcaatttttgagttgttggattacatagtcaacgagcctcctccaaaactgcccagtggagtgttcagtctggaatttcaagattttgtgaataaatgcttaataaaaaaccccgcagagagagcagatttgaagcaactcatggttcatgcttttatcaagagatctgatgctgaggaagtggattttgcaggttggctctgctccaccatcggccttaaccagcccagcacaccaacccatgctgctggcgtctaagtgtttgggaagcaacaaagagcgagtcc

SEQ ID NO: 1552 - DNA, 600 bp, Homo sapiens; identical to SEQ ID NO: 1551

SEQ ID NO: 1553 - DNA, 1253 bp, Homo sapiens
  misc_feature (53)..(53): n is a, c, g, or t
cattggagtcacgcggtggcggcgctctagaatagtggatccccgggctgcanggaattcgattcgagcccacgaaggccccttcttctgtggtcgcggcacgtttacagccgcaagcacccagcggcagctgaaggaggcttttgagaggctcctgccccaggtggaggcggcccgcaaggccatccgcgccgctcaggtggagcgctatgtgcccgaacacgagcgatgctgctggtgcctgtgctgcggctgtgaggtgcgggaacacctgagccatggaaacctgacggtgctgtacggggggctgctggagcatctggccagcccagagcacaagaaagcaaccaacaaattctggtgggagaacaaagctgaggtccagatgaaagagaagtttctggtcactccccaggattatgcgcgattcaagaaatccatggtgaaaggtttggattcctatgaagaaaaggaggataaagtgatcaaggagatggcagctcagatccgtgaggtggagcagagccgacaggaggtggttcggtctgtcttagagcctcaggcagtgccagacccagaagagggctcttcagcacctagaagctggaaagggatgaacagccaagtagcttccagcttacagcagccctcaaatttggacctgccaccagctccagagcttgactggatggagacaggaccatctctgacattcattggccatcaggatataccaggagttggtaacatccactcaggtgccacacctccctggatgatccaagatgaagaatacattgctgggaaccaagaaataggaccatcctatgaagaatttcttaaagaaaaggaaaaacagaagttgaaaaaactccccccagaccgagttggggccaactttgatcacagctccaggaccagtgcaggctggctgccctcttttgggccgcgtctggaataatggacgccgctggcagtccagacatcaactccaaaactgaagctgcagcaatgaagaagcagtcacatacagaaaaaagctaatcatgctctctaccaactaccatgaggctaaaagccaaagtcaaccaaacccctattataccttccacccaaattctttatcattgtctttcttaggaaacagacatactcattcatttgatttaataaagttttatttttcggccttcgtggcctcgaatcaagcttatcgataccgtcgacctcgagggggggccgtacccactttt

SEQ ID NO: 1554 - DNA, 1253 bp, Homo sapiens; identical to SEQ ID NO: 1553
  misc_feature (53)..(53): n is a, c, g, or t

SEQ ID NO: 1555 - DNA, 1299 bp, Homo sapiens
gaacgtaccgggagctgcggctgctcaagcacctgaagcacgagaacgtcatcgggcttctggacgtcttcacgccggccacgtccatcgaggacttcagcgaagtgtacttggtgaccaccctgatgggcgccgacctgaacaacatcgtcaagtgccaggcgctgagcgacgagcacgttcaattcctggtttaccagctgctgcgcgggctgaagtacatccactcggccgggatcatccaccgggacctgaagcccagcaacgtggctgtgaacgaggactgtgagctcaggatcctggatttcgggctggcgcgccaggcggacgaggagatgaccggctatgtggccacgcgctggtaccgggcacctgagatcatgctcaactggatgcattacaaccaaacagtggatatctggtccgtgggctgcatcatggctgagctgctccagggcaaggccctcttcccgggaagcgactacattgaccagctgaagcgcatcatggaagtggtgggcacacccagccctgaggttctggcaaaaatctcctcggaacacgcccggacatatatccagtccctgccccccatgccccagaaggacctgagcagcatcttccgtggagccaaccccctggccatagacctccttggaaggatgctggtgctggacagtgaccagagggtcagtgcagctgaggcactggcccacgcctacttcagccagtaccacgaccccgaggatgagccagaggccgagccatatgatgagggcgttgaggccaaggagcgcacgctggaggagtggaaggagctcacttaccaggaagtcctcagcttcaagcccccagagccaccgaagccacctggcagcctggagattgagcagtgaggtgctgcccagcagcccctgagagcctgtggaggggcttgggcctgcacccttccacagctggcctggtttcctcgagaggcacctcccacactcctatggtcacagacttctggcctaggacccctcgccttcaggagaatctacacgcatgatggagctgatccagtaacctcggagacgggaccctgcccagagccgagttgggggtgtggctctcccctggaaagggggtgacctcttgcctcgaggggcccagggaagcctgggtgtcaagtgcctgcaccaggggtgcacaataaagggggttctctctaaaaaaaaaaaaaaaaaaaaaaaaaaaaaaaaaagcggccgctgaattctacctgcccgggcggccgctcgagccctatagtgagta

SEQ ID NO: 1556 - DNA, 1299 bp, Homo sapiens; identical to SEQ ID NO: 1555

SEQ ID NO: 1557 - DNA, 600 bp, Homo sapiens
tgttctcatggtgttggcctcgtgtttgctatgccaactagtagaaccttctttcctaatccccttatcttcatggaaatggactgactttatgcctatgaagtccccaggagctacactgatactgagaaaaccaggctctttggggctagacagactggcagagagtgagatctccctctctgagaggagcagcagatgctcacagaccacactcagctcaggccccttggagcaggatggctcctctaagaatctcacaggacctcttagtctctgccctatacgccgccttcactccacagcctcacccctcccacccccatactggtactgctgtaatgagccaagtggcagctaaaagttgggggtgttctgcccagtcccgtcattctgggctagaaggcaggggaccttggcatgtggctggccacaccaagcaggaagcacaaactcccccaagctgactcatcctaactaacagtcacgccgtgggatgtctctgtccacattaaactaacagcattaatgcagtcagcctctggttctttgtgccacatgagtacctgcaaattccctggaacgtctttctttccttcc

SEQ ID NO: 1558 - DNA, 600 bp, Homo sapiens
tggcagagtttgtgtgttgtcttgaaagattcaggtatgttgcctttatggtttcccccttctacatttcttagactacatttagagaactgtggccgttatctggaagtaaccatttgcactggagttctatgctctcgcacctttccaaagttaacagattttggggttgtgttgtcacccaagagattgttgtttgccatactttgtctgaaaaattcctttgtgtttctattgacttcaatgatagtaagaaaagtggttgttagttatagatgtctaggtacttcaggggcacttcattgagagttttgtcttgccatactttgtctgaaaaattcctttgtgtttctattgacttcaatgatagtaagaaaagtggttgttagttatagatgtctaggtacttcaggggcacttcattgagagttttgtcaatgtcttttgaatattcccaagcccatgagtccttgaaaatattttttatatatacagtaactttatgtgtaaatacataagcggcgtaagtttaaaggatgttggtgttccacgtgttttattcctgtatgttgtccaattgttgacagttctgaagaattc

SEQ ID NO: 1559 - DNA, 407 bp, Homo sapiens
tgatatttcaacggcaaagaatctgttattactagcaaattctacagaagagcagcagaagtgggttagtcggttggtgaaaaagatacctaaaaagcccccagctccagacccttttgcccgatcatctcctagaacttcaatgaagatacagcaaaaccagtctattagacggccaagtcgacagcttgccccaaacaaacctagctaactgccttctatgaaagcagtcattattcaaggtgatcgtattcttccagtgaaaacaagactgaaatatgatgaccccatggtacccggatcctcgaatcttttgctttttaccctggaagaaatactcataagccacctctgtaatcggatccccgggtaccgaaatactcataagccacctctgtaatcggatc

SEQ ID NO: 1560 - DNA, 407 bp, Homo sapiens; identical to SEQ ID NO: 1559

SEQ ID NO: 1561 - DNA, 339 bp, Homo sapiens
ggagtaataatggaacaccataaagcgcacacaaccattcaggctttacaagccaaacgcaaaaggttgctaaccgaattagccgagttagaagcagaaataaaggtgagcagcgaacgaaggagcagttttaacgtttcgctctcgccgagtttgttagccgaaatagaagagatagaatacgaagaaaaaatgagcaaagagcgaagaatccatcacaatcttttgctttcgcccagtttcatggctaaagtggatgaatacatgaaagagaaaggttttcctaatcgatcgcttctctttgaaaaagcgttggagttttatatgctaaaacaccca

SEQ ID NO: 1562 - DNA, 339 bp, Homo sapiens; identical to SEQ ID NO: 1561

SEQ ID NO: 1563 - DNA, 1400 bp, Homo sapiens
taatttgtgcttgctacattaaaatttattttgcatggcgaaacccagaattaatggctaccaataaagctaagaaaatggcaatcctcatcttcaccgattttacctgcatggcacctatctctttttttgccatctcagctgccttcaaagtacctcttatcacagtaaccaactctaaagttttactggttcttttttatcccatcaattcttgtgccaatccatttctgtatgcaatattcactaagacattccaaagagatttctttcttttgctgagcaaatttggctgctgtaaacgtcgggctgatcctctttatagaaggaaagatttttcagcttacacctccaactgcaaaaatggcttcactggatcaaataagccttctcaatccaccttgaagttgtccacattgcactgtcaaggtacagctctcctagacaagactcgctacacagagtgttaactgttacatcagtaactgcattattgaattgttcttaaacctgtaaaaaaaaattacctgtaccagtaattttaacataaagggttggatttaggaaattatttatttttaggtacattaggcaagagacctctaccagtagaaagtgtagtgtgtagtctatgaccactgccacactaaaaactattgtcattgttacattggcataaatactgaagttgagagtgttttttatagaaattttgacacagtaattttgtttgatgaatcttttaaaaaactgaggaggtattttgcatatcttttttttcattttcgtaatttgtattgcattctataaaaatattagttcataacagatcagaaatttaaaataactggcctttttcctcaggtagtttgaaaaacacactctagagatgcactgtccaatccggtagccactagcacatgtggctaaattaaaattaaataaaatgagaaatgtagtttctcagttgcactagccacgtttcaagttctcaatggctacgtgtgactagtgcttaccatactggacagcacagacacagaatattttcatcaccacagaaagttctatctgttctattatagagacttttatctatgccctatctggattctacttatttataatttaaggtaaacatctgaaagcacatttcagcctatttgcttagtgaaacattaagctgtagactgtaaactcctcgtgagtaggaaccctgtctcagtgcattttgttttcctgcttcctacctcaagatcttggcaatggtacactacaaatgtgctgagttagaattactctgaagttatgaaacatataatgaaaacaattttttctagagcttatatttttatttgaatgaaataaaatgtttaaaatatttaaaaataaaaaaaaaa

SEQ ID NO: 1564 - DNA, 1400 bp, Homo sapiens; identical to SEQ ID NO: 1563

SEQ ID NO: 1565 - DNA, 1400 bp, Homo sapiens
atatttataatcaacacgtgggttaacatgtttttttgaaatccaagcaatacacaggaaatttaagtagaataaaaattgcagcccatttttgaaatgtcagcatgtgctgtgttcagttcaggtttttgttgtttgttttgttattttttaactaataagttggttatcagtggtgggttttcaaaatgtacttgttctaataagttgtacaatgaactaaatcagtggcattctctagataatgtgggggaaggttagaatattttctggccttctatggggtagcaacccagaatcaatctgaattagtcctgttttggtggagtttgtacattttaaatcctataacaaaaataatctagttttcatttccttactagctagatgcgaatttgtctttttgaatgaccctgtcaataagccagaaagggcaacccagaaaaagtgctccccacatccttctgagacttggcctgtgtgtgtggacgagaagccattcaccgtaagggtgcagaaagctcgaccaagccgaattgcaaacaacgttcgttctatttttaaatgtacaggttcgatcgtttctatagaaatgggtttatctaagaaaagtcttggtttgtcttgctgctgtaaaaggcctttccaaacccctccttttattcctgtttcccgaaataaggtatttgtagagttaaggacctactgcatgcctgtccccagggccccggtggaaggaaggcagcgcctgctcttccttgactcagcccatcatctgaaaattcagaagtgaaccaagggttagacgccagaggttgggcttctgttagagtggcttcaaaacatgagccttatgggaagtagccttaaaaaaagaatgggtatacgcagtgacttccgatggaaatctccaaaacaatattcctaagtagcaatggggttggctcaagtctttattaacaaagaacattctctttcatctataaagaaattcttaaagatgcattgacagtgttgaattaccaacagcctgtgaagatcagtttgaccggtgtggacacgtgctggttaagcactcaggcctacgtgggccgagcgggatcttgatcatggggctggtgtatggatccaccgtcggattccgtctgcagaggaggacgtagggggccgtcacacccaccaggcctccctgctgtgctttaacacaggcagaagaggttcatggcaatataatagtcaatgaactttcagtttaaattgtgtacatttttaaattgtaagatttttactgtatattgatgcatagtgtgattcaataaattgcttgtaatttaaaaactatttaatattcaaaataaatatagttatatatttataaaaaaaaaaaaaaaaaactcgag

SEQ ID NO: 1566 - DNA, 326 bp, Homo sapiens
gggctggcagcccggttggagcctccggagcagaggaagaagaccatcttggcacccccaactatgtggctccagaagtgctgctgagacagggccacggccctgaggcggatgtatggtcactgggctgtgtcatgtacacgctgctctgcgggaccctccctttgagacggctgacctgaaggagacgtaccgctgcatcaagaaggttcactacaacggtgcctgccagctcttaatgcctgcccgagtccttggccgcaatccttcgggccttaacccgagaaccggccctctattgacagatccttgcggcaattaacttt

SEQ ID NO: 1567 - DNA, 257 bp, Homo sapiens
ccgcaagacacctcctggagggcctcctgagaaggacaggcaaagggctgggccaaggatgacttcatggagattaagagtcatgtttcttctccttaattaactgggatgatctcattaataagaagattactcccccttttacccaaatgtgagtgggcccaacgcctacggactttgccccgagtttacgaagagccttccccaatccattggaagtcccctgaaaggtcctatacaagtcagttaaggaagtt

SEQ ID NO: 1568 - DNA, 257 bp, Homo sapiens; identical to SEQ ID NO: 1567

SEQ ID NO: 1569 - DNA, 268 bp, Homo sapiens
gggaagtggccagtttggagtggtcagctgggcaagtggaaggggcagtatgatgttgctgttaagatgatcaaggagggctccatgtcagaagatgaatttttcaggaggcccagactatatgaaactcagccatcccaagctggttaaattctatggagtgtgttaaaggattaccccatatacatgtgactaatatatagcaatgcttgcttttctgaattacctggggagtcacggaaaaaggacttttaacccttcccgcttg

SEQ ID NO: 1570 - DNA, 268 bp, Homo sapiens; identical to SEQ ID NO: 1569

SEQ ID NO: 1571 - DNA, 195 bp, Homo sapiens
gcggggaatgactccctatcctggggtccagaaccatgagatgtatgatatcttctccatggccacaggttgaagcagcccgaagactgcctggtgaactgtatgaaataatgtactcttgctggagaaccgatcccttagaccgccccaccttttcatattgaggctgcagctagaaaaactcttagaaagttt

SEQ ID NO: 1572 - DNA, 156 bp, Homo sapiens
gtagatttgactctgttgttttctctcgtagttcccaaactcatggaagtctgtttttatcaatatgatgtaaagtctgaaatatacagctttggaatcgtcctctgggaaatcgccactggagatatcccgtttcaaggctgtaattctgagaag

SEQ ID NO: 1573 - DNA, 198 bp, Homo sapiens
ttttctttgtgtttttttttgttccagtttattttaaatgcatattttagttgattgcttttttaaaaagccccctctggcctcctgattccagctagtgtcagcagtgggatacctgcgcttgaaggacatcatccaccgtgacatcaaggatgagaacatcgtgatcgccgaggacttcacaatcaagctgatagt

SEQ ID NO: 1574 - DNA, 198 bp, Homo sapiens; identical to SEQ ID NO: 1573

SEQ ID NO: 1575 - DNA, 405 bp, Homo sapiens
gagaacggccctactgggacatgaacgagcaggaggtactaaatgcaatagagcaagagttccggctgcccccacctccagggtgcccccctggactacatctactgatgctagacacttggcagaaggaccgtgcccgtcggcctcattttgaccagctggtagctgcatttgacaagatgattcgcaagcctgatactctccaggctgaagggggctccggggacaggccttcccaggctcttctgaaccctgtggccttggacttcccttgcctggactctccccaggcctggctttcagccattggactagagtgctaccaggacaacttctccaagtttggtctttccaccttcagtgatgtggctcagctcagcctggaagacctgccaggcctgggca

SEQ ID NO: 1576 - DNA, 1400 bp, Homo sapiens
ggttggaagacggcttccctaaccaggccctgcgggagattaaggctctgcaggaratggaggacaatcagtatgtggtacaactgaaggctgtgttcccacacggtggaggctttgtgctggcctttgagttcatgctgtcggatctggccgaggtggtgcgccatgcccagaggccactagcccaggcacaggtcaagagctacctgcagatgctgctcaagggtgtcgccttctgccatgccaacaacattgtacatcgggacctgaaacctgccaacctgctcatcagcgcctcaggccagctcaagatagcggactttggcctggctcgagtcttttccccagacggcagccgcctctacacacaccaggtggccaccaggagctcactgagctgccggactacaacaagatctcctttaaggagcaggtgcccatgcccctggaggakgtgctgcctgacgtctctccccaggcattggatctgctgggtcaattccttctctaccctcctcaccagcgcatcgcagcttccaaggctctcctccatcagtacttcttcacagctcccctgcctgcccatccatctgagctgccgattcctcagcgtctagggggacctgcccccaaggcccatccagggcccccccacatccatgacttccacgtggaccggcctcttgaggartcgctgttgaacccararctgattcggcccttcatcctggargggtgagaagttggccctggtcccgtctgcctgctcctcaggaccactcagtccacctgttcctctgccacctgcctggcttcaccctccaaggcctccccatggccacagtgggcccacaccacaccctgccccttagcccttgcgaaggttggtctcgargcagargtcatgttcccagccaagagtatgagaacatccagtcgagcagaggagattcatggcctgtsctcggtgagccttaccttctgtgtgcttcacatcactgagcactcatttagaagtgagggagacagaagtctagscccagggatggctccagttggggatccagcaggagaccctctgcacatgaggctggtttmccaacatctactccctcaggatgagcgtgagccagaagcagctgtgtatttaaggaaacaagcgttcctggaattaatttataaatttaataaatcccaatataatcccagctagtgctttttccttattataatttgataaggtgattataaaagatacatggaaggaagtggaaccagatgcagaagaggaaatgatggaaggacttatggtatcagataccaatatttaaaagtttgtataataataaagagtatgattgtggttcaaggataaaaaaaaaaaaaaaaaaaaaactcga

SEQ ID NO: 1577 - DNA, 1400 bp, Homo sapiens; identical to SEQ ID NO: 1576

SEQ ID NO: 1578 - DNA, 1400 bp, Homo sapiens
gcagccgcctctacacacaccaggtggccaccaggagctcactgagctgccggactacaacaagatctcctttaaggagcaggtgcccatgcccctggaggaggtgctgcctgacgtctctccccaggcattggatctgctgggtcaattccttctctaccctcctcaccagcgcatcgcagcttccaaggctctcctccatcagtacttcttcacagctcccctgcctgcccatccatctgagctgccgattcctcagcgtctagggggacctgcccccaaggcccatccagggcccccccacatccatgacttccacgtggaccggcctcttgaggagtcgctgttgaacccagagctgattcggcccttcatcctggaggggtgagaagttggccctggtcccgtctgcctgctcctcaggaccactcagtccacctgttcctctgccacctgcctggcttcaccctccaaggcctccccatggccacagtgggcccacaccacaccctgccccttagcccttgcgarggttggtctcgaggcagaggtcatgttcccagccaagagtatgagaacatccagtcgagcagaggagattcatggcctgtgctcggtgagccttaccttctgtgtgctactgacgtacccatcaggacagtgagytctgctgccagtcaaggcctgcatatgcagaatgacgatgcctgccttggtgctgcttccccgagtgctgcctcctggtcaaggagaagtgcagagagtaaggtgtccttatgttggaaactcaagtggaaggaagatttggtttggttttattctcagagccattaaacactagttcagtatgtgagatatagattctaaaaacctcaggtggctctgccttatgtctgttcctccttcatttctctcaagggaaatggctaaggtggcattgtctcatggctctcgtttttggggtcatggggagggtagcaccaggcatagccacttttgccctgagggactcctgtgtgcttcacatcactgagcactcatttagaagtgagggagacagaagtctaggcccagggatggctccagttggggatccagcaggagaccctctgcacatgaggctggtttaccaacatctactccctcaggatgagcgtgagccagaagcagctgtgtatttaaggaaacaagcgttcctggaattaatttataaatttaataaatcccaatataatcccagctagtgctttttccttattataatttgataaggtgattataaaagatacatggaaggaagtggaaccagatgcagaagaggaaatgatggaaggacttatggtatcagataccaatatttaaaagtttgtataataataaagagtatgattgtggttcaa

SEQ ID NO: 1579 - DNA, 1400 bp, Homo sapiens; identical to SEQ ID NO: 1578

SEQ ID NO: 1580 - DNA, 1091 bp, Homo sapiens
  misc_feature (1082)..(1082): n is a, c, g, or t
atattgatgatgtagtaaggtttttggattcaaagcataaaaaccattacaagatatacaatctttgtgctgaaagacattatgacaccgccaaatttaattgcagagttgcacaatatccttttgaagaccataacccaccacagctagaacttatcaaacccttttgtgaagatcttgaccaatggctaagtgaagatgacaatcatgttgcagcaattcactgtaaagctggaaagggacgaactggtgtaatgatatgtgcatatttattacatcggggcaaatttttaaaggcacaagaggccctagatttctatggggaagtaaggaccagagacaaaaagggagtaactattcccagtcagaggcgctatgtgtattattatagctacctgttaaagaatcatctggattatagaccagtggcactgttgtttcacaagatgatgtttgaaactattccaatgttcagtggcggaacttgcaatcctcagtttgtggtctgccagctaaaggtgaagatatattcctccaattcaggacccacacgacgggaagacaagttcatgtactttgagttccctcagccgttacctgtgtgtggtgatatcaaagtagagttcttccacaaacagaacaagatgctaaaaaaggacaaaatgtttcacttttgggtaaatacacaagaaatcgatagcatttgcagtatagagcgtgcagataatgacaaggaatatctagtacttactttaacaaaaaatgatcttgacaaagcaaataaagacaaagccaaccgatacttttctccaaattttaaggtgaagctgtacttcacaaaaacagtagaggagccgtcaaatccagaggctagcagttcaacttctgtaacaccagatgttagtgacaatgaacctgatcattatagatattctgacaccactgactctgatccagagaatgaaccttttgatgaagatcagcatacacaaattacaaaagtctgaatttttttttatcaagagggataaaacaccatgaaaataaacttgaataaactgaaaaaaaaaaaaaaaaaaagntgcggccgc

SEQ ID NO: 1581 - DNA, 1091 bp, Homo sapiens; identical to SEQ ID NO: 1580
  misc_feature (1082)..(1082): n is a, c, g, or t

SEQ ID NO: 1582 - DNA, 1400 bp, Homo sapiens
  misc_feature (677)..(677): n is a, c, g, or t
ccaaaagcagccctcagaagaccaggaagagccctcaggtgaccaggggtagccctcagaagaccagctgtagccctcagaagaccaggcagagccctcagacgctgaagcggagccgagtgaccacctcacttgaagctttgcccacaggacagtgctgacagacaagagtgggcgacagtggaagctgaagtccttccagaccagggacaaccagggcattctctatgaagctgcacccacctccaccctcacctgtgactcaggaccacagaagcaaaagttctcactcaaactggatgccaaggatgggcgcttgttcaatgagcagaacttcttccagcgggccgccaagcctctgcaagtcaacaagtggaagaagctgtactcgaccccactgctggccatccctacctgcatgggtttcggtgttcaccaggacaaatacaggttcttggtgttacccagcctggggaggagccttcagtcggccctggatgtcagcccaaagcatgtgctgtgcagagaggtctgtgctgcaggtggcctgccggctgctggatgccctggagttcctccatgagaatgagtatgttcatggaaatgtgacagctgaaaatatctttgtggatccagaggaccagagtcaggtgactttggcaggctatggcttcgcnttccgctattgcccaagtggcaaacacgtggcctacgtggaaggcagcaggagccytcacgagggggaccttgagtttcattagcatggacctgcacaagggatgcgggccctcccgccgcrgygacctccagagcctgggytamtgcatgctgaagtggytctamgggtttctgccatggacaaattgccttccaamamtgaggacatcatgaagcaaaaacagaagttgccttgggattcattttaatgtaagctkgactttgtcatgccagaaacaaggctcggtcaccgtcagcagtttgcagttttccacctccwcccagttcctccgtgtggttgacccagatatctccgttatgcagccgcctccgggggaccacctccctccctttgagtcagccacagacagcctacttgacggccccgctggcccccacattccactgaactgtgcggatgccacagtgaccccctctcaggcacagcatgacctcctgaagtcgagcctgcttgctttgaacctaccagttaaaatctcctcaaaatgtttggataccgcccattggcccctcacagccacgagctccctgaccagtgtgcgtgtgtgtgtgtgtgtgtgtctgtgtgtgtgcttgggacgggtggggaggtcacctttgggtgtgcggtgtgcccccaggacctgtaagtaataaaatctttatttccaaaaaaaaaaaaa

SEQ ID NO: 1583 - DNA, 1400 bp, Homo sapiens; identical to SEQ ID NO: 1582
  misc_feature (677)..(677): n is a, c, g, or t

SEQ ID NO: 1584 - DNA, 382 bp, Homo sapiens
aaaataattcttttatttgcagtttacgtatgatcttaatttcaaaacgatttctttgtttttggcttgatttttcacaatgttgcaaatatcaggctcccagggtttaatgtggaattgaagtctgcagccaggccttgcaaattgaaggtaactggggcaaatgccattgaaaccgctagtcttatttcctttctacttttctttggcactcttactgcctgtaaggagtagaactgttaaggcacactgttgctatacagttaactcccattttcatgttttgtctttcttttcccatttctggggcttacctcctgatacctgcttactttctggaagtagtgggcaagtaagatttggctcttggtttctggaattc

SEQ ID NO: 1585 - DNA, 382 bp, Homo sapiens; identical to SEQ ID NO: 1584

SEQ ID NO: 1586 - DNA, 1400 bp, Homo sapiens
gggggcactcttttaaacgggaagaaaatttccgcttcctggtcttatcatggacaatttgggctagaggcaggaaggaagtgggatgacctcaggaagtcaccttttcttgattccagaaacatatgggctgataaacccggggtgacctcatgaaatgagttgcagcagaagtttatttttttcagaacaagtgatgtttgatggacctctgaatctctttagggagacacagatggctgggatccctcccctgtacccttctcactgccaggagaactacgtgtgaaggtattcaaggcagggagtatacattgctgtttcctgttgggcaatgctccttgaccacattttgggaagagtggatgttatcattgagaaaacaatgtgtctggaattaatggggttcttataaagaaggttcccagaaaagaatgttcattccagcttcttcaggaaacaggaacattcaaggaaaaggacaatcaggatgtcatcagggaaatgaaaataaaaaccacaatgagatatcaccttataccaggtagatggctactataaaaaaatgaagtgtcatcaaggatatagagaaattggaacccttcttcactgctggagggaatggaaaatggtgtagccgttatgaaaaacagtacggaggtttctcaaaaattaaaaatagaactgctatatgatccagcaatctcacttctgtatatatacccaaaataattgaaatcagaatttcaagaaaatatttacactcccatgttcattgtggcactcttcacaatcactgtttccaaagttatggaaacaacccaaatttccattggaaaataaatggacaaaggaaatgtgcatataacgtacaatggggatattattcagcctaaaaaaaggggggatcctgttatttatgacaacatgaataaacccggaggccattatgctatgtaaaatgagcaagtaacagaaagacaaatactgcctgatttcatttatatgaggttctaaaatagtcaaactcatagaagcagagaatagaacagtggttcctagggaaaaggaggaagggagaaatgaggaaatagggagttgtctaattggtataaaattatagtatgcaagatgaattagctctaaagatcagctgtatagcagagttcgtataatgaacaatactgtattatgcacttaacattttgttaagagggtacctctcatgttaagtgttcttaccatatacatatacacaaggaagcttttggaggtgatggatatatttattaccttgattgtggtgatggtttgacaggtatgtgactatgtctaaactcatcaaattgtatacattaaatatatgcagttttataatatcaaaaaaaaaaaaaaaaaaa

SEQ ID NO: 1587 - DNA, 1400 bp, Homo sapiens; identical to SEQ ID NO: 1586

SEQ ID NO: 1588 - DNA, 1400 bp, Homo sapiens
tcggcgtcccccagtctccaggagcctctccctccgagatacccacccagctttgtcaatcacccaagcactttatgcatatagagacagaacctggacctcaccagggactgctgggcagcgattcctggcagtggcctggtgtttgtacatacacatatgcagacacatgccagggccccccaagcccgagcaccggaccacgttgctgcccaggtctggacctcagcgggagaactggctccggggggagtggggccctgcgctagaggcagaggcagttctttgttcaagcgttcctctggggaccggcagcagaggcaccgtgttctctcagccctggatacgtcttgtaatctttcacactttattcctaaaacgtgtcttatttttatgcagctcattttttctttaaaggagaaaacttgtaggtgtttaagaattggttttgggagggcgaggactgggccaggttagaggcagatggcacaggggcgtgtggcgggcgggtgaggctgctttgcacacctgtgttggtggctgtcccctgccgcccctccctgtggcagcagcaggacaggtgtgtgcccagcaccctccctacctgggcctggaagcagatgaggggaatacttcatgcaaagaaaaaagtaacatgtgcaaaagctccccgtccagctttgacagtcagttttgatgtcagctcctcggcagggtaggcctgatgacagccctgtccctccctgcctccgccttgcccaaggccacggagggcgtctgcagagaggcctgccttccggattccaggcgggcatgccctgcaaaccccgcctgggcctcccttggtctgcccagccctcggttagccctgcctgaatcagtagatacttgaacgagtccccagtctgcgggaggcagtggtggggccatggacccatgcggggggttccagggtcacacgccacataacagacaaaaatacacacacgtgtgtttttctttgcaatacttgaaatattgccactgtgcttggacttagaagaagaaaatccccgtgacttcttcctcatcaccttgatggctttattctcaccttgtggggcatgtttgaatttattgcttcatggccgactggaatcctgagtcctgggaagctggcactgcggggatcttgcccggtgtcctggtcctcttgcttccgtcgcggccgcatgtgcgtgtgtccaagcaggtcctgggcgcctcaactgctgcccctggttgaatgttctcttgatagtgctggaccctttgtctattttaaagcgaattttgtgtgatttcctgccctttgcgttatattgtataataccaacgtaaggaaataaacctttggaattgttgaaaaaaaaaaaaaaaaa

SEQ ID NO: 1589 - DNA, 600 bp, Homo sapiens
gtcacggaactcatgcgcaaggggaacctgcaggccttcctgggcacccccgagggccgggccctgcgtctgccgccactcctgggctttgcctgccaggtggctgagggcatgagctacctggaggagcagcgcgttgtgcaccgggacttggccgcccggaacgtgctcgtggacgacggcctggcctgcaaggtggctgacttcggcctggcccggctgctcaaggacgacatctactccccgagcagcagctccaagatcccggtcaagtggacagcgcctgaggcggccaattatcgtgtcttctcccagaagtcagacgtctggtccttcggcgtcctgctgcacgaggttttcacctatggccagtgtccctatgaagggatgaccaaccacgagacgctgcagcagatcatgcgagggtaccggctgccgcgcccggctgcctgcccggcggaggtctacgtgctcatgctggagtgctggaggagcagccccgaggaacggccctcctttgccacgctgcgggagaagctgcacgccatccacagatgccacccctgagtcctcacgtgacccaacgctctgggctccagc

SEQ ID NO: 1590 - DNA, 600 bp, Homo sapiens; identical to SEQ ID NO: 1589

SEQ ID NO: 1591 - DNA, 600 bp, Homo sapiens
agcatgattcaatactgaacactatcgacatacctcagaatcctaaagtgggaaccaagaggtatatggctcctgaaatgcttgatgatacaatgaatgtgaatatctttgagtccttcaaacgagctgacatctattctgttggtctggtttactgggaaatagcccggaggtgttcagtcggaggaattgttgaggagtaccaattgccttattatgacatggtgccttcagatccctcgatagaggaaatgagaaaggttgtttgtgaccagaagtttcgaccaagtatcccaaaccagtggcaaagttgtgaagcactccgagtcatggggagaataatgcgtgagtgttggtatgccaacggagcggcccgcctaactgctcttcgtattaagaagactatatctcaactttgtgtcaaagaagactgcaaagcctaatgatgataattatgttaaaaagaaatctctcatagctttcttttccattttcccctttatgtgaatgtttttgccattttttttttgttctacctcaaagataagacagtacagtatttaagtgcccataaggcagcatgaaaagataactctaaag

SEQ ID NO: 1592 - DNA, 600 bp, Homo sapiens; identical to SEQ ID NO: 1591

SEQ ID NO: 1593 - DNA, 406 bp, Homo sapiens
gaattcggccttcatggcctagttctcccttccattctgcccttgtatctttgcagtcattgtatacagcagattctagaaagtgttaatcattgtcacctaaatggcatagttcacagggacctgaaggtcagtatatggagtccataaatctgaatcaaagcagttttatttttttttctggggaaagggcagagggtgggtatttaaaatggttcccttgcctttcccaacttgtttctaaaatgagtaaatgatgaaatgataatgcatgatgcctcttccagtttgctcatctacaggctaaatatacatcatagcaaaaagggaagaatactaaagaatacaacctgctaagtttccaagcagtaaactacctaccaaaagggattgaggatccctcgag

SEQ ID NO: 1594 - DNA, 362 bp, Homo sapiens
gaattcaaatgcttcaggtaaatgttgaagctcggtgtaccgcgggacaaatcctgagtcacccctgggtgtcagatgatgcctcccaggagaataacatgcaagctgaggtgacaggtaaactaaaacagcactttaataatgcgctccccaaacagaacagcactaccaccggggtctccgtcatcatgaacacggctctagataaggaggggcagattttctgcagcaagcactgtcaagacagcggcaggcctgggatggagcccatctctccagttcctccctcagtggaggagatccctgtgcctggggaagcagtcccggcccccacccctccggaatctcccaccccgctcgag

SEQ ID NO: 1595 - DNA, 362 bp, Homo sapiens; identical to SEQ ID NO: 1594

SEQ ID NO: 1596 - DNA, 600 bp, Homo sapiens
aagatgacagtggcgattgtgaaggcgctgtactacctgaaggagaagcacggtgtcatccaccgcgacgtcaagccctccaacatcctgctggacgagcggggccagatcaagctctgcgacttcggcatcagcggccgcctggtggactccaaagccaagacgcggagcgccggctgtgccgcctacatggcacccgagcgcattgaccccccagaccccaccaagccggactatgacatccgggccgacgtatggagcctgggcatctcgttggtggagctggcaacaggacagtttccctacaagaactgcaagacggactttgaggtccttaccaaagtcctacaggaagagcccccgcttctgcccggacacatgggcttctcgggggacttccagtccttcgtcaaagactgccttactaaagatcacaggaagagaccaaagtataataagctacttgaacacagcttcatcaagcgctacgagacgctggaggtggacgtggcgtcctggttcaaggatgtcatggcgaagactgagtcaccgcggactagcggcgtcctgagccagccccacctgcccttcttcaggtag

SEQ ID NO: 1597 - DNA, 600 bp, Homo sapiens; identical to SEQ ID NO: 1596

SEQ ID NO: 1598 - DNA, 1400 bp, Homo sapiens
atttagctttccccacaaataaaccagagaaagatgcaagacatgtagtaaaagtggaatatcaagaaaatggcccgttattttcagaacttaaattttatcagagagttgcaaaaaaagactgtatcaaaaagtggatagaacgcaaacaacttgattatttaggaattcctctgttttatggatctggtctgactgaattcaagggaagaagttacagatttatggtaatggaaagactaggaatagatttacagaagatctcaggccagaatggtacctttaaaaagtcaactgtcctgcaattaggtatccgaatgttggatgtactggaatatatacatgaaaatgaatatgttcatggtgatgtaaaagcagcaaatctacttttgggttacaaaaatccagaccaggtttatcttgcagattatggactttcctacagatattgtcccaatgggaaccacaaacagtatcaggaaaatcctagaaaaggccataatgggacaatagagtttaccagcttggatgcccacaagggagtaggtgaaatagcccaatttttggtatgtgctcatagtttagcatatgatgaaaagccaaactatcaagccctcaagaaaattttgaaccctcatggaatacctttaggaccactggacttttccacaaaaggacagagtataaatgtccatactccaaacagtcaaaaagttgattcacaaaaggctgcaacaaagcaagtcaacaaggcacacaataggttaatcgaaaaaaaagtccacagtgagagaagcgctgagtcctgtgcaacatggaaagtgcagaaagaggagaaactgattggattgatgaacaatgaagcagctcaggaaagcacaaggagaagacagaaatatcaagagtctcaagaacctttgaatgaagtaaacagtttcccacaaaaaatcagctatacacaattcccaaactcattttatgagcctcatcaagattttaccagtccagatatattcaagaagtcaagatctccatcttggtataaatacacttccacagtcagcacggggatcacagacttagaaagttcaactggactttggcctacaatttcccagtttactcttagtgaagagacaaacgcagatgtttattattatcgcatcatcatacctgtccttttgatgttagtatttcttgctttattttttctctgaagatgataccaaaattccttttgataattttttaagtttccagctcttcaccgaaatgttgtattcttatttcagtgtttccttccagacatttttaaggtaattggctttaaaaagagaacatattttaacaaagtttgtggacactctaaaaaataaaattgctttgtactagaaaaaaaa

SEQ ID NO: 1599 - DNA, 1400 bp, Homo sapiens; identical to SEQ ID NO: 1598

SEQ ID NO: 1600 - DNA, 1400 bp, Homo sapiens
cccagagccctgcaactcccactggccaacgatgggggcagccgctcaccatcctcagagagctccccacagcaccctacaccccccacccggccccgccacatgctggggctcccatcaaccttgttcacaccgcgcagtatggagagcatcgagattgaccagaagctgcaggagatcatgaagcagacagggtacctgactatcgggggccagcgttatcaggcagaaatcaatgacttggagaacttgggtgagatgggcagtggtacctgtggtcaggtgtggaagatgcggttccggaagacaggccacatcattgctgttaagcaaatgcggcgctctgggaacaaggaagagaataagcgcattttgatggacctggatgtagtactcaagagccatgactgcccttacatcgttcagtgctttggcaccttcatcaccaacacagacgtctttattgccatggagctcatgggcacatgtgcagagaagctgaagaaacgaatgcagggccccattccagagcgaatcctgggcaagatgactgtggcgattgtgaaagcactgtactatctgaaggagaagcatggcgtcatccatcgcgatgtcaaaccctccaacatcctgctagatgagcggggccagatcaagctctgtgactttggcatcagtggccgccttgttgactccaaagccaaaacacggagtgctggctgtgctgcctatatggctcccgagcgcatcgaccctccagatcccaccaagcctgactatgacatccgagctgatgtgtggagcctgggcatctcactggtggagctggcaacaggacagttcccctataagaactgcaagacggactttgaggtcctcaccaaagtcctacaggaagagcccccactcctgcctggtcacatgggcttctcaggggacttccagtcatttgtcaaagactgccttactaaagatcacaggaagagaccaaagtataataagctacttgaacacagcttcatcatcaagcactatgagatactcgaggtggatgtcgcgtcctggtttaaggatgtcatggcgaagaccgagtccccaaggactagtggagtcctgagtcagcaccatctgcccttcttcagtgggagtctggaggagtctcccacttccccaccttctcccaagtccttccctctgtcaccagccatccctcaggcccaggcagagtgggtctcgggcaggtagggacctggagtggcctggtcccaccctctgacctcctcctcaggccaccagtgttgccctcttccctttttaaaacaaaatacccttgtttgtaaatccttagacgcttgagaataaaacccttcccttttcttccgaaaaaaaaaaaaaaaaaa

SEQ ID NO: 1601 - DNA, 600 bp, Homo sapiens
gaaggaaagaagccagaagttaagaaagtggagaagaagcgagaaacatcaatggattctcgacttcaaaggatacatgctgagattaaaaattcactcaaaattgataatcttgatgtgaacagatgcattgaggccttggatgaacttgcttcacttcaggtcacaatgcaacaagctcagaaacacacagagatgattactacactgaaaaaaatacggcgattcaaagttagtcaggtaatcatggaaaagtctacaatgttgtataacaagtttaagaacatgttcttggttggtgaaggagattccgtgatcacccaagtgctgaataaatctcttgctgaacaaagacagcatgaggaagcgaataaaaccaaagatcaagggaagaaagggccaaacaaaaagctagagaaggaacaaacagggtcaaagactctaaatggaggatctgatgctcaagatggtaatcagccacaacataacggggagagcaatgaagacagcaaagacaaccatgaagccagcacgaagaaaaagccatccagtgaagagagagagactgaaatatctctgaaggattctacactagataac

SEQ ID NO: 1602 - DNA, 600 bp, Homo sapiens; identical to SEQ ID NO: 1601

SEQ ID NO: 1603 - DNA, 600 bp, Homo sapiens
gtggtcgactgggagaccaccaatgtgaccacctctctcacaccacagagcacaaggtcgacagagaaaaccttcaccatcccagtgactgatataaacagtgggatcccaggaattgatgaggtcatgaagactaccaaaatcatcattgggtgttttgtggccatcacactcatggctgcagtgatgctggtcattttctacaagatgaggaagcagcaccatcggcaaaaccatcacgccccaacaaggactgttgaaattattaatgtggatgatgagattacgggagacacacccatggaaagccacctgcccatgcctgctatcgagcatgagcacctaaatcactataactcatacaaatctcccttcaaccacacaacaacagttaacacaataaattcaatacacagttcagtgcatgaaccgttattgatccgaatgaactctaaagacaatgtacaagagactcaaatctaaaacatttacagagttacaaaaaacaaacaatcaaaaaaaaagacagtttattaaaaatgacacaaatgactgggctaaatctactgtttcaaaaaagtgtctttacaaaaaaaaaaa

SEQ ID NO: 1604 - DNA, 600 bp, Homo sapiens
ggaaaaggaggaagaagaagaggaagtggaggagcccagaaaaggaggggaaggaggaaaaaggaggaggagaaggaaaacgaggaggaagaagaggtggggaggaaaaggagcagcagcaggaggcaaatctccatccccacagcaaaagcagtgctggagccagagcccagagtgtgggagctaatgggaatcagcttgctggagggaaggggaccgaattaaggaatggctggggctctgccgctgagagggggctgggaaaagcaggctgattgagaccagctgttgtgcctctgtctctgagatctttggactctgcccaggatagcctcacaccctatcctacacgactaggaacttgcacagtccgcctcgggcagcccaaagctcctctgcccaccctggctcccagagccctccaaaacaaaagaccagagaagcactctccacccagcagccagacgcctccttcttgacgccagcccccaccctctgtctgctcgagcccaggaaaggcctgaaggaagaggccggggaaagagccctccctctctcccttgtccctccatccacccagcgccggcatctggagaccct

SEQ ID NO: 1605 - DNA, 738 bp, Homo sapiens
ctcccgcggccccggccccggccccggccccggccccggcggcacaggctgtcggctggcccatctgcagggacgcgtacgagctgcaggaggttatcggcagtggagctactgctgtggttcaggcagccctatgcaaacccaggcaagaacgtgtagcaataaaacggatcaacttggaaaaatgccagaccagtatggatgaactacttcttgtgccgtgaacctcgttttgagattaagaaactccagaaaggaacttaatgacatacgatttgagtttactccaggaagagatacagcagatggtgtatctcaggagctcttctctgctggcttggtggatggtcacgatgtagttatagtggctgctaatttacagaagattgtagatgatcccaaagctttaaaaacattgacatttaagttggcttctggctgtgatgggtcggagattcctgatgaagtgaagctgattgggtttgctcagttgagtgtcagctgatgtatgtcccttgatgtcaccctgatctgtcatgccccaccgccacccctactccttcaaccctccctctttctgcccatttcctcccaccccctcactcccatttcctagcaaaatcagaagattgtgaagaggccggcttcaacaaaatgggataaaaaaataattttttaaaacttaaaaaaaaaaaaaaaaaaaaaaaaaaaaaaaaaaaaaaaaaaaaaaaaaaaaaa

SEQ ID NO: 1606 - DNA, 738 bp, Homo sapiens; identical to SEQ ID NO: 1605

SEQ ID NO: 1607 - DNA, 600 bp, Homo sapiens
aaccatgtgggagatcattactcgggggcagaccccctacacagggctggagaacgccgagatctacgactatttaatcggcggaaaccggctgaaacaacctgcagactgtgtggaagatgtgtacgaactcatgtacaactgttggaccggggagccacgccagagaccctctttctcctgtttgcgggtggagttagagaatatgctgggccaactggccattctgacttctagtcaggaacccctgtatctcaacatcgaccgcgccgaggagccggtggagcctagcgctggcgccccccccgctgggcaggatccctacggcggcagtggagatggcgccacggtgagcggaatggccgccggaaccactgagtgtcggtacctcgtgtcccccgccggaattggcgatcagccctctgagagtgagcaccaacgggatacccccattgccgagacacaagacgacggtgtaatctcccatccagcctcataaccacacggggacttttccacattgtggttccactggaagtctccaggagagagggaacctctttttagggttgagggggtttaatatccaccccggaattc

SEQ ID NO: 1608 - DNA, 600 bp, Homo sapiens; identical to SEQ ID NO: 1607

SEQ ID NO: 1609 - DNA, 600 bp, Homo sapiens
aaggacttgaaaatcaaagcccatgtcaatgtctccatggatacagggcccttttttgcaggcgatgctgacaagcttctgcacatccggatagaagattccccggaagcccagattcttcccttcttacgccacatgtgtcacttcattgaaattcaccatcaccttggctctgtcattctgatcttttccacccagggtatcagccgcagttgtgccgccatcatagcctacctcatgcatagtaacgagcagaccttgcagaggtcctgggcctatgtcaagaagtgcaaaaacaacatgtgtccaaatcggggattggtgagccagctgctggaatgggagaagactatccttggagattccatcacaaacatcatggatccgctctactgatcttctccgaggcccaccgaagggtactgaagagcctcacctgggggcattttgtgggtggagggccagagtgtgtatacccaggcttgtctggaaggagaaggcctttgctgcctgaaagtcwmaaaaaaaaaaaaaaaaackcgagggggggcccggtacccagcttttgttccctttagtgagggttaatttgcgcgtccg

SEQ ID NO: 1610 - DNA, 600 bp, Homo sapiens; identical to SEQ ID NO: 1609

SEQ ID NO: 1611 - DNA, 600 bp, Homo sapiens
cttcagatttttgtgttagatcaggttctgccttcccttcacttcatgcccatgtctactattttgccagtgactagtccatgtcttcctgcaacaggtgtgacagtttgggagttgatgaccttcggggcagagccctatgcagggctacgattggctgaagtaccagacctgctagagaagggggagcggttggcacagccccagatctgcacaattgatgtctacatggtgatggtcaagtgtgagttacctgctgagcccaaccattttctctttttttctttttttttcttttttttttttttttgagacagagtctcacaattgtcacccaggctggagtgcaatggtgcaatcaatcttggctcactacaacctccgcctctcgggttcaagagattctcctgcttcagctccggagtagctgggattacagcgcccgccacacctggataactgttacacttttagtagagatggggtttcaccatgttggccaggctggtctcaaactcctgacctcaggtgatccgcctgcctcagcttcccaaagtgctgggattacaggtgtgagccatcatgctcgcctgactgcag

SEQ ID NO: 1612 - DNA, 600 bp, Homo sapiens
gtgcccatcccaccgagcccagacaccaaggaccggtggcgcagcatgactgtggtgccgtacttggaggacctgcacggcgcggacgaggacgaggacctcttcgacatcgaggatgacatcatctacactcaggacttcacggtgcccggtgagtctggcgggggcccctgcccggctctgctgactcggccaggatgtcccacgggagcagggtgcctgcctgtctgcaacaaggacagcttctgccctctggtggccaatcccacgtccccaaagcctccagcccacctgcaggctgcctccgccctgcgggccgctgggacatggctgaaaggtgtggggtcagcgggggcaccagcccaggcctgtctggccaggagggttcctcaggcgtctctccgggtgctgcccagccaggcaccacccaccggccttggcctgagtcccagcaggagcaggcgggggagccccagggtcgggggagggtaggtgagagtcagggtgcagggtggcccctcagacagctggcatgagagagggtccagtggccctccctcccgtcgtccctgaggcctgcccgctggccctgatgccggc

SEQ ID NO: 1613 - DNA, 600 bp, Homo sapiens; identical to SEQ ID NO: 1612

SEQ ID NO: 1614 - DNA, 301 bp, Homo sapiens
ctctggcagagttctttaaaacacaccagccataaaacaagttaaacgttttttgtttttgtttttgtttttttcttactaggtcatgttcacggaggaggatgtcaagttctacctggctgagctggccttggctttagaccatctccacagcctggggatcatctacagagatctgaagcctgagaagtaagtgagaaaaaactagggctgacttccccacgcccatcagctccatgtattttcctggcccatgttggtagccactgctagatatttatttcctaaatgaggacatatc

SEQ ID NO: 1615 - DNA, 600 bp, Homo sapiens
cataccatcgcagacttctggcagatggtgtgggagagcggctgcaccgtcatcgtcatgctgaccccgctggtggaggatggtgtcaagcagtgtgaccgctactggccagatgagggtgcctccctctaccacgtatatgaggtgaacctggtgtcggagcacatctggtgcgaggactttctggtgcggagcttctacctgaagaacgtgcagacccaggagacgcgcacgctcacgcagttccacttcctcagctggccggcagagggcacaccggcctccacgcggcccctgctggacttccgcaggaaggtgaacaagtgctaccggggccgctcctgccccatcatcgtgcactgcagtgatggtgcggggaggaccggcacctacatcctcatcgacatggtcctgaaccgcatggcaaaaggagtgaaggagattgacatcgctgccaccctggagcatgtccgtgaccagcggcctggccttgtccgctctaaggaccagtttgaatttgccctgacagccgtggcggaggaagtgaatgccatcctcaaggccctgccccagcaccatcaccatcaccattaaggatcc

SEQ ID NO: 1616 - DNA, 600 bp, Homo sapiens; identical to SEQ ID NO: 1615

SEQ ID NO: 1617 - DNA, 1400 bp, Homo sapiens
aaaatctgtattccccctattgctgaaatgtaacagacactacaaattttgtattctttttttgttttttgttttgagacagggtctcactctgtcacccaggctggagggcagtggcgcttcacagctcactgcatcctcaaccttgggggctcacgcagtcctcccgcctcagcctcccaagtagctgggcatgcgccaccaagcccagctaatttttgtatctttagtagagatggggtttcgccatgttgcccaggttggtgtggaattcctgggctccagttatatgcccacctcagcctcccaaagtgctgggattacagacgtgacccaccgcgcctggcgcaaatatgtattcttttaaaatttcctctgatactataagctttttgcatttatctgaagcagtatacatgcctttggtatcagcaattttaacagtttggatatacttatcagctatcttattccaaaactacatctacttcttccagtatagaatctggtgcttcctgaccaaaaagatgagaaaaacaatgttaaaaatatagatgctttccattgaaatggagtgaaaacattggttctatatgttttcttttaaaataattttcttattaaaaacttgctgtctttattatacttaccctttttatgcatatcaatagtatttataagatgtgttctataattatgtaattgtagatactgttatgcattgtccagtgacatcataaggcaggccctactgctgtatcttttctaccttcttatttgtaatagaaactatagaatgtatgactaaaaagtcactttgagattgacttttttaaaaagttattaccttctgctgttgcaaagtgcaaaactgtgagtggaattgttttattctgacttaatgtgttagaaattagagaatacagtgggaggatttttagacattgctgctgctgttacccaaggtattttagataaaaaatttttaataaacatccctttggtatttaaagtggaacatttagcctgttcattttaatctaaagcaaaaagtaatttgggtcaaaatattggtatatttgtaaagcgccttaatatatccctttgtggaaggcactacacagtttacttttatattgtattgtgtatataagtattttgtattaaaattgaatcagtggcaacattaaagttttataaaatcatgctttgttagaaaaagaattacagctttgcaatataactaattgtttcgcataattctgaatgtaatagatatgaataatcagcctgtgtttttaatgaacttatttgtattttcccaatcattttctctagtgtaatgtttgctgggataataaaaaaaattcaaatctttcgaaaaaaaaaaaaaaaaaaaa

SEQ ID NO: 1618 - DNA, 1400 bp, Homo sapiens; identical to SEQ ID NO: 1617

SEQ ID NO: 1619 - DNA, 600 bp, Homo sapiens
tttttatttctttttatttatttatttttgagacacagtctcactctgtcgcccaggctggagtgcagtggtgcgatctcggctcactgcaacctccgcctcctgggttgaagcgattctcctgcctcagcctcccgagtagctgggactgcaggcgcccgccaccacgcccggctaattttttgtatttttagtagagacggggtttcaccgtgttagccaggatggtctcgatctcctgactcgccatctgcccgccttggcctcccaaactgctgggattacaggcgtgagccgcccagcatytttttttttttgagtcggagtcttgctctgtcgcccgggctgcagtgcagtggcgcgatctcagttcactgcaagctccacctcccgggttcaggcagttctgcctcagcctcccgagtagccgggactacgggcgcgcaccaccacgccctgctaatttttgtttttagtaraggcgggatttcgccgtattggccaggctgatttcaaacgcctgacctcaggtgatccgcccgcctcggcctcccgaaktgctgggattacaggctgaggcacggtacggggacctcatct

SEQ ID NO: 1620 - DNA, 600 bp, Homo sapiens
ggagcctcccgtgggagcagtgtggagagcttgcccccaacctctgagggcaagaggatgagtgctgacatgtctgaaatagaagctaggatcgccgcaaccacagcctattccaagcctaaacggggccaccgtaaaactgcttcatttggcaacattctggatgtccctgagatcgtcatatcaggcaacggacagccaagacgtagatccatccaagacttgactgtaactggaacagaacctggtcaggtgagcagtaggtcatccagtcccagtgtcagaatgattactacctcaggaccaacctcagaaaagccaactcgaagtcatccatggacccctgatgattccacagataccaatggatcagataactccatcccaatggcttatcttacactggatcaccaactacagcaagaactagttgcagaactggaccaggatgaaaaggaccagcaaaatacatctcgcctggtacaggaacataaaaagcttttagatgaaaacaaaggcctttctacttactaccagcaatgcaaaaaacaactagaggtcatcagaagtcagcagcagaaacgacaaggcacttcatga

SEQ ID NO: 1621 - DNA, 600 bp, Homo sapiens; identical to SEQ ID NO: 1620

SEQ ID NO: 1622 - DNA, 600 bp, Homo sapiens
aattatcctgcctcagcctcccaagtatttgggattacaggcgtgttccaccacacctggctaattttttgtatttttagtagagacggggtttcgccatgttggccaggctggtctcgaaatcctgacctcagatgatccacccgccttggcctcccaaagtgctgggattacaggcgcgagccaccgcgcctggcccaatgtatttggattcttaaagaacactttcaaattaaatatcagttgaagagaactagaactaaagaatttctgtgtcaaactgtttagcaaatgtaagtagaagctgggagatgtgtcctggaatgaatgaatacatcagtaaaataccatacgtatgttatgatgttattgtttccttgccttggttgatttggttttactgtgaaataattttcaatatagaattgtgatcgttggaatttggtcatctactagaaaatgagaaagaagttaatagctatcttccttaaagatttctgaggttgggattaaggtagtgttcccaaggtgttctaaaacggcagcgagagctgtgcactcacttcacaaatttgaattcctgctctgtgttaggcgctg

SEQ ID NO: 1623 - DNA, 600 bp, Homo sapiens; identical to SEQ ID NO: 1622

SEQ ID NO: 1624 - DNA, 280 bp, Homo sapiens
  misc_feature (124)..(125): n is a, c, g, or t
  misc_feature (137)..(137): n is a, c, g, or t
  misc_feature (146)..(146): n is a, c, g, or t
  misc_feature (154)..(154): n is a, c, g, or t
  misc_feature (156)..(156): n is a, c, g, or t
  misc_feature (159)..(159): n is a, c, g, or t
  misc_feature (161)..(161): n is a, c, g, or t
  misc_feature (163)..(163): n is a, c, g, or t
  misc_feature (174)..(174): n is a, c, g, or t
  misc_feature (177)..(177): n is a, c, g, or t
  misc_feature (181)..(181): n is a, c, g, or t
  misc_feature (185)..(185): n is a, c, g, or t
  misc_feature (188)..(188): n is a, c, g, or t
  misc_feature (190)..(191): n is a, c, g, or t
  misc_feature (196)..(196): n is a, c, g, or t
  misc_feature (198)..(198): n is a, c, g, or t
  misc_feature (203)..(203): n is a, c, g, or t
  misc_feature (212)..(212): n is a, c, g, or t
  misc_feature (214)..(215): n is a, c, g, or t
  misc_feature (218)..(219): n is a, c, g, or t
  misc_feature (221)..(223): n is a, c, g, or t
  misc_feature (225)..(226): n is a, c, g, or t
  misc_feature (228)..(230): n is a, c, g, or t
  misc_feature (238)..(238): n is a, c, g, or t
  misc_feature (240)..(240): n is a, c, g, or t
  misc_feature (242)..(243): n is a, c, g, or t
  misc_feature (246)..(246): n is a, c, g, or t
  misc_feature (250)..(250): n is a, c, g, or t
  misc_feature (254)..(257): n is a, c, g, or t
  misc_feature (260)..(260): n is a, c, g, or t
  misc_feature (264)..(264): n is a, c, g, or t
  misc_feature (266)..(268): n is a, c, g, or t
  misc_feature (274)..(274): n is a, c, g, or t
attcgaacatatgcagttattccactaaatgatgaatgtgggattattgaatgggtgaacaacactgctggtttgagacctattctgaccaaactatataaagaaaagggagtggatatgacannaaaagaactttnccagtgctnctacctcngnctncngntttatctgaanagntggnagtntcncnngatangncctgntttgcatcntnntanngnnntnnannngccctttncntnntgnttgncggnnnngcnttgncnnnagtcanccgctg

SEQ ID NO: 1625 - DNA, 280 bp, Homo sapiens; identical to SEQ ID NO: 1624
  misc_feature (124)..(125): n is a, c, g, or t
  misc_feature (137)..(137): n is a, c, g, or t
  misc_feature (146)..(146): n is a, c, g, or t
  misc_feature (154)..(154): n is a, c, g, or t
  misc_feature (156)..(156): n is a, c, g, or t
  misc_feature (159)..(159): n is a, c, g, or t
  misc_feature (161)..(161): n is a, c, g, or t
  misc_feature (163)..(163): n is a, c, g, or t
  misc_feature (174)..(174): n is a, c, g, or t
  misc_feature (177)..(177): n is a, c, g, or t
  misc_feature (181)..(181): n is a, c, g, or t
  misc_feature (185)..(185): n is a, c, g, or t
  misc_feature (188)..(188): n is a, c, g, or t
  misc_feature (190)..(191): n is a, c, g, or t
  misc_feature (196)..(196): n is a, c, g, or t
  misc_feature (198)..(198): n is a, c, g, or t
  misc_feature (203)..(203): n is a, c, g, or t
  misc_feature (212)..(212): n is a, c, g, or t
  misc_feature (214)..(215): n is a, c, g, or t
  misc_feature (218)..(219): n is a, c, g, or t
  misc_feature (221)..(223): n is a, c, g, or t
  misc_feature (225)..(226): n is a, c, g, or t
  misc_feature (228)..(230): n is a, c, g, or t
  misc_feature (238)..(238): n is a, c, g, or t
  misc_feature (240)..(240): n is a, c, g, or t
  misc_feature (242)..(243): n is a, c, g, or t
  misc_feature (246)..(246): n is a, c, g, or t
  misc_feature (250)..(250): n is a, c, g, or t
  misc_feature (254)..(257): n is a, c, g, or t
  misc_feature (260)..(260): n is a, c, g, or t
  misc_feature (264)..(264): n is a, c, g, or t
  misc_feature (266)..(268): n is a, c, g, or t
  misc_feature (274)..(274): n is a, c, g, or t

SEQ ID NO: 1626 - DNA, 281 bp, Homo sapiens
  misc_feature (117)..(117): n is a, c, g, or t
  misc_feature (123)..(123): n is a, c, g, or t
  misc_feature (135)..(136): n is a, c, g, or t
  misc_feature (145)..(145): n is a, c, g, or t
  misc_feature (151)..(151): n is a, c, g, or t
  misc_feature (153)..(153): n is a, c, g, or t
  misc_feature (171)..(171): n is a, c, g, or t
  misc_feature (180)..(181): n is a, c, g, or t
  misc_feature (192)..(192): n is a, c, g, or t
  misc_feature (194)..(194): n is a, c, g, or t
  misc_feature (198)..(198): n is a, c, g, or t
  misc_feature (221)..(221): n is a, c, g, or t
  misc_feature (223)..(223): n is a, c, g, or t
  misc_feature (225)..(226): n is a, c, g, or t
  misc_feature (228)..(228): n is a, c, g, or t
  misc_feature (231)..(232): n is a, c, g, or t
  misc_feature (234)..(235): n is a, c, g, or t
  misc_feature (237)..(238): n is a, c, g, or t
  misc_feature (243)..(243): n is a, c, g, or t
  misc_feature (247)..(247): n is a, c, g, or t
  misc_feature (249)..(249): n is a, c, g, or t
  misc_feature (255)..(256): n is a, c, g, or t
  misc_feature (258)..(258): n is a, c, g, or t
  misc_feature (263)..(263): n is a, c, g, or t
  misc_feature (267)..(267): n is a, c, g, or t
  misc_feature (274)..(275): n is a, c, g, or t
caggcgtactgacaggtggaccaacggactgatttagaagagaacaagcatgcgctccctacattccagccacatatcacaaacgactacggtctggacaactttgacacacagttnaccagngagcccgtgcanntgaccccanacgatnangatgccatatagaggatngaccagtcnnagttcgaaggntntgantatatccatccattattgctgancncnnanganncnntnntcatntacntntagtcnntnttttngctntctcccnnccactc

SEQ ID NO: 1627 - DNA, 300 bp, Homo sapiens
gaaagcagtggaccccattaataatcctggccaactctcgtagtggaactaatatgggagaagggctgttgggagaatttaggatcttgttgaatccagtccaggtaactaaagaaaaaaactttttatattaatgttttcattttccccaaaatgcaatgattattaatgcttcaagtcactaatcacctgatcataggaaagaataataattacaaaaagatcagccatttaaatatgtggataaacaggcactcttgtgggaatataaaatggtacaacctctttagaagacatctt

SEQ ID NO: 1628 - DNA, 300 bp, Homo sapiens; identical to SEQ ID NO: 1627

SEQ ID NO: 1629 - DNA, 600 bp, Homo sapiens
  misc_feature (447)..(447): n is a, c, g, or t
  misc_feature (453)..(453): n is a, c, g, or t
  misc_feature (480)..(480): n is a, c, g, or t
  misc_feature (485)..(485): n is a, c, g, or t
  misc_feature (505)..(505): n is a, c, g, or t
  misc_feature (516)..(516): n is a, c, g, or t
  misc_feature (523)..(524): n is a, c, g, or t
  misc_feature (548)..(549): n is a, c, g, or t
  misc_feature (551)..(551): n is a, c, g, or t
  misc_feature (560)..(560): n is a, c, g, or t
  misc_feature (568)..(568): n is a, c, g, or t
  misc_feature (581)..(581): n is a, c, g, or t
  misc_feature (583)..(583): n is a, c, g, or t
  misc_feature (585)..(585): n is a, c, g, or t
  misc_feature (587)..(587): n is a, c, g, or t
gaaagaacattcctttggggtgtggcctaggaagttttccagatttttcactagcgtacatctaaggaaaaccgtaaacacagagctgccctttattcctcccacaggaagaaatgtacatcttcatggagtactgcgatgaggggactttagaagaggtgtcaaggctgggacttcaggaacatgtgattaggctgtattcaaagcagatcaccattgcgatcaacgtcctccatgagcatggcatagtccaccgtgacattaaaggtgccaatatcttccttacctcatctggattaatcaaactgggagattttggatgttcagtaaagctcaaaaaacaatgcccagaccatgcctggtgaagttgaacagcaccctggggacagcaacatacatggcacctgaagtcatcactcgtgcccaaagaaagggccatgggcgttncggccnacatctggagtctggggtgtgttggcntaganatggggactggccaaaagcncttggcatgantattgannccacctttcaaattatgtataaanncnggggatggnacctaaanccccccaatcccngnananaattaaacccctt

SEQ ID NO: 1630 - DNA, 600 bp, Homo sapiens; identical to SEQ ID NO: 1629
  misc_feature (447)..(447): n is a, c, g, or t
  misc_feature (453)..(453): n is a, c, g, or t
  misc_feature (480)..(480): n is a, c, g, or t
  misc_feature (485)..(485): n is a, c, g, or t
  misc_feature (505)..(505): n is a, c, g, or t
  misc_feature (516)..(516): n is a, c, g, or t
  misc_feature (523)..(524): n is a, c, g, or t
  misc_feature (548)..(549): n is a, c, g, or t
  misc_feature (551)..(551): n is a, c, g, or t
  misc_feature (560)..(560): n is a, c, g, or t
  misc_feature (568)..(568): n is a, c, g, or t
  misc_feature (581)..(581): n is a, c, g, or t
  misc_feature (583)..(583): n is a, c, g, or t
  misc_feature (585)..(585): n is a, c, g, or t
  misc_feature (587)..(587): n is a, c, g, or t

SEQ ID NO: 1631 - DNA, 600 bp, Homo sapiens
  misc_feature (2)..(2): n is a, c, g, or t
  misc_feature (5)..(5): n is a, c, g, or t
  misc_feature (10)..(10): n is a, c, g, or t
  misc_feature (29)..(29): n is a, c, g, or t
  misc_feature (37)..(37): n is a, c, g, or t
  misc_feature (59)..(59): n is a, c, g, or t
  misc_feature (63)..(63): n is a, c, g, or t
  misc_feature (78)..(78): n is a, c, g, or t
  misc_feature (154)..(154): n is a, c, g, or t
  misc_feature (163)..(163): n is a, c, g, or t
  misc_feature (175)..(175): n is a, c, g, or t
  misc_feature (182)..(183): n is a, c, g, or t
  misc_feature (188)..(188): n is a, c, g, or t
  misc_feature (197)..(197): n is a, c, g, or t
  misc_feature (217)..(217): n is a, c, g, or t
  misc_feature (219)..(219): n is a, c, g, or t
  misc_feature (224)..(224): n is a, c, g, or t
  misc_feature (231)..(231): n is a, c, g, or t
  misc_feature (245)..(245): n is a, c, g, or t
  misc_feature (260)..(260): n is a, c, g, or t
  misc_feature (262)..(262): n is a, c, g, or t
  misc_feature (278)..(278): n is a, c, g, or t
  misc_feature (288)..(288): n is a, c, g, or t
  misc_feature (309)..(309): n is a, c, g, or t
  misc_feature (327)..(327): n is a, c, g, or t
  misc_feature (341)..(341): n is a, c, g, or t
  misc_feature (357)..(357): n is a, c, g, or t
  misc_feature (361)..(361): n is a, c, g, or t
  misc_feature (378)..(378): n is a, c, g, or t
  misc_feature (380)..(380): n is a, c, g, or t
  misc_feature (386)..(387): n is a, c, g, or t
  misc_feature (394)..(394): n is a, c, g, or t
  misc_feature (400)..(400): n is a, c, g, or t
  misc_feature (407)..(407): n is a, c, g, or t
  misc_feature (410)..(411): n is a, c, g, or t
  misc_feature (420)..(420): n is a, c, g, or t
  misc_feature (428)..(428): n is a, c, g, or t
  misc_feature (448)..(448): n is a, c, g, or t
  misc_feature (463)..(463): n is a, c, g, or t
  misc_feature (471)..(471): n is a, c, g, or t
  misc_feature (487)..(487): n is a, c, g, or t
  misc_feature (490)..(490): n is a, c, g, or t
  misc_feature (510)..(510): n is a, c, g, or t
  misc_feature (523)..(523): n is a, c, g, or t
  misc_feature (548)..(548): n is a, c, g, or t
  misc_feature (567)..(567): n is a, c, g, or t
  misc_feature (578)..(579): n is a, c, g, or t
  misc_feature (585)..(585): n is a, c, g, or t
  misc_feature (587)..(587): n is a, c, g, or t
  misc_feature (597)..(597): n is a, c, g, or t
tncantgctnttaaagaagaagatctcgnggtctggnttgatcctttggatggaaccanggantataccgatggtctncttgacaatgtaacaggtcttattggaattgcttatgaaggaaaagccatagcaggagttattaaccagccatatnacaactatnaggcaggaccanatgctgnnttggngaggacaanctggggagttttaggtttangngcctntgggttncatctgaaagaagnccctgctgggaaacncnttatcacaactactcnattccatagnaacaagacggttactgactgngttgctgctatgaacccngatgctgtgctgcnagtatgaggacagganattngattattcagcttattnanggcaannactctgnttatgnatttgcnagnnctggttgtnagaattgngatacttgagctccagaagncatttacatgctgtnggaggcangttaaccgaatccatnggnatgttcttcagtccaccaangatgttaaccatntgaactctggatgagtactgccacnctgaggattatgactactntgcaagcccannacatgngngagccccctnctt

SEQ ID NO: 1632 - DNA, 538 bp, Homo sapiens
  misc_feature (336)..(336): n is a, c, g, or t
  misc_feature (485)..(485): n is a, c, g, or t
caccagtggctttagggcctgtcgcttacgcgatgcgggtagtattgttcccgttgcgcagttgaggacacctaggttcacggtctgagtaacacctcattacaccgaagcctgggcctgtattcccagagctttgggaggctgaggcgagaggatcacttgagcacaggagttcgagaccagcctggacaacatagtgagacccccatctctaaataaaaatagaccaacgctaaagcctgtgctccagagcctccaggmawttggatcagaagtcgcagctctggtgggaggaaggcgagtcctcatgtgtgtccctgtgccactttgccttgnccctttgctgtccatcctttttcagggcgtggactccctggtgctagaaagcgtgatgttcgccatacttgcggacgggtccgctggggccccagcttgtacggagtctttcccagaaggcccggcttggaacagtacatcccaagtcnggccatttgaaaacttcaaagaagcttcgagaagccagtgttgtcagcagcca

SEQ ID NO: 1633 - DNA, 424 bp, Homo sapiens
gtctacatgggtgcttcccattccaggggatgagctacctggaggatgtgcggctcgtacacagggacttggccgctcggaacgtgctggtcaagagtcccaaccatgtcaaaattacagacttcgggctggctcggctgctggacattgacgagacagagtaccatgcagatgggggcaaggttaggtgaaggaccaaggagcagaggaggctgggtggagtggtgtctagcccatgggagaactctgagtggccacctccccacaacacacagttggaggacttcctcttctgccctcccaggtgcccatcaagtggatggcgctggagtccattctccgccggcggttcacccaccagagtgatgtgtggagttatggtgtgtgatggggggtgttgggaggggtgggtgaggagccatgg

SEQ ID NO: 1634 - DNA, 1400 bp, Homo sapiens
gttctcaagttgttaagtttcctctggaaggctaacccttgttgggaactaacagtttcaataccagcaagtctaggcctgctccaagttggtcagctgaagaatgaacatcagaagacacagctgctgaaagttgtcctttgatgagacagtgatagtgatttggtaaaatgtcttattttttaaatgtcagttatctttctttaaaaggttttttgagggcagcctccagaaggagctagagagtatattttatagttctattgtggttcataccctgttttcgacttaagattctggagaatgctatgaaacatctccccagaaaaagacagttaattaccatatctagagcagcactgcccaacaaaaatatagtacaggctatacacataattaaaacatttctagtagcttctctaacaaaacccattgaaagtcaattttaataatttatataacttagtgtatcaaaaatatttcaatatgtaatcaacataaaattgagatactttaccagctactagggaggctgaggcacaagaatcacttaaacaggaggcaggggttgcagtgagctgagatcacaccactgcactccagcctgggtggcagagcaaaactttgtccccacccctgacaaaaaacaaacaaacaaacaaaacaaaaaaaaacctgtcaattcagatgctaggttttcatcagacgtacttaatctgtatttagatttcttaaaacttactgtggaaaatgtatttacatactcaagttgtttgaaacataactcactgttttccaataactgaagtatccacttttacatgtattaaaattaaataaaattagaaattcagttctgcagttgcactagccacattttaagtgtttaatagccacacgtggttagtggcatctatattggacagggcagatctagagagaatcctgtatctaacaattttaatttttttccctttatgctgttattccttacctagagaaacaatttccctccaaagttcctttgaggggtctgtttaggccaggccaacacaagtgacctatgtggattttagcatcctttttttgaaatttgaggttttatgaagcttgagtttttctggatatttttagtaatttgctggtgtgtacttagctcagatacttgattgcaactgtgttgggtcaactatttctaatgggacttttccatttgcatgtacagtcactggaaactgctgggcagagaaactctaaaaggtagttggggcacactttttccacctgtcagattggtgaagaattggtgaggctgtggggaaaatggcattctcccacttttgatggatatgtatccaaataaaagtcattcccatgaaaaaaaaaaaaaaaaaaaaaaa

SEQ ID NO: 1635 - DNA, 1400 bp, Homo sapiens; identical to SEQ ID NO: 1634

SEQ ID NO: 1636 - DNA, 1400 bp, Homo sapiens
aggtatcgagagatgaggagaaagaatatcatcggccaagtgtgcgatacccctaagtcctatgataacgtcatgcatgttggactgaggaaggtgacatttaagtggcaaagaggaaacaaaattggagaaggacagtatggaaaagtatacacctgcatcagtgttgacacaggggagctgatggccatgaaggagattcgatttcagcctaacgaccacaagactatcaaggagactgcagacgagttgaaaatatttgaaggcatcaagcaccccaacctggtccggtattttggcgtggagcttcacagggaagagatgtacatcttcatggagtactgtgatgagggtacactagaggaggtgtcacgactgggcctgcaggagcacgtcatcaggttatataccaagcagatcactgtcgccatcaacgtcctccatgagcacggcatcgttcaccgagacatcaaaggtgccaatatcttccttacgtcatctggactaatcaagctgggagattttggatgctctgtaaaacttaaaaacaacgcccagaccatgcccggagaggtgaacagcaccctagggacagcagcttacatggcccctgaagttattacccgagccaaaggagaaggccacggacgtgcggcagatatctggagtctggggtgcgtcgtcatagagatggtgactggcaagcggccttggcatgagtatgaacacaactttcagattatgtacaaggtggggatgggacacaagccaccaatcccggaaaggctaagccctgaaggaaaggcctttctctcgcactgcctggaaagtgacccgaagatacggtggacagccagccagctcctcgaccacgcttttgtcaaggtttgcacagatgaagagtgaagtgaaccagtccgtggcctagtagtgtgtggacagaatcccgtgatcactactgtatgtaatatttacataaagactgcagcgcaggcggccttcctaacctcccaggactgaagactacaggggtgacaagcctcacttctgctgctcctgtcgcctgctgagtgacagtgctgaggttaaaggagccgcacgttaagtgccattactactgtacacggccaccgcctctgtcccctccgaccctctcgtgactgagaaccaaccgtgtcatcagcacagtgtttttgagctcctggggttcagaagaacatgtagtgttcccgggtgtccgggacgtttatttcaacctcctggtcgttggctctgactgtggagcctccttgttcgaaagctgcaggtttgttatgcaaaggctcgtaagtgaagctgaagaaaaggttctttttcaataaatggtttattttaggaaagcgaaaaaaaaaaaaaaaaaa

SEQ ID NO: 1637 - DNA, 600 bp, Homo sapiens
tcatcaatctggcttcgtgcatgatttctttgatctgctcttttgtcaaagattccaactttgccagcttgattgcagcttttttgacggtatttcctatgcgaatttctcccaattgaacctctccaaatgctccttctcctaatttcttgattaatgtcacgtcagaatgttgcttttcccacggttcacgaccaattggacggatgattacagtttctgggccctaaaagcaaacaaatgaaaataagtttactcacttaatttgtaagatcaccccagcaacaggttctttagaacgatgatagtaattgagaagatctgcgatactagaaaaccattttttatcaactgcaaacttgttattgtgctctcgaattacataatgacgaatctgaaataatattcttaaaaattatgagcaatcgttttacgtacgtcctcaattactccaacatagacagagagaacaaatttccttggctctcccacttttggatcagtaaatcgaactagaaaatcgcctcgttgagtgagcaactgtttcatatcctcacgtggcaataagccatggtaccagggttcttttgcaagtacttg

SEQ ID NO: 1638 - DNA, 118 bp, Homo sapiens
ctgaaaggcctggattatctgcactcagagcgcaagatccaccgagatatcaaagctgccaacgtgctgctctcggagcagggtgatgtgaagatggcagacttcggtgtggctggca

SEQ ID NO: 1639 - DNA, 118 bp, Homo sapiens; identical to SEQ ID NO: 1638

SEQ ID NO: 1640 - DNA, 110 bp, Homo sapiens
gacccagaggaactcttcaccaagcttgaccgcattggcaaaggctcatttggggaggtgtacaaggggatcgacaaccacaccaaggaagtggtggccatcaagatcat

SEQ ID NO: 1641 - DNA, 1400 bp, Homo sapiens
tgctaacatcttaatacacactttgagaataaagaaggattgcattattagatgttaagctggaaatgatccttaagatttacttgcaatatctgtagaaaagtgaactgtgatattagcttgatttttttctttgtattattcctcatttttagttctgaggaattccttccccaaatttattttgccatatataagaaatatttgaaaaaggtgacttcttagtaaccagagttaattaccccaaagacttaatctaaaaatcagttttgatataatcagatttagtgaggtaacattgtaagagttatacttaaaacaattttttgatgtttggtttgaggacagtctcccaagctatcggtgagtttctgcattaggacctaagatgtgaacatggtttaccctttagttttaattgcacgtgcttgggaaaagggtcttgctctcctgtgagtgggagtaatttgtatacttgtgcctgaatgactagtcttagggctgcctagggcaaagccagtgttgcctctggggtttcttaaagctcagggagaacaaccttcaactcttaccagggatttacttctaactgtgatcagtatcctttacaaataacatttatttagtgtcctgttttgcatggtggtggggtaaccactgaatgaaaacattagacatgaacagtcactgtcctctacataaagtaggtgcctgctcagctctctggcaggtggaaatgggagaggatggcaatacaacacatcaattaacatatagatgaggagtacctcatctatatgttaaccagctctctggttaaatgtagcggggtaaagcccagagttcagaccaaatgtttgaagaggcagttaggattaggtttctgagctagggtaattcagatctgggagaaacacctagcatcatcagtcagaatcaggatgccacagaaaatctagggacacaggagaaaagagagtaaatgaaatgtcacagcttagaccatgggcttacaagctcagatggctgacagagggaagaatgactgtaagcctctgatgcctgacagtatattctccacctgactctgcctgcagtgtaaaaaatcctgcatgcctagagtaccagcttccctgttgttttctagcagactcatgtccagattgacttcttgaaggtatgcatgcccttttcatgtttgtagaatatgtgcgaaaaaccaaagaaacgtgaaaaagtaagaatgaaaatgagagggagtataaggactgaagtacctgtcactaaagatgatggcaggcagtggaatctgaattgttgtgtgaagggttaatactgtaataaagctgtcatctcattgaagaactgaataatattgagcaggtaggtgggaataagaa

SEQ ID NO: 1642 - DNA, 1400 bp, Homo sapiens
  misc_feature (290)..(290): n is a, c, g, or t
  misc_feature (293)..(293): n is a, c, g, or t
tacactatccatccatagatatcaaactcatcttaccccagtatatttgcatacagtgttcctacagcctggattttgatctgtatttgaatgaaaatgtagtgtctgtatttcagacatttccctaggtgttaatgtctttcttcaatgttgccatggttctttggggaccagcacactactaaatgtgacacataaggttttgtggttgtttcttgaggcctccctgccagcagcatttctttccatctttgtagactcttttaaactaaagataagcttagaattgnatnaaaattgttctttcttggtttcctccttgatatatatgttttcaaacctagtgctataaataataaaaaagtaagagtcacaggctagatattataggtgttctagattatttatgaatggataggcttagtgctactacaaattcaacttactgcatttttcaatcctcttttggttttgttatatcttcccatatcactttttcttcagatgaacatgtaaaagcggtgtgtgtgtgtgtgtagacacctaacctgtgtggtaagaccttttaaacttttggttttgtggatgttgactggctgggcagatttcttgactcagtttggaagatcatttgtttatcgtgataactagggataaatggcacaatagtttcaaaggcaagaaataaaaaaaattagacatggagtatttgggaaatgtgatttacatatttattaaggataccccgagaatgaactgaaattgttatttacagttttagggcttgtctcgatactaacagtgactaaatgtttttgttgtgtgacactgactaagaattatatttgattgaagcaggctttgaaaatgcaattgcagcccagataaagtagaatattttgaattcagctttctaagaaagactcagactttctttaaaacagactttcgtcattcttgtgcagagatatgctttgcaggcccaggagatgtaagacttctgttttcttgctgaccttcatctgtggaacacaaaggctgataaactcttggcctctaatctttactggaccagatgaaattcttctgtccattctcatctttcaaagcctgttatagatagacaagaactcaatcaatgttaattttaaaaggcttcaagtggtttgacttttcttcaaatattgacaaaacctattggaggtatatcattttatttgagatttatagttgtctttagtctacaggacttaggattactcattagattgtgcaacataaaaaagtaaataaaatgtagagtttacacataaattttcctgtaaaccgatttcttgtaaacattttcccaactccataccctcatgtaggtacacagtcttatgttgcttaaccgtggg

SEQ ID NO: 1643 - DNA, 600 bp, Homo sapiens
ttccagcctgaaagaatagacccaagcgcatcacgacaaggatatgatgtccgctctgatgtctggagtttggggatcacattggtatgtttatgctgattcaaccttgccacagtagcgtaacaataagaaatttagaagtgaaagaaaacttaatcagacttccccgttcgttaagaactataatcacagacactatggttttaagttgctgaaaaaaaaaaagtatgtatttatttactttaaaaatcaaatcagacttgattatttcccttgaagttatgtgaagtgtctagagccctttaatgttttaactggatctcttggccacagataataggagtcaactattatctgcaactgcactaagaatgggaacaggacaagccagcttacctgcagtcaattcattgatgaaggcacataggcttctcccatctcaggcaaggtgtagtatgtccagtaatactgtatatagtgggtatattaagtatacgtatttttatatgtggaaaatagtttctacttgcaatattctattcactgaatagtaaaatcacaagtgaatgagctgaaagtaattcagtttttgagggacaa

SEQ ID NO: 1644 - DNA, 600 bp, Homo sapiens; identical to SEQ ID NO: 1643

SEQ ID NO: 1645 - DNA, 600 bp, Homo sapiens
attcacctttatgcatgggcaccaaagtcctttgatgaaagcactgctattaaagtatttccaacacttgatcataagccagtgacagttgacctggctattggttctgaaaaaagactaaagattttcttcagctcagcagatggatatcacctcatcgatgcagaatctgaggttatgtctgatgtgaccctgccaaagaatcccctggaaatcattataccacagaatatcatcattttacctgattgcttgggaattggcatgatgctcaccttcaatgctgaagccctctctgtggaagcaaatgaacaactcttcaagaagatccttgaaatgtggaaagacataccatcttctatagcttttgaatgtacacagcgaaccacaggatggggccaaaaggccattgaagtgcgctctttgcaatccagggttctggaaagtgagctgaagcgcaggtcaattaagaagctgagattcctgtgcacccggggtgacaagctgttctttacctctaccctgcgcaatcaccacagccgggtttacttcatgacacttggaaaacttgaagagctccaaagcaattatgatgtctaa

SEQ ID NO: 1646 - DNA, 600 bp, Homo sapiens; identical to SEQ ID NO: 1645

SEQ ID NO: 1647 - DNA, 600 bp, Homo sapiens
ccagagccccttctatggagataagatgaatctcttctccctgtgccagaagatcgagcagtgtgactaccccccactccccggggagcactactccgagaagttacgagaactggtcagcatgtgcatctgccctgacccccaccagagacctggtagcctagaacagctaagaccacagggttcagcaggttccccaaaaggctgcccagccttacagcagatgctgaaggcagagcagctgagggaggggcgctggccacatgtcactgatggtcagattccaaagtcctttctttatactgttgtggacaatctcagctgggtcaataagggcaggtggttcagcgagccacggcagccccctgtatctggattgtaatgtgaatctttagggtaattcctccagtgacctgtcaaggcttatgctaacaggagacttgcaggagaccgtgtgatttgtgtagtgagcctttgaaaatggttagtaccgggttcagtttagttcttggtatcttttcaatcaagctgtgtgcttaatttactctgttgtaaagggataaagtggaaatcatttttaaaaaaaaaaaaaaaaaaaaa

SEQ ID NO: 1648 - DNA, 600 bp, Homo sapiens; identical to SEQ ID NO: 1647

SEQ ID NO: 1649 - DNA, 295 bp, Homo sapiens
aagctgcggttcgaaaatsstgacagcacagggcttcctgggctctgcagagcaaactggaaagagctgggatccaggcactatgttctctgaagaactgtggctggaaaatgagaaaaagtgtgctgtggttcggaagtctaagcagggcaggaaacgccaagaactgctggccgtagccttcggggtgaaggtccacacgttccgaggcccacactggtgtgaatattgtgccaatttcatgtgggggctcatcgcccaaggggtccggtgctcagactgtggattgaacgta

SEQ ID NO: 1650 - DNA, 295 bp, Homo sapiens; identical to SEQ ID NO: 1649

SEQ ID NO: 1651 - DNA, 1400 bp, Homo sapiens
cacagagacgcagagcaagggcggcaaggaggagaccctggtgggaggaagacactctggagagagagggggctgggcagagatgaagttccaggggcccctggcctgcctcctgctggccctctgcctgggcagtggggaggctggccccctgcagagcggagaggaaagcactgggacaaatattggggaggcccttggacatggcctgggagacgccctgagcgaaggggtgggaaaggccattggcaaagaggccggaggggcagctggctctaaagtcagtgaggcccttggccaagggaccagagaagcagttggcactggagtcaggcaggttccaggctttggcgtagcagatgctttgggcaacagggtcggggaagcagcccatgctctgggaaacactgggcacgagattggcagacaggcagaagatgtcattcgacacggagcagatgctgtccgcggctcctggcagggggtgcctggccacaatggtgcttgggaaacttctggaggccatggcatctttggctctcaaggtggccttggaggccagggccagggcaatcctggaggtctggggactccgtgggtccacggataccccggaaactcagcaggcagctttggaatgaatcctcagggagctccctggggtcaaggaggcaatggagggccaccaaactttgggaccaacactcagggagctgtggcccagcctggctatggttcagtgagagccagcaaccagaatgaagggtgcacgaatcccccaccatctggctcaggtggaggctccagcaactctgggggaggcagcggctcacagtcgggcagcagtggcagtggcagcaatggtgacaacaacaatggcagcagcagtggtggcagcagcagtggcagcagcagtggcggcagcagtggcggcagcagtggtggcagcagtggcaacagtggtggcagcagaggtgacagcggcagtgagtcctcctggggatccagcaccggctcctcctccggcaaccacggtggagcggcggaggaaatggacataaacccgggaactctgagacgtctcctgggatgtttaactttgacactttctggaagaattttaaatccaagctgggtttcatcaactgggatgccataaacaaggaccagagaagctctcgcatcccgtgacctccagacaaggagccaccagattggatgggagcccccacactccctccttaaaacaccaccctctcatcactaatctcagcccttgcccttgaaataaaccttagctgccccacaaaaaaaaaaaaaaaaaaaaaaaaaaaaaaaaaaaaaaaaaaaaaaaaaaaaaaaaaaaaaaaaaaaaaaaaaaaaaaaaaaaaaaaaaaaaa

SEQ ID NO: 1652 - DNA, 1400 bp, Homo sapiens
gcctggccacaatggtgcttgggaaacttctggaggccatggcatctttggctctcaaggtggccttggaggccagggccagggcaatcctggaggtctggggactccgtgggtccacggataccccggaaactcagcaggcagctttggaatgaatcctcagggagctccctggggtcaaggaggcaatggagggccaccaaactttgggaccaacactcagggagctgtggcccagcctggctatggttcagtgagagccagcaaccagaatgaagggtgcacgaatcccccaccatctggctcaggtggaggctccagcaactctgggggaggcagcggctcacagtcgggcagcagtggcagtggcagcaatggtgacaacaacaatggcagcagcagtggtggcagcagcagtggcagcagcagtggcggcagcagtggcggcagcagtggtggcagcagtggcaacagtggtggcagcagaggtgacagcggcagtgagtcctcctggggatccagcaccggctcctcctccggcaaccacggtgggagcggcggaggaaatggacataaacccggggggcaagggtcgagctggggcagtggaggaggtgacgctgttggtggagtcaatactgtgaactctgagacgtctcctgggatgtttaactttgacactttctggaagaattttaaatccaagctgggtttcatcaactgggatgccataaacaagaaccaggtcccgccccccagcacccgagccctcctctacttcagccgactctgggaggatttcaaacagaacactcctttcctcaactggaaagcaattattgagggtgcggacgcgtcatcactgcagaaacgtgcaggcagagccgatcagaactacaattacaaccagcatgcgtatcccactgcctatggtgggaagtactcagtcaagacccctgcaaaggggggagtctcaccttcttcctcggcttcccgggtgcaacctggcctgctgcagtgggtgaagttttggtaggcaatttcttgcaaccaccaccgaggccccgaaaagcactggtcgtcagggagctcctccccttggcccccagcctgtgccagccctggcccggctgccacacctctgtttcctaggctggggacccagcttgtctctccttgtttcttcccactgcactgtggtgcttcagtggccaccagcctcgtcacatacaccagcatctttctgtacctcctccctttggtgacctgaagtcactgtgacagttctccaggaaggaggagcttcctacttttgagtttctctgtggaaataaaacatgaatcttgtttccctaaaaaaaaaaaaaaaaaaaaaaaaaaaaaaaaaaaaaaaaaaaaaa

SEQ ID NO: 1653 - DNA, 1400 bp, Homo sapiens; identical to SEQ ID NO: 1652

SEQ ID NO: 1654 - DNA, 235 bp, Homo sapiens
  misc_feature (44)..(44): n is a, c, g, or t
  misc_feature (51)..(51): n is a, c, g, or t
  misc_feature (63)..(63): n is a, c, g, or t
  misc_feature (82)..(82): n is a, c, g, or t
  misc_feature (129)..(129): n is a, c, g, or t
  misc_feature (153)..(153): n is a, c, g, or t
  misc_feature (161)..(161): n is a, c, g, or t
  misc_feature (197)..(197): n is a, c, g, or t
  misc_feature (199)..(200): n is a, c, g, or t
  misc_feature (217)..(217): n is a, c, g, or t
  misc_feature (224)..(224): n is a, c, g, or t
  misc_feature (231)..(231): n is a, c, g, or t
gcaaaggacagtccgccgaggtgctcggtggagtcatggcattnccctttntggaagactggnccttggtgcaaaccctggnagaaggtgcctatggagaagttcaacttgctgtaaatagagtaactnaagaagcagtcgcagtgaagattntagatatnaagcgtgccgtagactgtcccgaaaatattaagtangnnatctgtatcaataaaantgctaantcatganaatt

SEQ ID NO: 1655 - DNA, 600 bp, Homo sapiens
  misc_feature (7)..(7): n is a, c, g, or t
  misc_feature (20)..(21): n is a, c, g, or t
  misc_feature (40)..(40): n is a, c, g, or t
  misc_feature (59)..(59): n is a, c, g, or t
  misc_feature (136)..(136): n is a, c, g, or t
  misc_feature (235)..(235): n is a, c, g, or t
  misc_feature (266)..(266): n is a, c, g, or t
  misc_feature (277)..(277): n is a, c, g, or t
  misc_feature (279)..(279): n is a, c, g, or t
  misc_feature (284)..(284): n is a, c, g, or t
  misc_feature (295)..(296): n is a, c, g, or t
  misc_feature (302)..(302): n is a, c, g, or t
  misc_feature (327)..(327): n is a, c, g, or t
  misc_feature (338)..(338): n is a, c, g, or t
  misc_feature (376)..(376): n is a, c, g, or t
  misc_feature (385)..(385): n is a, c, g, or t
  misc_feature (388)..(388): n is a, c, g, or t
  misc_feature (404)..(404): n is a, c, g, or t
  misc_feature (421)..(422): n is a, c, g, or t
  misc_feature (439)..(439): n is a, c, g, or t
  misc_feature (441)..(441): n is a, c, g, or t
  misc_feature (444)..(444): n is a, c, g, or t
  misc_feature (452)..(452): n is a, c, g, or t
  misc_feature (454)..(454): n is a, c, g, or t
  misc_feature (464)..(464): n is a, c, g, or t
  misc_feature (469)..(469): n is a, c, g, or t
  misc_feature (474)..(474): n is a, c, g, or t
  misc_feature (482)..(482): n is a, c, g, or t
  misc_feature (484)..(484): n is a, c, g, or t
  misc_feature (488)..(489): n is a, c, g, or t
  misc_feature (491)..(491): n is a, c, g, or t
  misc_feature (493)..(493): n is a, c, g, or t
  misc_feature (505)..(505): n is a, c, g, or t
  misc_feature (508)..(508): n is a, c, g, or t
  misc_feature (512)..(513): n is a, c, g, or t
  misc_feature (519)..(522): n is a, c, g, or t
  misc_feature (528)..(528): n is a, c, g, or t
  misc_feature (530)..(530): n is a, c, g, or t
  misc_feature (538)..(538): n is a, c, g, or t
  misc_feature (542)..(542): n is a, c, g, or t
  misc_feature (547)..(547): n is a, c, g, or t
  misc_feature (559)..(559): n is a, c, g, or t
  misc_feature (563)..(565): n is a, c, g, or t
  misc_feature (571)..(571): n is a, c, g, or t
  misc_feature (573)..(573): n is a, c, g, or t
  misc_feature (576)..(576): n is a, c, g, or t
  misc_feature (584)..(586): n is a, c, g, or t
  misc_feature (595)..(595): n is a, c, g, or t
  misc_feature (597)..(597): n is a, c, g, or t
ggagganagctttttgaccnncccgagccagacataggcntgcctgaaccaaatgctcntatattcttccatcaactcatggcaggggtggtttatctgcatggtattggaataactcacagggatattaaaccanaaaaatcttctgttggatgaaagggataacctcaaaatctcagactttggcttggcaacagtatttcggtataataatcgtgagcgtttgttgaacaanatgtgtggtactttaccatatgttgctccanaacttctgaananaaaanaattccatgcnnaaccantttgatgtttggtcctgtggaatantacttactgcnatgctcgctggagaattgccatgggaccaacccacganagctgtcangantattctgactggaaanaaaaaaaaacatactcnncccttggaaaaaaatcnantcngctcctcnanctctgccgcntaaancctanttgaaatncntccnncnanaataccttcccnaantccnnaaaaannnntggtcncnccccccanaaanggggnaaaggcccaatncctnnnggtgtntntcnaatccccnnntggattccnancac

SEQ ID NO: 1656 - DNA, 218 bp, Homo sapiens
  misc_feature (27)..(27): n is a, c, g, or t
  misc_feature (50)..(50): n is a, c, g, or t
  misc_feature (172)..(172): n is a, c, g, or t
cttctgttggatgaaagggataacctnaaaatctcagactttggcttggnaacagtatttcggtataataatcgtgagcgtttgttgaacaagatgtgtggtactttaccatatgttgctccagaacttctgaagagaagagatttcatgcagaaccagttgatgtttggtnctgtggaatagtacttactgcaatgctcgctggagaattgccatgg

SEQ ID NO: 1657 - DNA, 600 bp, Homo sapiens
tgaagcctacacaaaaatctgtgacccaggccttactgcttttgaacctgaagctttgggtaatttagtggaagggatggattttcaccgattctactttgaaaatgctttgtccaaaagcaataaaccaatccacactattattctaaaccctcatgtacatctggtaggggatgatgccgcctgcatagcatatattaggctcacacagtacatggatggcagtggaatgccaaagacaatgcagtcagaagagactcgtgtgtggcaccgccgggatggaaagtggcagaatgttcattttcatcgctcggggtcaccaacagtacccatcaactaaatttcaacagtgccacttctgcattctctgttctcaaggcacctggatggtgaccctgggccgtcctctcctcctcttcatgcatgtttctgagtgcatgaagttgtgaaggtcctacatgtaatgcatatgtgatgcatcatcttatcatatattccttcctatacattgtttacacttcaactacggggatgttccacacaaacttaaattactgttggcaaaacaatagggggagattagacaaaaaaaaaaaaaaa

SEQ ID NO: 1658 - DNA, 1023 bp, Homo sapiens
gaggcagaggggtgggcgggctggcccatggctgagacctctctcccagagctggggggagaggacaaagccacgccttgccccagcatcctggagctggaggagctcctgcgggcagggaagtcttcttgcagccgtgtggacgaagtttggcccaaccttttcataggagatgcgatggactcactgcagaagcaggacctccggaggcccaagatccatggggcagtccaggcatctccctaccagccgcccacattggcttcgctgcagcgcttgctgtgggtccgtcaggctgccacactgaaccatatcgatgaggtctggcccagcctcttcctgggagatgcgtacgcagcccgggacaagagcaagctgatccagctgggaatcacccacgttgtgaatgccgctgcaggcaagttccaggtggacacaggtgccaaattctaccgtggaatgtccctggagtactatggcatcgaggcggatgacaaccccttcttcgacctcagtgtctactttctgcctgttgctcgatacatccgagctgccctcagtgttccccaaggccgcgtgctggtacactgtgccatgggggtaagccgctctgccacacttgtcctggccttcctcatgatctatgagaacatgacgctggtagaggccatccagacggtgcaggcccaccgcaatatctgccctaactcaggcttcctccggcagctccaggttctggacaaccgactggggcgggagacggggcggttctgatctggcaggcagccaggatccctgacccttggcccaaccccaccagcctggccctgggaacagcaggctctgctgtttctagtgaccctgagatgtaaacagcaagtgggggctgaggcagaggcagggatagctgggtggtgacctcttagcgggtggatttccctgacccaattcagagattctttatgcaaaagtgagttcagtccatctctataataaaatattcatcgtcataaaaaaaaaaaa

SEQ ID NO: 1659 - DNA, 1400 bp, Homo sapiens
ctaatcgtccgccagactcagtccgctagtagcacactccagaaacacaaatcttcctcctcctttacaccttttatagaccccagattactacagatttctccatctagcggaacaacagtgacatctgtggtgggattttcctgtgatgggatgagaccagaagccataaggcaagatcctacccggaaaggctcagtggtcaatgtgaatcctaccaacactaggccacagagtgacaccccggagattcgtaaatacaagaagaggtttaactctgagattctgtgtgctgccttatggggagtgaatttgctagtgggtacagagagtggcctgatgctgctggacagaagtggccaagggaaggtctatcctcttatcaaccgaagacgatttcaacaaatggacgtacttgagggcttgaatgtcttggtgacaatatctggcaaaaaggataagttacgtgtctactatttgtcctggttaagaaataaaatacttcacaatgatccagaagttgagaagaagcagggatggacaaccgtaggggatttggaaggatgtgtacattataaagttgtaaaatatgaaagaatcaaatttctggtgattgctttgaagagttctgtggaagtctatgcgtgggcaccaaagccatatcacaaatttatggcctttaagtcatttggagaattggtacatggatcctgtgctggattccatgctgttgatgtggattcaggatcagtctatgacatttatctaccaacacatatccagtgtagcatcaaaccccatgcaatcatcatcctccccaatacagatggaatggagcttctggtgtgctatgaagatgagggggtttatgtaaacacatatggaaggatcaccaaggatgtagttctacagtggggagagatgcctacatcagtagcatatattcgatccaatcagacaatgggctggggagagaaggccatagagatccgatctgtggaaactggtcacttggatggtgtgttcatgcacaaaagggctcaaagactaaaattcttgtgtgaacgcaatgacaaggtgttctttgcctctgttcggtctggtggcagcagtcaggtttatttcatgaccttaggcaggacttctcttctgagctggtagaagcagtgtgatccagggattactggcctccagagtcttcaagatcctgagaacttggaattccttgtaactggagctcggagctgcaccgagggcaaccaggacagctgtgtgtgcagacctcatgtgttgggttctctcccctccttcctgttcctcttatataccagtttatccccattctttttttttttcttactccaaaataaatcaaggctgcaatgcagctggtgctgtta

SEQ ID NO: 1660 - DNA, 600 bp, Homo sapiens
cgccctggagtcttctgacagtgccaataccaccatagaggatgaagacgctaaagcccggaagcaggagatcattaagaccacggagcagctcatcgaggccgtcaacaacggtgactttgaggcctacgcgaaaatctgtgacccagggctgacctcgtttgagcctgaagcactgggcaacctggttgaagggatggacttccacagattctacttcgagaacctgctggccaagaacagcaagccgatccacacgaccatcctgaacccacacgtgcacgtcattggagaggatgccgcctgcatcgcttacatccggctcacgcagtacattgacgggcagggccggccccgcaccagccagtctgaggagacccgcgtgtggcaccgccgcgacggcaagtggcagaacgtgcacttccactgctcgggcgcgcctgtggccccgctgcagtgaagagctgcgccctggtttcgccggacagagttggtgtttggagcccgactgccctcgggcacacggcctgcctgtcgcatgtttgtgtctgcctcgttccctcccctggtgcctgtgtctgcagaaaaacaagcccgact

SEQ ID NO: 1661 - DNA, 600 bp, Homo sapiens; identical to SEQ ID NO: 1660

SEQ ID NO: 1662 - DNA, 1326 bp, Homo sapiens
gaattccggggccttgtgagtgccatggcgccgagctggaggttcttcgtctgctttctgctctggggaggtacagagctatgcagcccgcagcccgtctggcaggacgaaggccagcgcttgaggccctcaaagccacccaccgtaatggtggagtgtcaggaggcccagctggtggtcattgtcagcaaagaccttttcggtaccgggaagctcatcaggcctgcagatctcagcctgggccctgcaaagtgtgagccgctggtctctcaggacacggacgcagtggtcaggtttgaggttgggctgcacgagtgtggcagcagcttgcaggtgactgatgatgctctggtgtacagcaccttcctgcgccatgacccccgccctgcaggaaacctgtccatcctgaggacgaaccgtgcggaggtccccatcgagtgtcactaccccaggcagggcaacgtgagcagctgggccatcctgcccacctgggtgcccttcaggaccacggtgttctccgaggagaagctggtgttctctctgcgcctgatggaggaaaactggagtgccgagaagatgacgcccaccttccagctgggggacagagcccacctccaggcccaagtccacaccggcagccacgtgccactgaggctgtttgtggaccactgtgtggccacgctgacgccggactggaacacctccccctctcacaccatcgtggacttccacggctgtctcgtggacggtctcactgaggcctcatctgctttcaaagcacctagacctggaccagagacgctccagttcaccgtggatgtgttccattttgctaatgattccagaaacacgatctacatcacctgccatctgaaggtcactccggctgaccgagtcccggaccaactcaacaaagcctgttccttcagcaagtcctccaacaggtggtccccggtggaagggcctgctgttatctgtcgttgctgtcacaaggggcagtgtggtaccccaagcctttccaggaagctgtctatgccgaagagacagtctgctccccgcagtcgcaggcacgtgacagatgaagcagatgtcacagtggggcctctgatcttcctgggcaagacgagtgaccacggtgtggaagggtccacctcctcccccacctcggtgatggtgggcttgggcctggccaccgtggtgaccttgactctggctaccattgtcctgggtgtgcccaggaggcgtcgggctgctgcccaccttgtgtgccccgtgtctgcttcccaataaaaggagaaacatgaaaaaaaaaaaaaaccggaattc

SEQ ID NO: 1663 - DNA, 915 bp, Homo sapiens
ccaagaatcggcacgaggattattcaagaattctaccaaatatctggctgggtagctgccctcgacaggtggaacatgttaccatcaaactgaagcatgaattggggattacagctgtcatgaatttccagactgaatgggatattgttcagaattcctcatgctgtaaccgctacccagagcccatgactccagacactatgattaaactatctagggaagaaggcttggcctacatctggatgccaacaccagatatgagcaccgcaggccgagtacagatgctgccccaggcggtgtgcctgctgcatgcgctgctggagaagggacacatcgtgtacgtgcactgcaacgctggggtgggccgctccaccgcggctgtctgcggctggctccagtatgtgatgggctggaatctgaggaaggtgcagtatttcctcatggccaagaggccggctgtctacattgacgaagaggcagctagccaggacacatttccactataattttacaaagttaaatttataagctagcattaagtaaagtgaagtccagctcccttgctaaaaataactagaggtaataattggtattcaggtaactcatttacagtcataatgtgttgtgaaaatttaatcttaaaaattaaatttttaaactatgtgggtctgtgaatttctttaatgtctaagaaatccagcttcataatttccatgatacaaagatcttttttcaggtggatttttacctttgttccttttgctctgatagacaaaatcagtttaggactattaaagaatgttttggaataaactgtctttttcctcaatgaatgggatgtctaatgtatttcaaaatcacccaaaacttttggcaaataaaagcatttaaaaagaaaaaaaaaaaaaaaaaaaa

SEQ ID NO: 1664 - DNA, 915 bp, Homo sapiens; identical to SEQ ID NO: 1663

SEQ ID NO: 1665 - DNA, 1400 bp, Homo sapiens
aggaggacggagccctaaccgcaacccgcgccgcgccgcgccgatttgatttgtatccactgtcaccagcactgctcacttaggactttctggatccggacccaggcagcgcacactggactcttgaggaagaaggagactctaattttggattccttggtggaggaaaataaaacactctggtcttgccgccaacgatgcaagtgtgactgctggcgtcttcatgagctccagaggtcacagcacgctaccaaggactctcatggcccctcggatgatttccgagggagacattcggcacctcctccaggctcgtggcatcacctgcattgttaatgctaccattgagatccctaatttcaactggccccaatttgagtatgttaaagtgcctctggctgacatgccgcatgcccccattggactgtactttgacaccgtggctgacaagatccacagtgtgagcaggaagcacggggccaccttggtgcactgtgctgcaggggtgagccgctcagccacgctgtgtatcgcgtacctgatgaaattccacaacgtgtgcctgctggaggcgtacaactgggtgaaagcccggcgacctgtcatcaggcccaacgtaggcttctggaggcaactgatagactacgagcgccagctctttgggaagtcgacagttaaaatggtacagacaccttatggcatagttcccgacgtctatgagaaggagtcccgacacctgatgccttactgggggatttagtgccactgaagcctgcgtcagcagcccgagcggggccggcatctgctccccgccgtctgctccctctccactctcttctcaaatggctgacttctggttctccctcaagtgttttttacactgggtgttcaaatttattttaagagatagggagggaggggacataaagggaatgcatacattgctagtcacatttttaaaattaacattttggaatagtgtttatggaaatctttagcttttaatcatttttaccaatttgaacagtttaataaactggttctgctctcttctgaatctcakgccttkggcaccttggtaggtgcaggaggagctcagtgcaaaaatcactttggggcctcattaaccctttagagacaagytttgccccaggytgcggaccagacagatgyttagggaaggttgataccagcttcagtctctastggattagccctactctttcctttcccctccattatttagtgactctgtaagtaagttaaatacacccttattatttagctgttaagtaactataatgaaatctgctgcaaaatctctcttggaatccatgtgcccaggattatattagcattatttttaataaatctatatgcttaacaaaaaaaaaaaaaaa

SEQ ID NO: 1666 - DNA, 600 bp, Homo sapiens
ttgtcatggagtactgtgaactcgggaccctgagggagctgttggatagggaaaaagacctcacacttggcaagcgcatggtcctagtcctgggggcagcccgaggcctataccggctacaccattcagaagcacctgaactccacggaaaaatcagaagctcaaacttcctggtaactcaaggctaccaagtgaagcttgcaggatttgagttgaggaaaacacagacttccatgagtttgggaactacgagagaaaagacagacagagtcaaatctacagcatatctctcacctcaggaactggaagatgtattttatcaatatgatgtaaagtctgaaatatacagctttggaatcgtcctctgggaaatcgccactggagatatcccgtttcaaggctgtaattctgagaagatccgcaagctggtggctgtgaagcggcagcaggagccactgggtgaagactgcccttcagagctgcgggagatcattgatgagtgccgggcagcaggtcgtctcgttccaagatctgtagcggccgcccgggccgtcgacgtttaaacgcgtggccctcgagaggttttccgatccggtcgat

SEQ ID NO: 1667 - DNA, 600 bp, Homo sapiens
acctcctggtgaaccccctggagccccaaaatgcagataagatcaagatcaagatcgcagacctgggcaacgcctgctgggtgcacaagcacttcacggaagacatccagactcggcagtaccgggccgtcgaggtgctgatcggcgccgaatacggccccccggcagacatctggagcacagcctgcatggccttcgagctggccactggtgactacctgttcgagccgcattctggagaagactacagtcgtgatgaggaccacatcgctcacatagtggagcttctgggggacatccccccagccttcgccctctcaggccgctattcccgggagttcttcaaccggagaggagagctgcggcacatccacaatctcaagcactggggcctgtacgaggtactcatggaaaagtacgagtggcccctagagcaggccacacagttcagcgcctttctgctgcccatgaatgagtacatccccgaaaagcgggccagtgcccgtgactgcctccagcacccctggctccaaccctagggcccggctgtggctccacctccagctctccgtgcctttaagggaaaagcgggacagctcc

SEQ ID NO: 1668 - DNA, 1400 bp, Homo sapiens
tagtcccactggatggcaagggcacgctgctcatccgaaatggctctgaggtgcgggacccactggttacctacgaaggctccaatccgccggcttccccactgcaagacaacctggttatcgctctgcacagctatgagccctctcacgacggagatctgggctttgagaagggggaacagctccgcatcctggagcagagcggcgagtggtggaaggcgcagtccctgaccacgggccaggaaggcttcatccccttcaattttgtggccaaagcgaacagcctggagcccgaggccaacctcatgaagcagctgcaacaccagcggctggttcggctctacgctgtggtcacccaggagcccatctacatcatcactgaatacatggagaatgggagtctagtggattttctcaagaccccttcaggcatcaagttgaccatcaacaaactcctggacatggcagcccaaattgcagaaggcatggcattcattgaagagcggaattatattcatcgtgaccttcgggctgccaacattctggtgtctgacaccctgagctgcaagattgcagactttggcctagcacgcctcattgaggacaacgagtacacagccagggagggggccaagtttcccattaagtggacagcgccagaagccattaactacgggacattcaccatcaagtcagatgtgtggtcttttgggatcctgctgacggaaattgtcacccacggccgcatcccttacccagggatgaccaacccggaggtgattcagaacctggagcgaggctaccgcatggtgcgccctgacaactgtccagaggagctgtaccaactcatgaggctgtgctggaaggagcgcccagaggaccggcccacctttgactacctgcgcagtgtgctggaggacttcttcacggccacagagggccagtaccagcctcagccttgagaggccttgagaggccctggggttctccccctttctctccagcctgacttggggagatggagttcttgtgccatagtcacatggcctatgcacatatggactctgcacatgaatcccacccacatgtgacacatatgcaccttgtgtctgtacacgtgtcctgtagttgcgtggactctgcacatgtcttgtacatgtgtagcctgtgcatgtatgtcttggacactgtacaaggtacccctttctggctctcccatttcctgagaccacagagagaggggagaagcctgggattgacagaagcttctgcccacctacttttctttcctcagatcatccagaagttcctcaagggccaggactttatctaatacctctgtgtgctcctccttggtgcctggcctggcacacatcaggagttcaataaatgtctgttga

SEQ ID NO: 1669 - DNA, 1400 bp, Homo sapiens; identical to SEQ ID NO: 1668

SEQ ID NO: 1670 - DNA, 600 bp, Homo sapiens
  misc_feature (452)..(452): n is a, c, g, or t
  misc_feature (457)..(457): n is a, c, g, or t
  misc_feature (474)..(474): n is a, c, g, or t
  misc_feature (546)..(546): n is a, c, g, or t
gcctgccacccagatgctgctagagaaactgaacggcacagtgccctgcctgttggataccagcaccatccccgctgaggagctgaccatgagcccttcgcgctcagtggccaactctggcctgagtgacagcctgaccaccagcaccccccggccctccaacggtgactcgccctcccacccctaccaccgaaccttctccccccacttccaccactttgtggagcagtgccttcagcgcaacccggatgccaggtatccctgctggcctgggcctgggcttcgggagagcagagggtgctcaggagggtaaggccagggtgtgaagggacttacctcccaaaggttctgcaggggaatctggagctacacacaggagggatcagctcctgggtgtgtcagaggccagcctggggagctctggccactgcttcccatgagctgagggaganggagnagggacccgaggctgangcataagtggcaggattttcggaagctggggacacggcagtgatgctgcggtctctccctcccttacctcangctcagtgcagcaccctctgaacactctttctcagcagtatcgtagccttcgtt

SEQ ID NO: 1671 - DNA, 600 bp, Homo sapiens; identical to SEQ ID NO: 1670
  misc_feature (452)..(452): n is a, c, g, or t
  misc_feature (457)..(457): n is a, c, g, or t
  misc_feature (474)..(474): n is a, c, g, or t
  misc_feature (546)..(546): n is a, c, g, or t

SEQ ID NO: 1672 - DNA, 1400 bp, Homo sapiens
tagccctcagaagaccagctgtagccctcagaagaccaggcagagccctcagacgctgaagcggagccgagtgaccacctcacttgaagctttgcccacagggacagtgctgacagacaagagtgggcgacagtggaagctgaagtccttccagaccagggacaaccagggcattctctatgaagctgcacccacctccaccctcacctgtgactcaggaccacagaagcaaaagttctcactcaaactggatgccaaggatgggcgcttgttcaatgagcagaacttcttccagcgggccgccaagcctctgcaagtcaacaagtggaagaagctgtactcgaccccactgctggccatccctacctgcatgggtttcggtgttcaccaggacaaatacaggttcttggtgttacccagcctggggaggagccttcagtcggccctggatgtcagcccaaagcatgtgctgtcagagaggtctgtgctgcaggtggcctgccggctgctggatgccctggagttcctccatgagaatgagtatgttcatggaaatgtgacagctgaaaatatctttgtggatccagaggaccagagtcaggtgactttggcaggctatggcttcgccttccgctattgcccaagtggcaaacacgtggcctacgtggaaggcagcaggagccctcacgagggggaccttgagttcattagcatggacctgcacaagggatgcgggccctcccgccgcagcgacctccagagcctgggctactgcatgctgaagtggctctacgggtttctgccatggacaaattgccttcccaacactgaggacatcatgaagcaaaaacagaagtttgttgataagccggggcccttcgtgggaccctgcggtcactggatcaggccctcagagaccctgcagaagtacctgaaggtggtgatggccctcacgtatgaggagaagccgccctacgccatgctgaggaacaacctagaagctttgctgcaggatctgcgtgtgtctccatatgaccccattggcctcccgatggtgccctaggtggaatccagaactttccatttgcagtgtgcaacagaaaaaaaaaaatgaagtaatgtgactcaaggcctgctgtttaatcacagataagcttctagaacaagccctggaatgtgcattcctgccactggtttcaggatactcatcagtcctgattagcctcccggagggccccagtttccctcccgtgaatgtgaagttccccatcttggtggcctgcccttcagccagtgtcctagcaaagctggatggggttgggccggcccacaggggggacccctcctacccttgacacctctgtgctttggtaataaattgttttaccagaaaaaaaaaa

SEQ ID NO: 1673 - DNA, 1400 bp, Homo sapiens; identical to SEQ ID NO: 1672

SEQ ID NO: 1674 - DNA, 470 bp, Homo sapiens
  misc_feature (447)..(447): n is a, c, g, or t
  misc_feature (459)..(459): n is a, c, g, or t
  misc_feature (462)..(467): n is a, c, g, or t
agattggattgctatttaccagaggaaggttgaagctccattcataccaaagtttagaggctctggagataccagcaactttgatgactatgaagaagaagatatccgtgtctctataacagaaaaatgtgcaaaagaatttggtgaattttaaagaggaacaagatgacatctgagctcacactcagtgtttgcactctgttgagagataaggtagagctgagaccgtccttgttgaagcagttacctagttccttcattccaacgactgagtgaggtctttattgccatcatcccgtgtgcgcactctgcatccacctatgtaacaaggcaccgctaagcaagcattgtctgtgccataacacagtacctcggccgcgaccacgctaagggcgaattccagcacactggcggccgttactagggatccgagctcggtaccaagcnggcgtgtaagtnaannnnnnctc

SEQ ID NO: 1675 - DNA, 1400 bp, Homo sapiens
gtctgcttagatacagtacatatttagtcttggctgcttccttttgaggataaacagctcttgggaaatacacattgttaaataatcagttacagaggactaattgtttcaaggcactccctttgcagttgctttccaacagccaacagtaataagaaatgtcactttgtttccattggagactagcacatgaactattcatgaagagcggaaaagcagtcttcccagaaaaccctggaataaacatgtagaagccaagggaggctgggactctatcattgatttgtcccagagccatgtcaaattcagtgaaaaaaaaatcactacatttgttttctagagtgagaattcagagagactaatgaatgcctcatgcacctttcaaaacatccccaaaggtttctataacttcacaaataaatatatagaagctgagacaaggaggtgtacttaaattttcttaatcaggttatgcctctctgccccgtgttcagtagcatctgggctggtgaaacacctctgtgtttttgagcaacaagctaactccatttcacaatgagtgacagtgtctgacattgcctgctcattagcctgttgattgaccaggcatagttctttagatagactgcaggattttcacttttgtttcatctggattctctaaataaaagtgtcaaggtctgatctgccagtaaacatcttccacaaatatagttttagtaatgaggggcttgaacagactataccttttcatacctggctccctccttccaaacaggtgcctccatttcttctgctctaattcgtgctatcttttaatcttttaggtttttttcctgtgatttttccattttctgagcattctatgatcacatttattgcatcttaaacaatgtgttaataacatgcttttcctgggctctgtgagcctttactttgcctgcaaaaagatctagcacactccaatacttgaaagagcaaacctacaagatttaaactaaacaagatgcgtacgtcctctttaagagagtttgggagagcaaagcaaatgacatttgggactcgtttttacctggtcattcagattctttgtcttcatgttaactgataattttttccaggatctaaaactttattcttctctctcatattactcaaatgttggggtggggagaatacattttttaaaaaaaaactttatatgaatattttacaccaacattttgtaacgttcagccatcagatttagtagaaggtgcatgcagttaagtgtcaagcaacctctattttaccaagcaacgtgagttatccgcttttcagaggtgctgattttgcctctaaattttgtcctaaggattgtgtaaaaatatatgtgtataaataaaatctgtaaactatgc

SEQ ID NO: 1676 - DNA, 600 bp, Homo sapiens
ggtttgaactaagtgaatgtatctgcagaggaagtattataaagatatgtcattagatccaagtgctgattaaatttttatagtttatcagaaaagccttatattttagtttgttccacattttgaaagcaaaaaatatatatttgatatacccttcaattgccaaatttgatatgttgcactgaagacagaccctgtcatatatttaatggcttcaagcaggtacttctctgtgcattatagaatagattttaataatcttatagcattgtatattattattgctgttgtcactgttattattattgtggatactggcccttggtgtgttgcatagctccctatgtattctctgtttccatctttaagttcccagaccaatatacattaagagttttgcatggtctaaattgtgtttattccaaccacgtggaaagctcctggaaagaaattttacattcggttgttctgtgctcctaatgacacttgaccttgttgaacaaatggcagagcctttcccaaggatttgattgtttgtgaattatctgcatgtgtgcttttttttggtgtgtatttcattaaaaaatataaatatttatg

SEQ ID NO: 1677 - DNA, 1400 bp, Homo sapiens
cagatgtgctaccagatcagcaggggcaatagtgatggttatataatccccattaacaaagaagggtgtattccagaaggagatgttagagaaggacaaatgcagctggttacaagtctttaatcatacagctaaggaattccaagggccacatgcgagtattaataaataaagacaccattggcctgacgcagctccctcaaactctgcttgaagagatgactcttgacctgtggttctctggtgtaaaaaagatgactgaaccttgcagttctgtgaatttttataaaacatacaaaaactttgtatatacacagagtatactaaagtgaattatttgttacaaagaaaagagatgccagccaggtattttaagattctgctgctgtttagagaaattgtgaaacaagcaaaacaaaactttccagccattttactgcagcagtctgtgaactaaatttgtaaatatggctgcaccatttttgtaggcctgcattgtattatatacaagacgtaggctttaaaatcctgtgggacaaatttactgtaccttactattcctgacaagacttggaaaagcaggagagatattctgcatcagtttgcagttcactgcaaatcttttacattaaggcaaagattgaaaacatgcttaaccactagcaatcaagccacaggccttatttcatatgtttcctcaactgtacaatgaactattctcatgaaaaatggctaaagaaattatattttgttctattgctagggtaaaataaatacatttgtgtccaactgaaatataattgtcattaaaataattttaaagagtgaagaaaatattgtgaaaagctcttggttgcacatgttatgaaatgttttttcttacactttgtcatggtaagttctactcattttcacttcttttccactgtatacagtgttctgctttgacaaagttagtctttattacttacatttaaatttcttattgccaaaagaacgtgttttatggggagaaacaaactctttgaagccagttatgtcatgccttgcacaaaagtgatgaaatctagaaaagattgtgtgtcacccctgtttattcttgaacagagggcaaagagggcactgggcacttctcacaaactttctagtgaacaaaaggtgcctattcttttttaaaaaaataaaataaaacataaatattactcttccatattccttctgcctatatttagtaattaatttattttatgataaagttctaatgaaatgtaaattgtttcagcaaaattctgcttttttttcatccctttgtgtaaacctgttaataatgagcccatcactaatatccagtgtaaagtttaacacggtttgacagtaaataaatgtgaattttttcaagt

SEQ ID NO: 1678 - DNA, 1400 bp, Homo sapiens; identical to SEQ ID NO: 1677

SEQ ID NO: 1679 - DNA, 1400 bp, Homo sapiens
acatgtgggtgatggtggatgatgtgtcatgaatgaggaggtgtgtgagcagggaactcagtgtgacaccgccaggtccagcacccatgggggcgggggagaggctcacccctacgtccccccacgcctggaggctggagccaggggccacttctgaactgcaccagcaccaggcccaccctcgtctctgcctgggtgagcccaccccggctgtatctcaggtctgggtcctccctctagccgaggaggccacctgcagcctccacccggctctcaccgctgcttcaacaggaaaacagggttcccggtcagtccggctggccgccttcatggaggcatcatggcagagcacatgagatgtcctcagctgggcttggctgcctggccagggccgggggctcagcagcctcctctagcctctgatgccttccctccacggcccaggtctcctcactcaaagtcccttcgccaacctttcaatgcccagccctgacacctgccctttgtcccccaggcctaggatcagggaccagaggatcctatcttctcagcacccagcccaccccttcctgtagcatatggggagactaaggcctggagagaggggtgatgccccgtcccaggttgcactgcaaccaagtgtcagagtcggggctccggcctcctgccaaggctcttgtccccatacaccatcccacaagggcgctgggggtggaagtgccctggaagcccctcccctctcacactgacctccccccttacggcccaccagggtatgtaaatatctcttttctaccatgtcagaatattttttcctcactcctgacaatgcaaaaatggtcttcaaagcacataaaaagcacccagggtgagaaagccccatcccgggggccgttggcaggcagggaagcaggaaccccaccgtgtgccccctgccagccccagagggagtggcgagcccagctgcccagccctgccccccctccccatagccagcacagctatcccgcggggacaccagcactgagccccctctccctcctgcaataattcggggagtctcagccccatccaggtgccgcggccagctctctacacctctatatattatattactatatagccgagctgttcttccttcctatggaagtcggaaacatggtcagaacacgatctgggggggggatcctgtcttcctccccaccccaccccactcttacccaatttctgggctctggatcctcacagtcatggaggcaccgtgggcctggcacttgcaaaagtgtggcccctcactctagtgtgtggtccctctcagggtcctggggatctgcctctctgtggtctccatcctgactcttgaacttacccacaataagaataaattctgcctcatcttt

SEQ ID NO: 1680 - DNA, 600 bp, Homo sapiens
gtatctgcatggtgttttctggtctgtgcccacttcttctaggcagtgtgatggccattgagcggtgtattggagtcacaaaaccaatatttcattctacgaaaattacatccaaacatgtgaaaatgatgttaagtggtgtgtgcttgtttgctgttttcatagctttgctgcccatccttggacatcgagactataaaattcaggcgtcgaggacctggtgtttctacaacacagaagacatcaaagactgggaagatagattttatcttctacttttttcttttctggggctcttagcccttggtgtttcattgttgtgcaatgcaatcacaggaattacacttttaagagttaaatttaaaagtcagcagcacagacaaggcagatctcatcatttggaaatggtaatccagctcctggcgataatgtgtgtctcctgtatttgttggagcccatttctggtaagagcctgaagttttgacttctgctttcttgggttaatccatgttcaattcaaggttatctggaagttcagtcttttaaatgctgagaatgatccctactcaaaatttatttcagcactcagctctggcttaa

SEQ ID NO: 1681 - DNA, 600 bp, Homo sapiens; identical to SEQ ID NO: 1680

SEQ ID NO: 1682 - DNA, 1400 bp, Homo sapiens
catcagctacgaccgcttcctgtcggtcacccgagcggtctcataccgggcccagcagggtgacacgcggcgggcagtgcggaagatgctgctggtgtgggtgctggccttcctgctgtacggaccagccatcctgagctgggagtacctgtccgggggcagctccatccccgagggccactgctatgccgagttcttctacaactggtacttcctcatcacggcttccaccctggagttctttacgcccttcctcagcgtcaccttctttaacctcagcatctacctgaacatccagaggcgcacccgcctccggctggatggggctcgagaggcagccggccccgagccccctcccgaggcccagccctcaccacccccaccgcctggctgctggggctgctggcagaaggggcacggggaggccatgccgctgcacaggtatggggtgggtgaggcggccgtaggcgctgaggccggggaggcgaccctcgggggtggcggtgggggcggctccgtggcttcacccacctccagctccggcagctcctcgaggggcactgagaggccgcgctcactcaagaggggctccaagccgtcggcgtcctcggcctcgctggagaagcgcatgaagatggtgtcccagagcttcacccagcgctttcggctgtctcgggacaggaaagtggccaagtcgctggccgtcatcgtgagcatctttgggctctgctgggccccatacacgctgctgatgatcatccgggccgcctgccatggccactgcgtccctgactactggtacgaaacctccttctggctcctgtgggccaactcggctgtcaaccctgtcctctaccctctgtgccaccacagcttccgccgggccttcaccaagctgctctgcccccagaagctcaaaatccagccccacagctccctggagcactgctggaaaaagatgaagaagaaaacatgtctgtgaacttgatgttcctgggatgtttaatcaagagagacaaaattgctgaggagctcagggctggattggcaggtgtgggctcccacgccctcctccctccgctaaggcttccggctgagctgtgccagctgcttctgcccaccccgcctctgggctcacaccagccctggtggccaagcctgccccggccactctgtttgctcacccaggacctctgggggttgttgggaggagggggcccggctgggcccgagggtcccaaggcgtgcaggggcggtccagaggaggtgcccgggcaggggccgcttcgccatgtgctgtgcacccgtgccacgcgctctgcatgctcctctgcctgtgcccgctgcgctgccctgcaaaccgtgaggtcacaataaagtgtatttttttattggtgctg

SEQ ID NO: 1683 - DNA, 1400 bp, Homo sapiens; identical to SEQ ID NO: 1682

SEQ ID NO: 1684 - DNA, 422 bp, Homo sapiens
tcatcaacccactaatttggtcctacccagcaatggctcaatgcacaactattgcccacagcagactaaaattacttcagctttcaaatacattaacactgtgatatcttgtactattttcatcgtgggaatggtggggaatgcaactctgctcaggatcatttaccagaacaaatgtatgaggaatggccccaacgcgctgatagccagtcttgcccttggagaccttatctatgtggtcattgatctccctatcaatgtatttaaggtacagagcagttgcctcctggagtcgtgttcagggaattgggattcctttggtaactgccattgaaattgtctccatctggatcctgtcctttatcctggccattcctgaagcgattggcttcgtcatggtaccctttgaatataggggtgaa

SEQ ID NO: 1685 - DNA, 600 bp, Homo sapiens
ggaatgtgactcgcgcagcaacgcccctgcgacccttacttttgagaacatggccggggtcttcatgctggtagctgggggcatcgtggccgggatcttcctgattttcatcgagattgcctacaagcggcacaaggatgctcgccggaagcagatgcagctggcctttgccgccgttaacgtgtggcggaagaacctgcaggatagaaagagtggtagagcagagcctgaccctaaaaagaaagccacatttagggctatcacctccaccctggcttccagcttcaagaggcgtaggtcctccaaagacacgcagtaccatcccactgatatcacgggcccgctcaacctctcagatccctcggtcagcaccgtggtgtgaggcccccggaggcgcccacctgcccagttagcccggccaaggacactgatgggtcctgctgctcgggaaggcctgagggaagcccacccgccccagagactgcccaccctgggcctcccgtccgtccgcccgcccaccccgctgcctggcgccaccctgctggaccaaggtgcggaccggagcggctgaggacggggcagagctgagtcggctgggca

SEQ ID NO: 1686 - DNA, 600 bp, Homo sapiens; identical to SEQ ID NO: 1685

SEQ ID NO: 1687 - DNA, 600 bp, Homo sapiens
ttcaggagcacccggcacaatttcaactccatgcggttcccgctgctgggattctacctgcccctggccgtggtggtcttctgctccctgaaggtggtgactgccctggcccagaggccacccaccgacgtggggcaggcagaggccacccgcaaggctgcccgcatggtctgggccaacctcctggtgttcgtggtctgcttcctgcccctgcacgtggggctgacagtgcgcctcgcagtgggctggaacgcctgtgccctcctggagacgatccgtcgcgccctgtacataaccagcaagctctcagatgccaactgctgcctggacgccatctgctactactacatggccaaggagttccaggaggcgtctgcactggccgtggctccccgtgctaaggcccacaaaagccaggactctctgtgcgtgaccctcgcctaagaggcgtgctgtgggcgctgtgggccaggtctcgggggctccgggaggtgctgcctgccaggggaagctggaaccagtagcaaggagcccgggatcagccctgaactcactgtgtattctcttggagccttgggtgggcagggacggccaggtacc

SEQ ID NO: 1688 - DNA, 600 bp, Homo sapiens
ctaataatcctttcatatattaagattgggaagaatctattgaggatttctaaaaggaggtcaaaatttcctaattctggtaaatatgccactacagctcgtaactcctttattgtacttatcatttttactatatgttttgttccctatcatgcctttcgattcatctacatttcttcacagctaaatgtatcatcttgctactggaaagaaattgttcacaaaaccaatgagatcatgctggttctctcatctttcaatagttgcttagatccagtcatgtatttcctgatgtccagtaacattcgcaaaataatgtgccaacttctttttagacgatttcaaggtgaaccaagtaggagtgaaagcacttcagaatttaaaccaggatactccctgcatgatacatctgtggcagtgaaaatacagtctagttctaaaagtacttgaggtaaacatactaaaatgaattatataatgcagcctcttaattctttgaagaactaaaaaattaggaaacaaagttctagcatttacaaaactcagatctcaaagctctgcttgtatttgtgatatttcatttgcttaactgtaaaccat

SEQ ID NO: 1689 - DNA, 600 bp, Homo sapiens; identical to SEQ ID NO: 1688

SEQ ID NO: 1690 - DNA, 600 bp, Homo sapiens
ccttgcgctacctctggcgcgccgtcgacccggtggccgcgggctcgggtgcccggcgcgccaagcgcaaggtgacacgcatgatcctcatcgtggccgcgctcttctgcctctgctggatgccccaccacgcgctcatcctctgcgtgtggttcggccagttcccgctcacgcgcgccacttatgcgcttcgcatcctctcgcacctggtctcctacgccaactcctgcgtcaaccccatcgtttacgcgctggtctccaagcacttccgcaaaggcttccgcacgatctgcgcgggcctgctgggccgtgccccaggccgagcctcgggccgtgtgtgcgctgccgcgcggggcacccacagtggcagcgtgttggagcgcgagtccagcgacctgttgcacatgagcgaggcggcgggggcccttcgtccctgccccggcgcttcccagccatgcatcctcgagccctgtcctggcccgtcctggcagggcccaaaggcaggcgacagcatcctgacggttgatgtggcctgaaagcacttagcgggcgcgctgggatgtcacagagttggagtcattgttgggggaccgtgggccg

SEQ ID NO: 1691 - DNA, 600 bp, Homo sapiens
caagaggctgctgctggtgctggtgagcgctttctttatcttctggtccccgtttaacgtggtgctgttggtccatctgtggcgacgggtgatgctcaaggaaatctaccacccccggatgctgctcatcctccaggctagctttgccttgggctgtgtcaacagcagcctcaaccccttcctctacgtcttcgttggcagagatttccaagaaaagtttttccagtctttgacttctgccctggcgagggcgtttggagaggaggagtttctgtcatcctgtccccgtggcaacgccccccgggaatgatggaagacttcagctggaagctggaagccgtccttcttagtttgcttgtggcctcttaccttgactggcttctaaaaccctgccaaatcctgcctcttctttcaggaagtcttccagcaacccctcatctaaagctctgtggtagagacagctacttactccccagtgtccattcttccccgaccccccccttttttttttgagatagagtcttgctctgtcaccaggctggactgcagtggcgcgatctcggctcactgcaacctctgactttcctggttcaagcaatt

SEQ ID NO: 1692 - DNA, 600 bp, Homo sapiens; identical to SEQ ID NO: 1691

SEQ ID NO: 1693 - DNA, 1400 bp, Homo sapiens
cagccagcttaggtacacagattctgtttctggcgtctgcatacgcaagtccccaactcgctgaggagagctgttcagctatggctgctgtcacacattacctgtatctttgccagtttagctggatgctcattcagtctgtgaatttctggtacgtgctggtgatgaatgatgagcacacagagaggcgatatctgctgtttttccttctgagttggggactaccagcttttgtggtgattctcctcatagttattttgaaaggaatctatcatcagagcatgtcacagatctatggactcattcatggtgacctgtgttttattccaaacgtctatgctgctttgttcactgcagctcttgttcctttgacgtgcctcgtggtggtgttcgtggtgttcatccatgcctaccaggtgaagccacagtggaaagcatatgatgatgtcttcagaggaaggacaaatgctgcagaaattccactgattttatatctctttgctctgatttccgtgacatggctttggggaggactacacatggcctacagacacttctggatgttggttctctttgtcattttcaacagtctgcagggactttatgttttcatggtttatttcattttacacaaccaaatgtgttgccctatgaaggccagttacactgtggaaatgaatgggcatcctggacccagcacagcctttttcacgcccgggagtggaatgcctcctgctggaggggaaatcagcaagtccacccagaatctcatcggtgctatggaggaggtgccacctgactgggagagagcatccttccaacagggcagtcaggccagccctgatttaaagccaagtccacaaaatggagccacgttcccgtcctctggaggatatggccaggggtcactgatagccgatgaggagtcccaggagtttgatgatttaatatttgcattaaaaactggtgctggtctcagtgtcagtgataatgaatctggtcaaggcagccaggaggggggcaccttgactgactcccagatcgtggagctcaggaggatacccatcgccgacactcacctgtagcacctcactaaccattcgactgagcacactttcatatttgtatcagcttttgtgctaaaactctctaagtacatccacctgtgtaataggaacctgtgaattgtactggatgattaatacaaacgtgattgttgtatttggagtataaattactgattgtatgtgacctgaaaattcactgctataagaaaggtggagtcagtttgtatcagttaataggatgttcatattccaaggatattagttgtttttttaatcatcctatatggctaacattgtttaatgaaagtaataatcaataaagcaatagaatct

SEQ ID NO: 1694 - DNA, 1400 bp, Homo sapiens; identical to SEQ ID NO: 1693

SEQ ID NO: 1695 - DNA, 350 bp, Homo sapiens
gtctgtccccatctctcaatctcatgcttgagtctctctgtctccaactgcctgtcacttgtctttgtgtctctgtgactctcatttctttttttctgtctcctgctgtctctgtgtgggattccttgtctctctgcccctgccctccctctcctatctgaaccctggtctctgtgtcccttagggcttatcacaccgttctccccagagtcaccgggaggagagccgggactggacacaagccagggctgggacaatggcagtgcctagtctgtggccctggggagcatgcctgcctgtgatcttcctctccttgggatttggcctggatacagtagaggtgtgcccca

SEQ ID NO: 1696 - DNA, 600 bp, Homo sapiens
  misc_feature (363)..(363): n is a, c, g, or t
accagcctgtctcacagcaacctgcactcccccagtcccagcacacagaccccccagccatcagccatcctgtcaccctgctcctacaccaccgcggtctgcagccctcctgtacagagccctctggccgctcgaactttccactatgcctcccccaccgcctcccagctgtcactcatgcaacagcagccgcagcagcaggtacagcagtcccagccgccgcagactcagccacagcagccgtccccgcagccacagacacctggcagctccacgccgaaaaatgaagtgcacaagagcacgcaggcgcttcacaacaccaacctgacccgggaagtcaggccattttccgcctggcagccntcgctgccccatgaggtgtccactttgatttccagacctcatcccactgtgggggagtccctggcctccatccctcaacccgtgacggcggtccccggaacgggccttcaggcagggggcaggagcactgtcccgcagcgcgtcacctttttccgacagatgtcgtcgggagccatccccccgaaccgaggagtccttccagcaccccttccacttatcacaccccatcctaaaaaa

SEQ ID NO: 1697 - DNA, 600 bp, Homo sapiens; identical to SEQ ID NO: 1696
  misc_feature (363)..(363): n is a, c, g, or t

SEQ ID NO: 1698 - DNA, 600 bp, Homo sapiens
gatttattatcagagaagaaaaccatctcttttgctggctgcttcctacagatgtacttctttatctccctggcgacaaccgaatgcatcctctttgggttaatggcctatgaccggtatgcggccatatgtcgcccgctgctttactccttgatcatgtccaggaccgtctacctaaaaatggcagccggggcttttgctgcagggttgctgaacttcatggtcaacacaagccatgtcagcagcttgtcattctgtgactccaatgtcatccatcacttcttctgtgacagtcccccacttttcaagctctcttgttctgacacaatcctgaaagaaagcataagttctattttggctggtgtgaatattgtggggactctgcttgtcatcctctcctcctactcctacgttctcttctccattttttctatgcattcgggggaggggaggcacagagctttctccacgtgtgcctctcacctgacagccataattctgttctatgccacctgcatctatacttacctgagacctagttccagctactccctgaatcaggacaaagtggcttctgtgttctacacagtggtgattccc

SEQ ID NO: 1699 - DNA, 600 bp, Homo sapiens
cccctctcagtgcaatgaaaatcctgtggatggccacggactccagtgccactgtgaggaaggacaggcacctgtagcctgtgaagaaaccttacatgttaccaatatcaccatcttggttgttgtgcttgtcctggttattgtcggtatcggagttcttatactattagttcgttaccgaaaatgtatcaagttgaagcaagttcagagcccacctacagaaaccctgggagtggagaacaaaggatactttggtgatgagcagcagataaggactgagccaatcctgccagaaattcatttcctaaataaacctgcaagtaaagattcaagaggaatcgcagatcccaatcaaagtgccaagtgagcttgaagttggatatccaaaatggccgtgcaagcttaggctggggattctggatgcaacgtctttacaaccttacctagatatctgctactcacatttttggtagtgtttcaaacgttctttatccagacagacaatgtttaagagaaacaacttatttctgttaatatttaccggtagaattcacaccctctatcataaacatatgctgcagaaaaaaaaaaaaaaaaaaa

SEQ ID NO: 1700 - DNA, 600 bp, Homo sapiens; identical to SEQ ID NO: 1699

SEQ ID NO: 1701 - DNA, 600 bp, Homo sapiens
ccatgcacaaactcttcctggagatgctggaggccaaggcctgggccagggctgactcccttcaggagtggaggccactggagcaagtgccctctcccctccaccgagccaccaagaggcagcatgtgcatttcctaactcccttgccccctcccccatctgtggcctgggtgggcactgctcaggctggataccacctggaggttttccttccgcagagggcaggttggccaagagcagcttagaggatctcccaaggatgaaagaatgtcaagccatgatggaaaatgccccttccaatcagctgccttcacaagcagggatcagagcaactccccggggatccccaatccacgcccttctagtccaacccccctcaatgagagaggcaggcagatctcacccagcactaggacaccaggaggccagggaaagcatctctggctcaccatgtaacatctggcttggagcaagtgggtgttctgcacaccaggcagctgcacctcactggatctagtgttgctgcgagtgacctcacttcagagcccctctagcagagtggggcggaagtcctgatggttggtgtccatgaggtggaag

SEQ ID NO: 1702 - DNA, 600 bp, Homo sapiens
tttttcagggaatagtttaagctttattcattcatgcaatactaaagagaaataagaatactgcaattttgtgctggctttgaacaattacgaacaataatgaaggacaaatgaatcctgaaggaagatttttaaaaatgttttgtttcttcttacaaatggagatttttttgtaccagctttaccacttttcagccatttattaatatgggaatttaacttactcaagcaatagttgaagggaaggtgcatattatcacggatgcaatttatgttgtgtgccagtctggtcccaaacatcaatttcttaacatgagctccagtttacctaaatgttcactgacacaaaggatgagattacacctacagtgactctgagtagtcacatatataagcactgcacatgagatatagatccgtagaattgtcaggagtgcacctctctacttgggaggtacaattgccatatgatttctagctgccatggtggttaggaatgtgatactgcctgtttgcaaagtcacagaccttgcctcagaaggagctgtgagccagtattcatttaagagaattccaccacactggcggcccgcgcttgat

SEQ ID NO: 1703 - DNA, 600 bp, Homo sapiens; identical to SEQ ID NO: 1702

SEQ ID NO: 1704 - DNA, 600 bp, Homo sapiens
gttaccatggtgacatttttgaatggtgtgccacgtcttggctcaccagtgcctattttactggctttattgtttgcttactttatgctcctgctgcctttgttgtctgcttcacctacttccacattttcaaaatttgccgtcagcacaccaaagagataaatgaccgaagagcccgattccctagtcatgaggtagattcttccagagagactggacacagccctgaccgtcgctacgccatggttttgtttaggataaccagtgtattttatatgctgtggctcccctatataatttactttcttctagaaagctcccgggtcttggacaatccaactctgtccttcttaacaacctggcttgcagtaagtaatagtttttgtaactgtgtaatatacagcctctccaacggcgttttccggctaggcctccgaagactgtttgagacaatgtgcacatcctgtatgtgtgtgaaggatcaggaagcacaagaacccaaacctaggaaacgggctaattcttgctccatttgaagagagctacatagtaaatcaaatgtaatctgacagtggttttggatcatattctagattcatc

SEQ ID NO: 1705 - DNA, 600 bp, Homo sapiens
attccagtcattaaaagattgctacttctatgttggtcggtccctggagcatttgccttcggggcggtcttctcagaggcctatgcagatggaatagagggctatgacatcttggttgcttgttccagttcctgcccagtgatgttcaacaagctatgggggaccaccttgtttatggcaggtttcttcactcctgggtctatgatggtggggatttacggcaaaatttttgcagtatccagaaaacatgctcatgccatcaataacttgcgagaaaatcaaaataatcaagtgaagaaagacaaaaaagctgccaaaactttaggaatagtgataggagttttcttattatgttggtttccttgtttcttcacaattttattggatccctttttgaacttctctactcctgtagttttgtttgatgccttgacatggtttggctattttaactccacatgtaatccgttaatatatggtttcttctatccctggtttcgcagagcactgaagtacattttgctaggtaaaattttcagctcatgtttccataatactattttgtgtatgcaaaaagaaagtgagtaggctttttctgca

SEQ ID NO: 1706 - DNA, 600 bp, Homo sapiens
gttaggtagttacctctgattcttgaggaatgatggatgagtagccaaggaagtaagaacacatcatgccaggtagatagtagaggagatttaaactagataatgtagtttaaggtaactctagttttttcaatatggtatgagtgcaaggtagaacttggggagacaaggaaaatatgaatatcaaaaatggctattaatgttgtgcagagttgctggactttattccaaaagctataatgtgccactggagagtattcatttgtttgcttgtgttctacaagtaagacgtgtgtgtgtgtgtgtgtgtgtgtgtgtgtgtgtctgctgggcatgtggcagcataccacacagcaaatataaataagtctagggctattgtgttagtgaagaggaggactatattgtctaaaattagtggcataagaatttacggctagtcaattgttcttgaaaaacctcaggtcatagatcatttttttcaaggttatggaaaatattcacatatgggcagatgtccatactttgatttaccagattaaaaccactgcaaatataagaaatattggattgcttgtcatacacccacctggtggatcc

SEQ ID NO: 1707 - DNA, 600 bp, Homo sapiens; identical to SEQ ID NO: 1706

SEQ ID NO: 1708 - DNA, 600 bp, Homo sapiens
taccttctgacagccatggaatatgaccgttatgttgctatctgtcgcccactgctttacaatattgtcatgtcccacagggtctgttccataatgatggctgtggtatactcactgggttttctgtgggccacagtccatactacccgcatgtcagtgttgtcattctgtaggtctcatacggtcagtcattatttttgtgatattctccccttattgactctgtcttgctccagcacccacatcaatgagattctgctgttcattattggaggagttaataccttagcaactacactggcggtccttatctcttatgctttcattttctctagtatccttggtattcattccactgaggggcaatccaaagcctttggcacttgtagctcccatctcttggctgtgggcatcttttttgggtctataacattcatgtatttcaagcccccttccagcactactatggaaaaagagaaggtgtcttctgtgttctacatcacaataatccccatgctgaatcctctaatctatagcctgaggaacaaggatgtgaaaaatgcactgaagaagatgactaggggaaggcagtcatcctga

SEQ ID NO: 1709 - DNA, 487 bp, Homo sapiens
tgtagccatatgtaatcccttgctttatccagtgatgatgtccaacaaactcagcgctcagttgctaagtatttcatatgtaattggtttcctgcatcctctggttcatgtgagtttactattgcgactaactttctgcaggtttaacataatacattatttctactgtgaaattttacaactgttcaaaatttcatgcaatggtccatctattaacgcactaataatatttatttttggtgcttttatacaaatacccactttaatgactatcataatctcttatactcgtgtgctctttgatattctgaaaaaaaagtctgaaaagggcagaagcaaagccttctccacatgcggcgcccatctgctttctgtctcattgtactacggaactctgatcttcatgtatgtgcgtcctgcatctggcttagctgaagaccaagacaaagtgtattctctgttttacacgattataattcccctgcta

SEQ ID NO: 1710 - DNA, 487 bp, Homo sapiens; identical to SEQ ID NO: 1709

SEQ ID NO: 1711 - DNA, 487 bp, Homo sapiens
tgtggccatctgtaaaccccttcattatgtggtcatcatgaacaacagggtgtgtaccttattagttctctgctgttgggtggctggcttgatgatcattgttccaccacttagcttaggcctccagctcgaattctgtgactccaatgccattgatcattttagctgtgatgcaggtcctctcctaaagatctcatgctcagatacatgggtaatagaacagatggttatacttatggctgtatttgcactcattatcaccccagtttgtgtgattctgtcctacttgtacatagtcagaacaattctgaagttcccttctgttcagcaaaggaaaaaggccttttctacctgttcatcccacatgattgtggtttccattgcctatggaagctgcatcttcatctatatcaagccctctgcaaaagatgaggtggccataaataaaggagtttcagttcttactacttctgtcgcacccttgttg

SEQ ID NO: 1712 - DNA, 487 bp, Homo sapiens; identical to SEQ ID NO: 1711

SEQ ID NO: 1713 - DNA, 487 bp, Homo sapiens
tgttgccatctgcaagccccttcattacacatccatcatgaacaggaaactctgcactctacttgtgctgtgtgcctggctaagtgggtttctgaccattttcccaccccttatgcttctcctccagctggattactgtgcttccaacgtcattgatcactttgcatgtgactattttcccctcttacaactatcttgttcagatacatggctcctagaagtaattggtttttactttgctttggttactttgctgttcactttggcattagtgattttatcttacatgtacattatcaggaccattttgagaatcccgtctgccagtcaaagaaaaaaggctttctccacttgttcttctcacatgattgtcatttccatttcttatggaagctgtatattcatgtatgctaatccatctgcaaaagaaaaggcatcattgacaaaaggaatagctattctcaatacatctgttgcccccatgctg

SEQ ID NO: 1714 - DNA, 487 bp, Homo sapiens; identical to SEQ ID NO: 1713

SEQ ID NO: 1715 - DNA, 1400 bp, Homo sapiens
gcatgtcttcaaattagtggaacttagttcagggacatagaagagtcttaatgaattaaaatcattcacttgattaaatgtctgtaaatcttcatcattcctactgtagtttatttaatatctattgtaaattatgtgacttgtagcttcctctggttttcaagtaaactcaacaaggtggagtcttacctggttttcctttccaagcattgtaaattgtataccaaagatattagttattacttctgtgtgtacaaagaggattattttattatgtttattaatcacctctaatactcatccacatgaagggtacacattaggtaagctgggcgttgactcatgcgcagtctcagtcacccgtgttatcttcgtggctcaaaggacaatgcaaaatcgccgatcagagctcatacccaaagcattacagagaacagcagcatcattgccctccccagctgaaaaacaagttggctagaagatacatggagaggaatggtgtggtcaacagttaatgaaacggttctatcatgcatgtgtaatgtggatggagacaattataagatttgactataactatttggagggtctttaacattgccaaaaaaacaaatatgttgatttttattttattttattttttattttaagaggcgggatcttgatctcacatgttgcccaggctggccttgaactcctgggctcaagcattcctcctgcctcagcctcccccatagctgggactaggggtgcatgccagcatacctggctacgttgactcttaaaatctatgttctcttattttaaagatacagtgctccccactgaaaattaaacctaaaaaatgtcacatattggtatgttgttaacctggtagattaaatcatgagaatgattagaaagacgggcaacacagcgggttacatccacactgctgatcacaccaacgacaggagctgataagcaagaaagcgtcacagccagcgtctgttcacccaaggttgacaagtgaagtttctctaatgttgattgttagccgatttgtaacctggcatttacttagcaactgccttatcaattacaggatttgccggtaaaagcagactcaaatataaaggtttttggcttaacttggtttattatagttgctctatgtttgtaaacagacaatctctaatgtctgattatttgtatcacagatctgcagctgccttggacttgaatccatgcaatgtttagagtgtgaagtcagttacttgttgatgttttcttactgtatcaatgaaatacatattgtcatgtcagttcttgccaggaacttctcaacaaaatggaattttttttttcagtatttcaataaatattgatatgcccagcctgataaaaaaaaaaaaaaaaaa

SEQ ID NO: 1716 - DNA, 1400 bp, Homo sapiens
ttgacggcgacagtgacagcgacagccaaagcagggtccgaaaccaaggcgggctgccaggtggggctggaccacgtgagcaaaatctgggcgaggcggagctttggagggcgacggggcctgctggagtgggtgggactgaaatgaaggtgagggtgagaaggaagctggaaatggagttgagctgggagcggaggtcaggtggggactgggctggagactggggggactcgcctttttctctgaccgcccaccctttgtgctcaggggctgttcaccagaacgggcgttgccggcctgagactggcgcggttggcgaagacagcgatggctgctacgtgcaacttccacgttcccggcctgccctggagctgacggcgctgacggctcctgggccgggatccggctcccggcccacccaggccaagctgctggctaagaagcgcgtggtgcgaatgttgctggtgatcgttgtgcttttttttctgtgttggttgccagtttatagtgccaacacgtggcgcgcctttgatggcccgggtgcacaccgagcactctcgggtgctcctatctccttcattcacttgctgagctacgcctcggcctgtgtcaaccccctggtctactgcttcatgcaccgtcgctttcgccaggcctgcctggaaacttgcgctcgctgctgcccccggcctccacgagctcgccccagggctcttcccgatgaggaccctcccactccctccattgcttcgctgtccaggcttagctacaccaccatcagcacactgggccctggctgaggagtagaggggccgtgggggttgaggcagggcaaatgacatgcactgacccttccagacatagaaaacacaaaccacaactgacacaggaaaccaacacccaaagcatggactaaccccaacgcacaggaaaaggtagcttacctgacacaagaggaataagaatggagcagtacatgggaaaggaggcatgcctctgatatgggactgagcctggcccatagaaacatgacactgaccttggagagacacagcgtccctagcagtgaactatttctacacagtgggaactctgacaagggctgacctgcctctcacacacatagattaatggcactgattgttttagagactatggagcctggcacaggactgactctgggatgctcctagtttgacctcacagtgccccttcccaatcagcactgaaaataccatcaggcctaatctcatacctctgaccaacaggctgttctgcactgaaaaggttcttcatccctttccagttaaggaccgaggccctgccctctccttccttacccaaactgttcaagaaataataaattgtttggcttcctcctgaaaaaaaaaaaaaaaaaa

SEQ ID NO: 1717 - DNA, 1400 bp, Homo sapiens; identical to SEQ ID NO: 1716

SEQ ID NO: 1718 - DNA, 600 bp, Homo sapiens
atgacccagtcgtcctgggtgtccagaggcatgtgaccagtgcctatgccactgtgagccctttggtgctaataaggtctgaaaaaaggataactgatattctgcaaatgatgagacagaatgtattgtatattttttctatgagaataattatctgaaaaggagattctaacatcagttaaattattcaagtatcagaggatttgatattttatttcattgcaaacactgtcattttatgtaaatcatttggaaactgatgctgccaaagacttgatggatcctttagttcattgtccaccatgatttcatagcccagtatgtgtgcagtttcttgcatttcattttgatttcttgaacttcattttaatttttttctttttgaagtatattcttaataacctcatattggtaataagatttctcatttatttacttttggaaatcatttagtgcatccttacttattcaaaatatgttagtgaagtatctaattattggttgaacagtaacttctctcagcactcttacttatttctctgttttctggctgaacacagctgtggagactttgctctcaccttcgttggttctctcttc

SEQ ID NO: 1719 - DNA, 600 bp, Homo sapiens
ataagaggcatctccctctgtcccccctggctcttgagtgtgctccaggccatcaccgtcagtcccagaaactcatggttggcaaggtttaaacataaatttacaaattacattaccaatgtttttcttcttttttggttcttcaatttgtcttttagtagcagcctaatcttcttcactgtgtatttttcaaatgtgactcagactgatctattgaatgtcagtaaacactgctcacttttccccatgaacctcatcatcagggagtgaaattatccagggatgccttccttgtcagagttatgctgctctcaagtgcattcatgtggatcctctttttcagaaatcagaagcaatcccagctccacagcaccagcatctctccaagaatctcctcagagaaaagggccacccagaccatcctgctgttatgagttgctttgtggtcatgtatcctatgaaccttcttatttcaacatcctcaatcctgttatgggtgtatgacccagttgtcctgaatttccggaggcttgtgctcaatgcatatgccactgttattccactgggacaaattagttctgattaaaaaaaaaagtattc

SEQ ID NO: 1720 - DNA, 600 bp, Homo sapiens
gtcatcctgagcatctagaaccttgttgcctgtgtctatgccactctcgttccattggtacaaatccgctctgataaaagaatagtcaatattctccaaaaaatggaattaaagtgctataattttttaatgtgttggtgatgaaaaatatttctaaaaattagtctcattctatagttaaattgttcaagtagccccagatttagcttactgagtttaaataaaatgcgtggaattacacttttattatatttttatgcttctgaaactgaggcatctaaggactatgtagtttcttcagttcaatgttcaccatagattgacatttcagatatcaagtcttttgcacttttatttttatgttaactttgtacaagaaaatgtttctctctttttgaagtacattcttaaaaaatttgttttggtatcaatctctcaatgtttttacttttgaaaatatttacttactctgtttatgaatgatactttagctcaatattcaattctagcttttaagccatgcttgctcattgtacctccctgactaaaaaaaattatgtctatttggattttaaatttaatctagaattcattttaacg

SEQ ID NO: 1721 - DNA, 600 bp, Homo sapiens; identical to SEQ ID NO: 1720

SEQ ID NO: 1722 - DNA, 600 bp, Homo sapiens
  misc_feature (309)..(309): n is a, c, g, or t
  misc_feature (321)..(341): n is a, c, g, or t
  misc_feature (367)..(367): n is a, c, g, or t
  misc_feature (394)..(394): n is a, c, g, or t
  misc_feature (400)..(400): n is a, c, g, or t
  misc_feature (541)..(541): n is a, c, g, or t
attatgttgtgaaattgttagtattcatttatcaaaaatgacctatgtttagtcacatatttgtttagttctgggaaattgttatagcttaaatggaactcaccaacattattcatagtttaagtcttttatcattattacctcaattataaatattacaaaaacataattctggcaatgagagtatttttttattcaatgatcaaggagcaatgtcagtatatagtagaatatcaattaaattatatcctaaaatgtatattttgcataaaagagatattctttaatcaattacttttttgtgagttntgtggcgaatgnnnnnnnnnnnnnnnnnnnnnctgttgtagatgaaactgtataaganttttacatcttgcttaatcaatatttncagagnctattagttcccctgggattctgaatataacatatagcctattataaatccctgtatcgtggaccttttgtgaacatttcaaggcgcatgcacaaccttgatgataaccagtggaaatgtaactaactgaaatgaagaatnaaaggcaaatgagctggggataaacttgaatgttatctgattaaattactcaaattatt

SEQ ID NO: 1723 - DNA, 600 bp, Homo sapiens; identical to SEQ ID NO: 1722
  misc_feature (309)..(309): n is a, c, g, or t
  misc_feature (321)..(341): n is a, c, g, or t
  misc_feature (367)..(367): n is a, c, g, or t
  misc_feature (394)..(394): n is a, c, g, or t
  misc_feature (400)..(400): n is a, c, g, or t
  misc_feature (541)..(541): n is a, c, g, or t

SEQ ID NO: 1724 - DNA, 600 bp, Homo sapiens
tacctcctccccatgactgtcatcagtgtcctctactacctcatggcactcagactaaagaaagacaaatctcttgaggcagatgaagggaatgcaaatattcaaagaccctgcagaaaatcagtcaacaagatgctgtttgtcttggtcttagtgtttgctatctgttgggccccgttccacattgaccgactcttcttcagctttgtggaggagtggagtgaatccctggctgctgtgttcaacctcgtccatgtggtgtcaggtgtcttcttctacctgagctcagctgtcaaccccattatctataacctactgtctcgccgcttccaggcagcattccagaatgtgatctcttctttccacaaacagtggcactcccagcatgacccacagttgccacctgcccagcggaacatcttcctgacagaatgccactttgtggagctgaccgaagatataggtccccaattcccatgtcagtcatccatgcacaactctcacctcccaacagccctctctagtgaacagatgtcaagaacaaactatcaaagcttccactttaacaaaacctgaattctttcagagctgactctcctc

SEQ ID NO: 1725 - DNA, 600 bp, Homo sapiens; identical to SEQ ID NO: 1724

SEQ ID NO: 1726 - DNA, 570 bp, Homo sapiens
tcatcttgtacactatagcttcttccagtgtgaccctgagcaatcttctgcatatcagtaaatactgttcgcttttctatcatcagaagactgtttcttactctgtcattacccagagatgttttgcttataaggataatgctgctttcaagtacatgcatggtggttcttttgtttaggcaccagatgaaattttggtactttcacagcaccagcctctccccaagaccttccccagagaaaagtgccactcagaccatcctgctcctagtgagtatctttgtggtcatctactgggttgatttcatcatcttattcacctcaacctcgctatgggcatatgaccctgttgtcctgggtgtccagaggcttgtgggcaatgtgtatgccactgtcagtccttttgtgctactcagatctgataaaaagataatcagcgtgatgaaaacggtgagacagaaagttaacaagttatttttattaaaaacagattattctgtcaccacttaaattatttaagtagtacagaacttgccatctaatttaacttaaatgtatcgacttacagtt

SEQ ID NO: 1727 - DNA, 570 bp, Homo sapiens; identical to SEQ ID NO: 1726

SEQ ID NO: 1728 - DNA, 526 bp, Homo sapiens
tactgagaaagaaactgagaaccccaagaagtgaaagatgcaatgtgtgaatttctgtttaattcttgccaaccaggaggtgccgggggtaatggtgacagcctggagcacactccggaggcaggtggtgcagatggagagccctcatccctctatgcatgtagaagaataccttacacttgaagtcattctgaaaatactgtgactcaaagaggtccagagatgccaagaagctcacagtgaggagcatcactaagtggacaagggccaggtgacaggtgatgaggtcagtgggcttaggcctgcagtccagagggagtgtgcagatacagaagaaaaggaggaaggtgttggctgtgagtctaataccagcttgggaaaaaagggcaatttttaatagtgtcataagtggactatggtcgtcttaatggtgaagagggatcatattttatatatctgaaaaagcaatagatatcctatcatcagtattatttattgcacggtcaaaattattaccaatattatc

SEQ ID NO: 1729 - DNA, 600 bp, Homo sapiens
accccgtgacttactcacctgtcacctggcccttgtccacattcagatgctcctcactgcagtggattttttgcctctagacatatttgaatcactgcattttgggaatgactttaagtgtaaggcacttttttacacaaacagggcaatgaagggcctctccatctgcaccacctgccttctgaacatgctccaggccatcagcatcagccccagcacctcctggttggcaaggtttaaacataaatccacaaattacattttgcatgttttcttcttttgggtgtgcttcaatttgtccttcagtagttggccaatctttatctctgtgcattcttccaacacgacccatatcaagctacagaatgtcagtaaatactgccactttcccccatgaactccacaatcaggggagtgtttttcactgtgacattatccaagtatgtctcctgtgtagtacttatgctgctctcaagggcatacatggtgattctcctgcccaggcattggaggcaatcccagcacctccatagcacccacctctccccaagaccctccccagacgaaaagggccacccagaccatcctgctgctggtgag

SEQ ID NO: 1730 - DNA, 600 bp, Homo sapiens; identical to SEQ ID NO: 1729

SEQ ID NO: 1731 - DNA, 1277 bp, Homo sapiens
ggccgaactgctgtatgggctctactgccagtgtgacctcaccctctccagtcacccctcctcagttccagctatgagttcctgcaacttcacacatgccacctttgtgcttattggtatcccaggattagagaaagcccatttctgggttggcttccccctcctttccatgtatgtagtggcaatgtttggaaactgcatcgtggtcttcatcgtaaggacggaacgcagcctgcacgctccgatgtacctctttctctgcatgcttgcagccattgacctggccttatccacatccaccatgcctaagatccttgcccttttctggtttgattcccgagagattagctttgaggcctgtcttacccagatgttctttattcatgccctctcagccattgaatccaccatcctgctggccatggcctttgaccgttatgtggccatctgccacccactgcgccatgctgcagtgctcaacaatacagtaacagcccagattggcatcgtggctgtggtccgcggatccctcttttttttcccactgcctctgctgatcaagcggctggccttctgccactccaatgtcctctcgcactcctattgtgtccaccaggatgtaatgaagttggcctatgcagacactttgcccaatgtggtatatggtcttactgccattctgctggtcatgggcgtggacgtaatgttcatctccttgtcctattttctgataatacgaacggttctgcaactgccttccaagtcagagcgggccaaggcctttggaacctgtgtgtcacacattggtgtggtactcgccttctatgtgccacttattggcctctcagttgtacaccgctttggaaacagccttcatcccattgtgcgtgttgtcatgggtgacatctacctgctgctgcctcctgtcatcaatcccatcatctatggtgccaaaaccaaacagatcagaacacgggtgctggctatgttcaagatcagctgtgacaaggacttgcaggctgtgggaggcaagtgacccttaacactacacttctccttatctttattggcttgataaacataattatttctaacactagcttatttccagttgcccataagcacatcagtacttttctctggctggaatagtaaactaaagtatggtacatctacctaaaggactattatgtggaataatacatactaatgaagtattacatgatttaaagactacaataaaaccaaacatgcttataacattaaaaaaaaaaggc

SEQ ID NO: 1732 - DNA, 1286 bp, Homo sapiens
aaatgacaaatggcctccaaggattttgcaataggcatgatcttattatctcagatcatggtcggattcctggggaatttctttcttctctaccactatagtttcctttgtttcaccagaggtatgttacagtccacagatctgattctcaagcacctgaccatagccaactccttggttatactctctaaaggaatcccacaaacaatggctgcttttgggttgaaagattccctcagtgatattggatgcaaatttgtgttttatgttcacagagtgggcagggctgtgtgcgttggcaatgcctgcctcctgagtgtctttcaggtcatcaccatcagccccagtgaattcaggtgggcagagctgaagctacatgctcacaaatacatcaggtcttttatcctggtcctgtgctggattctgaacacgctggtaaatattactgttcttctacatgtgactggcaagtggaacagcataaatagcacaaagacaaatgattatggatattgttctggaggaagtaggagcagaattccacattcattacatattgtcttgttatcatcccttgatgttttgtgtttggggctcatgaccttggccagtggctccatggtttttatcctgcacaggcacaagcagcaggtccagcacattcatgggaccaacctctccgccagatcctcccctgagtccagagtcacccaaagcatcctggtcctggtgagcaccttgtgttactttactcgctctcctccatctttacatatgtctctttttcctaatcccagttggtggctgttgaacacctctgcactgatcactgcctgttttcccatggtcagcccctttgtgctcatgagccgccatcccaggatacccaggctgggctctgcctgctgtggaaggaatccacagtttcctaagctggtcagatagttctccgatttatgtggattgtcttctttttgtataatgaatggccgtttgttgatttcttcctgcaggttaagcaccgcaatgggcagtcaattgcagtgtatataagactcagaatccgtctttgcccttcaaggatttttcacgtatcataaacaacagttacagatgaaatgtttttgcaaagtgctttcataattttcattttgtttgtaatttcataattttcattttgttaatgttgcaatggagaagttaagaggcaaattattaattaaaaatgggcctctaataagttggaacaatgcaactttaaaccaattaataaaaaatgtcatgga

SEQ ID NO: 1733 - DNA, 600 bp, Homo sapiens
gtctactgaggaccctgggacttaagaagaagggcggggagagtgccattgcctgtttgggagacaaaaatgaacgaaaacaggtgactttggaaagcaaagtcaaaacccagtttaggatgtagcacctgccccaggattcctgccctcggctttgccccagacccttattccagatgctgagagtgaccaggacagcagctcctgaggcccagtggtcttctttccaacaggaaaagaaggctgtgatgtcgctgtcaggatcatgccctgtggcacagcacaggtggtgggaggtggttttctgactgagatgttgcctgatggatggaaagaaatgtatttttaagttcaaaaagcattatcctgtggcgttgcctggacatccactccctgacagcccagagcagcactgtctggcttcccttcatgcttgtggctttgttgtgtttgatcagaattttgggggaaatggaaagttttcctcaaggagcagctgggggcagaataggtagtatttaagcaaatacttaagtccaagcaaatcatccccattaaaaagcttttcctgtaggctagtaggaaaaaaaaaaaaaaaaa

SEQ ID NO: 1734 - DNA, 600 bp, Homo sapiens; identical to SEQ ID NO: 1733

SEQ ID NO: 1735 - DNA, 600 bp, Homo sapiens
tgtgtgatgatcttcattagttggagtgtccctgctgtttttgcatttggaatgatctttctggagctaaacttcaaaggcgctgaagagatatattacaaacatgttcactgcagaggaggttgctctgtcttctttagcaaaatatctggggtactgacctttatgacttctttttatatacctggatctattatgttatgtgtctattacagaatatatcttatcgctaaagaacaggcaagattaattagtgatgccaatcagaagctccaaattggattggaaatgaaaaatggaatttcacaaagcaaagaaaggaaagctgtgaagacattggggattgtgatgggagttttcctaatatgctggtgccctttctttatctgtacagtcatggacccttttcttcactacattattccacctactttgaatgatgtgttgatttggtttggctacttgaactctacatttaatccaatggtttatgcatttttctatccttggtttagaaaagcactgaagatgatgctgtttggtaaaattttccaaaaagattcatccaggtgtaaattatttttggaattgagttcatag

SEQ ID NO: 1736 - DNA, 600 bp, Homo sapiens; identical to SEQ ID NO: 1735

SEQ ID NO: 1737 - DNA, 600 bp, Homo sapiens
taggacccagttttgattcagtggagcctggcagcctcctacacaggttagagcaactactaattcctcaattccttcttcgttggctcccgtgtaaaagatcgaaaagctgtatgtgacagaaaagaaccaggaaagaacaatgcatatccctgaaactgacacagtaaacttggttggataggtcagaggatcagtaacagcaatgtatctatcaacagagatacagcataaatgaaataaagaagcaaaacagaaggatgtgtcaaaacatgtatggaatttacagtaactgtccccaaagtaccaacagctctccacagacctcactgtgctgaagggcatcacagtgactcccaccaagaagtcagcacaggccagcgacgcaatcagaaagtttgtaggtgtgtgcagttgtttgaagtgaaggatagcaatcatgaccagtaagtttccaaacgctgccagcacagccccaaaaccaaggacggcgtagaggatagatcgaggacctggcgagtaaggagttttaatgcaggattcgttcacgttcttgtaacacagctccacagcctcagcttgggagaaattattcaccat

SEQ ID NO: 1738 - DNA, 600 bp, Homo sapiens; identical to SEQ ID NO: 1737

SEQ ID NO: 1739 - DNA, 1038 bp, Homo sapiens
atgagcagcaattcatccctgctggtggctgtgcagctgtgctacgcgaacgtgaatgggtcctgtgtgaaaatccccttctcgccgggatcccgggtgattctgtacatagtgtttggctttggggctgtgctggctgtgtttggaaacctcctggtgatgatttcaatcctccatttcaagcagctgcactctccgaccaattttctcgttgcctctctggcctgcgctgatttcttggtgggtgtgactgtgatgcccttcagcatggtcaggacggtggagagctgctggtattttgggaggagtttttgtactttccacacctgctgtgatgtggcattttgttactcttctctctttcacttgtgcttcatctccatcgacaggtacattgcggttactgaccccctggtctatcctaccaagttcaccgtatctgtgtcaggaatttgcatcagcgtgtcctggatcctgcccctcatgtacagcggtgctgtgttctacacaggtgtctatgacgatgggctggaggaattatctgatgccctaaactgtataggaggttgtcagaccgttgtaaatcaaaactgggtgttgacagattttctatccttctttatacctacctttattatgataattctgtatggtaacatatttcttgtggctagacgacaggcgaaaaagatagaaaatactggtagcaagacagaatcatcctcagagagttacaaagccagagtggccaggagagagagaaaagcagctaaaaccctgggggtcacagtggtagcatttatgatttcatggttaccatatagcattgattcattaattgatgcctttatgggctttataacccctgcctgtatttatgagatttgctgttggtgtgcttattataactcagccatgaatcctttgatttatgctttattttacccatggtttaggaaagcaataaaagttattgtaactggtcaggttttaaagaacagttcagcaaccatgaatttgttttctgaacatatataa

SEQ ID NO: 1740 - DNA, 600 bp, Homo sapiens
accgtgtctgtgtcgggaatttgcatcagcgtgtcctggattctgcctctcacgtacagcggtgctgtgttctacacaggtgtcaatgatgatgggctggaggaattagtaagtgctctcaactgcgtaggtggctgtcaaattattgtaagtcaaggctgggtgttgatagattttctgttattcttcatacctacccttgttatgataattctttacagtaagatttttcttatagctaaacaacaagctataaaaattgaaactactagtagcaaagtagaatcatcctcagagagttataaaatcagagtggccaagagagagaggaaagcagctaaaaccctgggggtcacggtactagcatttgttatttcatggttaccgtatacagttgatatattaattgatgcctttatgggcttcctgacccctgcctatatctatgaaatttgctgttggagtgcttattataactcagccatgaatcctttgatttatgctctattttatccttggtttaggaaagccataaaacttattttaagtggagatgttttaaaggctagttcatcaaccattagtttatttttagaataa

SEQ ID NO: 1741 - DNA, 600 bp, Homo sapiens
aataattatgaaattgtcaggctgcttctctcccatggagctaatgtcaattgttattttatgcatgtgaatgacactcgtttccccagtgtcattcaatatgctctaaacgacgaggtaatgctgaggctattgctgaataatggctatcaagtggagatgtgctttgactgcatgcatggtgacatctttggaaattcatttgtgtggtcagagatacaggaagaggtgctgccaggatggacatcttgtgtaataaaagataacccgttctgtgagtttattacagttccttggatgaagcacttggtaggcagagttactcgtgtactaatagattacatggattatgttcctctgtgtgctaaactgaagtctgcactagaagtacagagagaatggccagaaatccgccaaatactagagaatccttgttcattgaagcatttgtgtcggttaaaaattcgaaggcttatgggtctccagaaactctgccagccagcctcagtggagaagcttcctctaccaccagctattcaaagatacatattatttaaagagtatgatctctatggacaagagctaaaattgacataactt

SEQ ID NO: 1742 - DNA, 600 bp, Homo sapiens; identical to SEQ ID NO: 1741

SEQ ID NO: 1743 - DNA, 600 bp, Homo sapiens
cagtttgactgtgtgcggctgctgctgaccttcggagccaaggctaatgtgctgactgaggagggcacgactcctttgcacctctgcacgatccccgagtccttgcagtgcgccaagttgctgctggaagcaggagcgacggtgaacctggcagcaggcgagagccaggagacgcccctgcacgtggcggcggcgcgcggcctggagcaacatgtggctctgtacctggagcatggcgccgacgtgggcctgcgcaccagccagggcgagactgcgctgaacgcggcgtgcgctggggccgagggcccaggtagctgcaggcgacaccaggctgcggcgcgccggctcctggaggctggagctgatgcccgggcggccgggcgcaagcgccacacgccgctgcacaacgcttgtgccagcggctgcgggggcctggccgagctgctgctgcgttacggggcccgcgctgaggtccccaatggggcgggccacacgcccatggactgtgcgctgcaggccgtccaggacgcccccaactgggagcctgaagtccttttcgccgcactgctggactacggggcgcagccagtgcgccctgag

SEQ ID NO: 1744 - DNA, 600 bp, Homo sapiens; identical to SEQ ID NO: 1743

SEQ ID NO: 1745 - DNA, 600 bp, Homo sapiens
tccatcgcagccatcctcatcctcatgtttacctgcctcttcctcttctccgcggtcctccgggcactgttccgcaaatctgaccccaagcgcttccagaacatcttcaccaccatcttcaccctcttcaccttgctcacgctggatgactggtccctcatctacatggacagccgtgcccagggcgcctggtacatcattcccatcctcataatttacatcatcatccagtacttcatcttcctcaacctggtgattactgtcctggtggatagcttccagacggcgctgttcaaaggccttgagaaagcgaagcaggagagggccgcccggatccaagagaagctgctggaagactcactgacggagctcagagctgcagagcccaaagaggtggcgagtgaaggcaccatgctgaagcggctcatcgagaaaaagtttgggaccatgactgagaagcagcaggagctcctgttccattacctgcagctggtggcaagcgtggagcaggagcagcagaagttccgctcccaggcagccgtcatcgatgagattgtggacaccacatttgaggctggagaagaggacttcaggaattga

SEQ ID NO: 1746 - DNA, 600 bp, Homo sapiens; identical to SEQ ID NO: 1745

SEQ ID NO: 1747 - DNA, 600 bp, Homo sapiens
gctgacctgcatctctgtgcaccagttcctaggtgtgtgccacccactgtgttcgctgccctaccggacccgcaggcatgcctggctgggcaccagcaccacctgggccctggtggtcctccagctgctgcccacactggccttctcccacacggactacatcaatggccagatgatctggtatgacatgaccagccaagagaattttgatcggctttttgcctacggcatagttctgacattgtctggctttctttccctccttggtcattttggtgtgctattcactgatggtcaggagcctgatcaagccagaggagaacctcatgaggacaggcaacacagcccgagccaggtccatccggaccatcctactggtgtgtggcctcttcaccctctgttttgtgcccttccatatcactcgctccttctacctcaccatctgctttctgctttctcaggactgccagctcttgatggcagcccagtgtggcctacaagatatggaggcctctggtgagtgtgagcagctgcctcaacccagtcctgtactttctttcaaggggggcaaaaatagagtcaggctcctccagaaactga

SEQ ID NO: 1748 - DNA, 600 bp, Homo sapiens; identical to SEQ ID NO: 1747

SEQ ID NO: 1749 - DNA, 600 bp, Homo sapiens
ttttatggccatttactgaaaaaatttcgccagcccaactttgctagaaaactatgcatttacatatggggagttgtactgggcataatcattccagttaccgtatactactcagtcatagaggctacagaaggagaagagagcctatgctacaatcggcagatggaactaggagccatgatctctcagattgcaggtctcattggaaccacatttattggattttcctttttagtagtactaacatcatactactcttttgtaagccatctgagaaaaataagaacctgtacgtccattatggagaaagatttgacttacagttctgtgaaaagacatcttttggtcatccagattctactaatagtttgcttccttccttatagtatttttaaacccattttttatgttctacaccaaagagataactgtcagcaattgaattatttaatagaaacaaaaaacattctcacctgtcttgcttcggccagaagtagcacagaccccattatatttcttttattagacaaaacattcaagaagacactatataatctctttacaaagtctaattcagcacatatgcaatcatatggttga

SEQ ID NO: 1750 - DNA, 600 bp, Homo sapiens; identical to SEQ ID NO: 1749

SEQ ID NO: 1751 - DNA, 600 bp, Homo sapiens
agcacggtggccagcgacggcagcatggagggtaaggaaggcagcaccaaagttgaggagaacagcatgaaggcagacaagggtcgcacagaggtcaaccagtgcagcattgacttgggtgaagatgacatggagtttggtgaagacgacatcaatttcagtgaggatgacgtcgaggcagtgaacatcccggagagcctcccacccagtcgtcgtaacagcaacagcaaccctcctctgcccaggtgctaccagtgcaaagctgctaaagtgatcttcatcatcattttctcctatgtgctatccctggggccctactgctttttagcagtcctggccgtgtgggtggatgtcgaaacccaggtaccccagtgggtgatcaccataatcatctggcttttcttcctgcagtgctgcatccacccctatgtctatggctacatgcacaagaccattaagaaggaaatccaggacatgctgaagaagttcttctgcaaggaaaagcccccgaaagaagatagccacccagacctgcccggaacagagggtgggactgaaggcaagattgtcccttcctacgattctgctacttttccttga

SEQ ID NO: 1752 - DNA, 600 bp, Homo sapiens; identical to SEQ ID NO: 1751

SEQ ID NO: 1753 - DNA, 492 bp, Homo sapiens
  misc_feature (450)..(450): n is a, c, g, or t
tttttgtttttgaagatttatttcagagtgagcatcagcgacctacaagaacctgggacagaagccaatgcctcccgtttccctgtgatgtgaaacaggaccctgtgcttcctgtggacttcaagaaatgtggacttgagctttgccatcccttcccctgatcctgtttcatagattttgctgttatattctctgtatctttacagggatcgggaggctgaattagtgttattcagggttagtaactgtcccttccttaacggtggtggtcctgatagttcgcacatttttggctgtcccaaagagcagtgcaattatgaaggcgtaaatacgaccaaagaccactctcagatacatcactgattgctggctttgtttgacggaacgtgttctttttggaggtggcccgctgttgacactcccaccagcacctcttcttaggcacagtgnaggatcccagcctatatggcaatggcagttccttctgttgtg

SEQ ID NO: 1754 - DNA, 492 bp, Homo sapiens; identical to SEQ ID NO: 1753
  misc_feature (450)..(450): n is a, c, g, or t

SEQ ID NO: 1755 - DNA, 600 bp, Homo sapiens
cccaactgacagcagaggctgaagatcacctacagtcccccaacagagactctctttatacaagcatgcccaatcttagagactctccctatccggagagcagccctgacatggaagaagacctctctccctccaggaggagtgagaatgaggacatttactataaaagcatgccaaatcttggagctggccatcagcttcagatgtgctaccagatcagcaggggcaatagtgatggttatataatccccattaacaaagaagggtgtattccagaaggagatgttagagaaggacaaatgcagctggttacaagtctttaatcatacagctaaggaattccaagggccacatgcgagtattaataaataaagacaccattggcctgacgcagctccctcaaactctgcttgaagagatgactcttgacctgtggttctctggtgtaaaaaagatgactgaaccttgcagttctgtgaatttttataaaacatacaaaaactttgtatatacacagagtatactaaagtgaattatttgttcaaagaaaagagatgccagccaggtattttaagattctgctgtttagagaaattggga

SEQ ID NO: 1756 - DNA, 600 bp, Homo sapiens; identical to SEQ ID NO: 1755

SEQ ID NO: 1757 - DNA, 600 bp, Homo sapiens
ctaggagcttgccaggctccaccagctccccacccaacccttatcacacactggatgccatatggatctctctacaatgtactacatgaaggcaccaatttcgttgtggaccagagccaagctgtaaagtttgctttggacatggcaagaggcatggcttttctacacacactagagcctctcatacctcgacatgcactaaatagccgtagtgtaatgatcgatgaagacatgactgctcgaatcagcatggctgatgtcaagttttctttccagtgcccagggcgcatgtatgcacctgcctgggtagcccctgaagccctgcagaagaagcctgaagacactaacagacgctcagcagacatgtggagctttgcagtgcttctgtgggaactggtgacacgagaggtgccctttgctgacctctctaatatggagatcggaatgaaggtggcactggaaggccttcggcctacaattccaccaggtatttccccacacgtgtgtaagctcatgaagatttgtatgaatgaagatcctgcaaagcgatccaagtttgacatgattgtgcctatccttgagaagatgcaggacaagtag

SEQ ID NO: 1758 - DNA, 600 bp, Homo sapiens
ctcctcatggtgctggcctattaccgcatctatgtcacagctaaggagcatgcccatcagatccagatgttacaacgggcaggagcctcctccgagagcaggcctcagtcggcagaccagcatagcactcatcgcatgaggacagagaccaaagcagccaagaccctgtgcatcatcatgggttgcttctgcctctgctgggcaccattctttgtcaccaatattgtggatcctttcatagactacactgtccctgggcaggtgtggactgctttcctctggctcggctatatcaattccgggttgaacccttttctctacgccttcttgaataagtcttttagacgtgccttcctcatcatcctctgctgtgatgatgagcgctaccgaagaccttccattctgggccagactgtcccttgttcaaccacaaccattaatggatccacacatgtactaaggtgagtatactaagggagttcattgatttggttgatttgtattactcagaaggggtaatgctccagttttctgtttccaaaggggttatccctgaaacctgcatagagtttgcaaagattataaaagattctactatct

SEQ ID NO: 1759 - DNA, 600 bp, Homo sapiens; identical to SEQ ID NO: 1758

SEQ ID NO: 1760 - DNA, 1400 bp, Homo sapiens
atgttaagtgacttgcctgaggccatcccactaacaggagccagggttaggattcaaaccccatccaactggtcccagagctggagcttcttgcactgccctacactacctaccatctccatcctctgggcacctttttataagaaccaaaacattacagagcattgctttgtcaactcagctgggaacatttcccagtgcaactcacatttttcactgctctgtgcctgtccgtataagctcaatgagtattgatttaggggctttggagaactttgaatgctaccccccaagtaaccattgttggcaacctggtacctctacttttagccatttctccttctctataaatagtgcagaagtaacccacttggtaacaggcatccttgccaagcctccaccactaggtcagtgtaagaattaaagaaagaggaaagaaacacaaaaagtggcttgatggttaagacaggtttattttagagaaaacacacctgagaggggctgctggctgaattaggttagagtcttttctacagactaagagtgtttaaggatttagggtgggagagtttcttagaggcttggactgcttctgtgttttttttgttgtgcttatatgggagggagagtggtgtgtttgcttttatacatttttctgcagctgtaggcataccccccaagtctgcttttagcttccctattttagtgcacctggagggaaaggaatgtgcttattaaggcccactgttttactggggcccattgtatgagggtgaagtttggcagttacccaagagacttttcctccaccttcctctgtgcccgagctgttttatctgcattttactgtctgctttttttggctgcttatagtttttaaaaaagtaatttccttaaatccagaaggctaaaaatgaagctgaaacttaaagtggcggtgtttgtccaaaataacggggctcctgctctgccagtcagtaccctcaagtcactcctgatcctcaacctccatgcctaaggctggttcaagagaccacataatatctgccttttattacatacatgatgggtgcatgggattctgcgtgccctttgcttgatatagactgctaaggtgagatggggaatatcagagtcagctgctgcttgaggaagcagaacacacagctggaggcttggaacatgtgggtccctatgagtgtagagcccatatccccatagagtctacctagagcaggggtcgccaaatgttttcttaaagagcctgatagtgtatatgttaggctttgtgagccaggtatttacagcaactcaattctaccactgtggtatgaaaacagctatagacaatcataaatgaatgatcatggctatgttttaataaaactttacagacactg

SEQ ID NO: 1761 - DNA, 600 bp, Homo sapiens
aagtcagtgtaaaccacttagatagtagttttttcataaatgctcatcatatttatgttccgctgtacatgttcagtataaatatatgtgtagtgaagctactgtgagtctttaaatggaaagagcaaatgagaagtggtttggatacacttgatgagagatgagagtgtcacattaataatttttaagactcttaggcagctatgggtttcttttgatcatttttgttctttattcatttgaacacgtttttgaagttcttcaaaactagtcagtttgaattttgacagctattcaatatgtgatctccaagtttaaaaaaatttttttccagacttccctaatcctaaaatgcgagtttttatttttaataactgtaccaaggaataagtatgaaaacagttctctgttaccatattttgtattctggaccacttactggtgaaagcaaccatgcaaaagaaattaatttggccaggcacagtggctcatgcctgtaatcccagcactttgggaggccgaggtgggtggatcatctgaggtcgggaattcgggaccggcctggccaacgtggtggggccctgtctctagtaaaaatcc

SEQ ID NO: 1762 - DNA, 1400 bp, Homo sapiens
caatgccgactggatggcctcgctcccccctcacctccacaacctccccctttccaatctggcaatcccaggctcacatgattcattcagctactgggtggatgaaaagtccccagtggggcctgaccaaacccaagctatcaaacgcctcgccaggatctccttggtgaagaagctaatgaagaagtggtctgtgactcagaacctgacatttcgagaacagctggaagctgggatccgctactttgacctgcgtgtgtcttccaaaccaggggatgccgaccaggagatctacttcatccatgggctttttggcatcaaggtctgggatgggctgatggaaattgactcgtttcttacacagcacccccaggagattatcttcctggatttcaaccacttctatgccatggatgagacccatcacaaatgcctggttctgcggatccaggaggcctttggaaacaagctgtgcccagcctgcagtgtggaaagtttgacgctgcgaactctgtgggagaagaactgccaggttcttattttctaccactgtcccttctacaagcagtaccccttcctgtggccaggaaagaagattccagcgccctgggcaaacaccacaagtgtgcgcaaactaatcctcttcttggagaccactctgagtgagcgggcctcacggggctccttccatgtctcccaagcgatcctcacccccagagtgaagaccattgcccggggcttggttgggggcctcaagaacacgctggttcataggctggcactgatcccagtttatcctttgagattcagcagaagatcctgatggaggaggaggataccaagagagaggtgcccaaggaagatggagttggtgatgtgcaacatttcggtgagaactttattgtcagaggttttcagtacatatttacaagttcttactccatcatacatattgggaatgagctggcattttcaagcatatacccaggagtccagcaatcattggggaagagagcctgaggctggcaatccttgcccagaactttggtcacctgcttgttcacaggccaccatatcttacttcactgaagacatatgctgaggttttatttagtccagatgctgaaggatgggaagacccaagcagctggtgtggaggtctttcccagtgactcatcagtcattcaaaatcaaagcctgcacaagaaagggtggggtgggatgtatagagaaagacaccaagcctttagactccagcagagtagctgatattgacatatctgaggagggaggaggctccaatacgactactcccaattcacagggtttgtggttctggatgaaatctttgcaaagggtttccctggcactcaaacagaataaataggcttataaagtgt

SEQ ID NO: 1763 - DNA, 600 bp, Homo sapiens
agtgtatggagagcccagcccaccaggtcctgccttttgcggtgataaccttctctggcagagtgactttacaacttaactaggaaacccatgtgaggctcctcagacaggatcttgaacagcccaaagtatcattctcagataggggcacccaagctaagggtattagccaaagatgccaggatgggtagctagcccatgtttagatccaggtctccaattcatggttatcagggcatgtgttcaacaacccccaaagtccacgcaggtggcttgtagaaacctttgggcagcctcatgtctgctaaaacagccatcttcaagacagcccctgaaaagagaccagttcaggtcctgccctgctgttctttgctggagatgaggaacaggtgctggggctaaagtttggggtagagcacaagggacaagaggaactcttggagttggctgggtgagagggctctccatttgctacctgtagtagcctgcctcttaactggttgcttctccctagttccagccctgccctggtctgatgccccaacactgcccttgctttgttttccctgtcacctccctattattaaatgttttctacag

SEQ ID NO: 1764 - DNA, 600 bp, Homo sapiens
atggtggcgggggaaaatcggggagaaggtcggatttttccctccaaacttcatcattcgggtccgggctggagaacgtgtgcaccgcgtgacgagatccttcgtggggaaccgcgagatagggcagatcactctcaagaaggaccagatcgtggtgcagaaaggagacgaagcgggcggctacgtcaaggtctacaccggccgcaaggtggggctgtttcccaccgactttctagaggaaatttaggcgtgcgggcgcctgcaagcgggagacacccacaccccattctgggcgggcccagtggagtttggggaggggggcgaaagcaacgggactgctgggagaggaggggtaggaaggcccgcctgagcgcgacggggcttccgggaagggactggttctcgcccccttccccagcctggggcctcggatacctgctgcccagagcagcccggacccgaaacctttcaggccccgcttgcaagagctggaaaaaaacgcgtatctactaggaggagccagggactggggcggggggcgggggcgagggagggcgaactgtcgaatgttgcgaatttattaaacttttgacaaaactt

SEQ ID NO: 1765 - DNA, 600 bp, Homo sapiens; identical to SEQ ID NO: 1764

SEQ ID NO: 1766 - DNA, 600 bp, Homo sapiens
tgagcccaactttttcacagcagattaccatttattacatcgttcatccggtggaaacagcctgtccccaaatgaccctacaggtttaccaaccagcattgaattggaggaaggaataacatatgaacagatgcagactgtgattgaagaagtccttgaggaaagtggctattacaattttacatctaacaggtatcattcctatccatgggggaccaagaatcacccaaccaaaagatgaaaatgctgcattttgagtggacttgattttctcagtgaagttcaagttctggacttcagccgctattgcaagatgcccaaggattgggtgctgctagagggtgtggaaaagaccaagatgccatggggcctgcaggacttctttctgggggtcctgtgctggagtatatgacagctgcggtacttgagggcttcattgccagaacacattatatacaggatgtcagagctaccagtgtgctgctgggagaaaatgctgcaaaattcatcttttggagggtggggggaaaacccaaaaacaacaacaaaaaaactctcttacagaattttccttaacattaaaaaaaacttgtcatattt

SEQ ID NO: 1767 - DNA, 600 bp, Homo sapiens; identical to SEQ ID NO: 1766

SEQ ID NO: 1768 - DNA, 600 bp, Homo sapiens
tgggaggaaggagagcatctcggggcctctgctgagccactggccatcctgcagcgagatgaggatgggcccaacattgacaacatgaccatggaagctgagaggccagaccctgagctcttcgaccccagcagctgtcctggagaatggctgagtgagccagactgcaccctggagagcgtcaggggcccacgggctcaggggctcccaccccgccgctcccaccagcatggtccaccccggggggccaccagcttcctccagcatgtcaccgggcaccactgatggtgattccacccctgcccatcactgggggctgcgctagctgggctggcattccctcccaacctgaactgctcctcagagccatctcctgaacccacaaattattcttacagaaagatagttatccagaaattctcattccccgtctgcggtgcggtgcgtgcctgcacacctctcctaaacacagcagggctttggagtctggcccatgctccttggccagaaggacagcaggaaagggggctgcaccccgctggccctgcgctcgcccttggccctgctgcctctgtctatttcaatatagaactgttcagc

SEQ ID NO: 1769 - DNA, 600 bp, Homo sapiens; identical to SEQ ID NO: 1768

SEQ ID NO: 1770 - DNA, 1400 bp, Homo sapiens
tgggagcagtaagctgtcggcaggggcagcacacccagcagggggaacacacccgggtggctgtccctcacaagcagggtggcaacatccggggtccctgggcccgaggctggaagagcctctggacaggtttgggaaccatcaggtcagatctggaagaactctgggaactacgggggcaccactatctgcaccaggaatccctaaagccagccccagtactggtagagaagcctctgccagagtggccagtgcctcagttcatcaacctctttctaccagagtttcccattaggcccattagggggcagcagcagctgaagattttaggcctcgtggctaaaggctcctttggaactgtcctcaaggtgctagattgcacccagaaagctgtatttgcagtgaaggtggtgcccaaggtaaaggtcctacagagggataccgtgaggcagtgcaaagaggaggttagcatccagcgacagatcaaccatccctttgtacacagcttgggggacagctggcagggaaaacggcaccttttcattatgtgtagctactgcagcacagatctgtactccctttggtcggctgttggctgctttcctgaggcttccatccgtctctttgctgccgagttggtgctggtactgtgttatctccatgacttgggcatcatgcatcgagatgtgaagatggagaatattcttctagatgaacgaggccatctgaaactgacagactttggtctgtcccgccacgtgccccagggagctcaagcctacactatctgtggcactcttcagtacatgggtgagagaggttaaagctgatgggatacaggaattagctggtcatgagggcgcacactgtggtcccagctactcgggaggctgagggggaagaattgcttgggcccaggagatggaggttgcggtgagtggggatcgtgccgctgcatccagcctgagcaacagagtgagatcttgtctcaggaaaaaaataaatttaattgctgtggatactgtaaagggtgtttatcgtaacagttcataatattctatttaagaatgcgtgggagaaattttctctggacccagttatgcttttcctgaattgctgtttggtttttaccttaaggacactaaatattcagctgattgtatttttctgtttgtactgatactagaccatttagagcccaatttgtggtctaccttcagcaagtgtttatgtattttgtatgctagtcatgttcttggttctgtcttccttttctacttttattttccttattctcatttttctaagttttaatcgttttatattactataatatctgcatcttgtaagcctttttgtaacaaggttgggatataaataaataaggcaatgtatccttt

SEQ ID NO: 1771 - DNA, 1400 bp, Homo sapiens; identical to SEQ ID NO: 1770

SEQ ID NO: 1772 - DNA, 600 bp, Homo sapiens
tgcggtcctgaactcttccatggccaaacatatgatgggccccagtggacatgtggagctggaaagtcattctttacaccacagtaaccaggtcctgccatttattgggcagattttgtggcgctgaggaagctgatactgtgtgaacaattgtacaagatcccactctttgcttttcatttccagagagcttcataaacctatttctgactgcagggagaggcctatactagtccacgtcatggaacacctatggatcaacactggtcaggaggagacacgaaggccataccgggagctgctctctgattaccaggactcctgaaacacagagctcatggtgtccgtgggatatgaggcagaccacatccagtccttgttagaacaaaaatttgatgataccatggcctggtactgaatcctgggctacaggaaacctgatgcagggctccatcatcacagcaaagtctttgccttcagtggatcccacccaacagctactagccttccccatcacctgaaagaaactcttatgctttaacatacaaaacttgttaaaaacattgggaaaaaaaaaaaaaaaaaaaaaaaaaaaaaaaa

SEQ ID NO: 1773 - DNA, 1400 bp, Homo sapiens
agtccaggtgggctttcacttctactctatttcagttcctctttcccgatctgggctggagagcttcctcattgttaaggcagcagaaactttcgctggatggttttaggataaggggtcatcaatgctggcaagagtcggcacaatgaggaccaggcttgctgtgaagtggtgtatgtggaaggtcggaggagtgttacaggagtacctagggagcctagccgaggccagggactctgcttctactactggggcctatttgatgggcatgcagggggcggagctgctgaaatggcctcacggctcctgcatcgccatatccgagagcagctaaaggacctgaaggaagtgagccacgagagcctggtagtgggggccattgagaatgccttccagctcatggatgagcagatggcccgggagcggcgtggccaccaagtggaggggggctgctgtgcactggttgtgatctacctgctaggcaaggtgtacgtggccaatgcaggcgatagcagggccatcattgtccggaatggtgaaatcattccaatgtcccgggagtttaccccggagactgagcgccagcgtcttcagctgcttggcttcctgaaaccagagctgctaggcagtgaattcacccaccttgagttcccccgcagagttctgcccaaggagctggggcagaggatgttgtaccgggaccagaacatgaccggctgggcctacaaaaagatcgagctggaggatctcaggtttcctctggtctgtggggagggcaaaaaggctcgggtgatggccaccattggggtgacccgaggcttgggagaccacagccttaaggtctgcagttccaccctgcccatcaagccctttctctcctgcttccctgaggtacgagtgtatgacctgacacaatatgagcactgcccagatgatgtgctagtcctgggaacagatggcctgtgggatgtcactactgactgtgaggtagctgccactgtggacagggtgctgtcggcctatgagcctaatgaccacagcaggtatacagctctggcccaagctctggtcctgggggcccggggtaccccccgagaccgtggctggcgtctccccaacaacaagctgggttccggggatgacatctctgtcttcgtcatccccctgggagggccaggcagttactcctgaggggctgaacaccatccctcccactagcctctccatacttactcctctcacagcccaaattctgaagttgtctccctgacccttctttagtggcaacttaactgaagaagggatgtccgctatatccaaaattacagctattggcaaataaacgagatggataaaaaaaaaaaaaaaaaaaaaaaaaaaaaaaaaaaaaaaaaaaaaaa

SEQ ID NO: 1774 - DNA, 1400 bp, Homo sapiens; identical to SEQ ID NO: 1773

SEQ ID NO: 1775 - DNA, 1400 bp, Homo sapiens
gaaaggaaaaattgagtaaaaagaataaagaactagaactggcaacctcagccaagccagggaattacatacatcttggaattccaaagcaatgcttccttatgagggcataggaagaaataaatctaataacaaggctgggattaattcacgtggttttctcacattttggtctcaagaactttttactctaaaactaattattgaggaccccaaagagctttttatgtgggttatagttatcagtatttactttattggaaattaaaacctgtaggatgtttcagtggtcttttctagtttgaagggtttaataatttttggcttttaaagagcccataatcaattaaaatattttattttcctttaaattgtaaatgattggtgtcataatgatgctacaacttaactggcattacaatactatacaaatacgttctattgtataagtcacaataaggtacattattaactctataacatttaggggaagatagctgttatcatattatttaaagttttgcctagtttctttgtagtagacttatcttttccaggagccagagaacccgctatatcagtttcagtatctttaaatgtagagattgcagctgtgtgttgagaaagcacgtttcacttagcatgggatggggacttcgaggtactggatatgtcactggcacctcaggggaggaaaccaagatgcccctatatgattttaaacatggtttattaaagcgtgatacagaaaagtgcacaaattgtccacctacagcttggtgactgttcacaaattgaactcatctaactagcctccagaataagaaacaggcctttacacacccccaccagcctcccaatccccttttcagtcaccttctctgcagtgataaccactattctatattctgacagcatagtttcacttgttttttaacttcacataaatgggatcagacagtattgaatcctttgtgtctgcttccttcactcaatattttcctgagatttttctatattgtttattctaaatgcccattgtacgactgtaacacaatttgtttatccattttactgttcttgggcatttgggtagttctcactgtggatgctaagaagagtgttgctataaacattcaggtcttttggtaagcatatacctggctttctgttggctatttatacctagaaatagagttgctggcttataaggtatgcatatttttagttttagtagacattgcagtttgtaccaattcacccacccaccaatgtgaatatctaatattgcctgcctgtctgtacgtgtgtactggtatagcattgtggttttaatttgcattttccagtgcctaatgaaataaagcaccttttaatatgaaaaaaaaaaaaaaaaaaaa

SEQ ID NO: 1776 - DNA, 1400 bp, Homo sapiens
cctttcagcagaagacagcctgggtgcccaggctctgcacagggcagctgtcacagggcaggacgaagccatccgattcttggtctctgaacttggcgtcgatgtagatgtgagagccacatcaacccacctcacagcacttcattatgcagctaaggaaggacatacaagtacaattcagactctcttatccttgggagctgacatcaattctaaagatgaaaaaaatcgatcagccctgcatctggcctgtgcaggtcagcacttggcctgtgccaagtttctcctgcagtcgggactgaaggattctgaagacatcacgggcaccctggctcagcagctcccaaggagagcagatgtccttcggggctctggccatagcgcaatgacataaggatgtttccaagaggaggcaataaagtgcatgagttgctgggagcctgagcacctttcgtttttcggctcagagaaagccaagtgcaacttgcttcagtcatcctgaacctgagttcaaccaaccgcagccacctacgtttgaccccagcgagatcaaagttgtatatctgaggtgtaccagtggtgaagtcagtgccacatctgcactggcccccaaggtcagctccctgggtctgtctccaaaaatggttgctgatgacatcaccaaccattgactggaagagtctgaggatgatagtgaaactgaccagccacagcagacaggcccagattgaggtggtgccttctgcctctgccctgatcgtcacaaccctcaggaaccaccgacagaaagaaagaaacacaaaaacatgaaacacagtggtagcaccacttctgatgagattgtcaacattgcctaacagatgcagcagcagtctttagccagagaactctctggaaccattaaagaattcctgggggccggttgcggtggctcatgcctgtaatcccagcactttgggaggccgaggcgggaggatcatgaggtcaggagatcgagaccatcctggctaacgtggtgaaaccccgtctcttactaaaaatacaaaaaaattagccaggcatggtggtgggcgcctgtagtcccagctactcaggaggctgaggcaggagaatgctgtgaaccctggaggcagagcttgcagtgagccgaatatgcgccactgcactccagcctgggcaacagagcaagactccgtctccaaaaaaaaaagaattcctggggcctgcccagtctgtgagctgccatgttgatagtatcacagatgataccaacagtgaagctgtggaatgcccagctagttaaagaatgcaaaggaaaatattttcacaaagggttatctgataaccaaaaaataaaaagacatttcatctaagccacttaaaaaaaaaaaaaaaaaaaa

SEQ ID NO: 1777 - DNA, 1400 bp, Homo sapiens; identical to SEQ ID NO: 1776

SEQ ID NO: 1778 - DNA, 1400 bp, Homo sapiens
aagggtcagttgtttctgaccctttctgtcggagtggtctctggtagaacccaaggacttctgggtactgagaagcagcagcagaatgaggccaaatgcagagatgaggctaaggcaagaatatgccccaactaaagcatagattccccaaagtgaggctcatggtgggaggccactcaccttcctagctgctgctcgaaaaggttttgactgtgttggggtgggggttgggtaagggaatggtcaagactgagaaaggaatgaaatccattcaggaaatatcgacagggctacacatgatgtccccaaactgctgctattgaagaacttcccaaaacttctttacaaagccctaaaggaaagtttgcatctatgaaaagccaataggctgagacatccaattgctgcatggaaattgatgtacattcaggggacggcaaaaatagctgtaaaatagtgaaaaagagcagtggttgtgctcttttctggccaatgatttacaaaagaatctacttgactctgtccctggagtgaaatccttagggttggaacttgtgggaacattccaacttgctaagcagggtccactgggagggaagctctatctgggaactcacccccagcgcacacacatctcccccagggtcccaaggccccgcagcttcctcccccgaccaaaccccaagacctggatcccaggagacaacagtctccacagtgagagcaacattaagggcaaagccatggagaaatgtgggagaggccggcctcaaatctttccatttaacaaaccccagtgatgggtatggacagcatgcagggcttttggggcgcttcccccgctcctccatcaccctcagcctccacacttcaaagttcaagttcaaagctgttcaagtttcctaccagcaaatagccctaacttgcctctagagtaggccaaatgccaactctgtaaaacacacttacattataggttacagaatgtcactcttaccgtcatgtcttgcaacaaccctgtgaggacagtattaatgcccccttacagcagaagacactgcagctcggagaagacagcttaagtggcagaataatgctagaacagctaaggtttacatgtaccaaataacatgtttcagctcattccatcctcacaacagccccctgaaagtgggtactatcattagtcccatgttatagaaactgcagcagagttgaaaattgcctccaaattaccggaagagtgtatgaagattgaatgtgatgtattcacgtaacatgcttgaaactgcctggcatatactaaacgctaaataaatacatgctaactgcgaaaaaaaaaaaaaaaaaaaaaaaaaaaaaaaaaaaaaaaaaaaaaaaaaaaaaaaaaaaaaaaaaaa

SEQ ID NO: 1779 - DNA, 1251 bp, Homo sapiens
atctccaagagggttgtctcattctccttgggccgtgaaaaagataagtcttttatgcgatgatcattatcgaactgtgtatcagaagagactaactgatgaagctaagattttaaaaaaccttaatcacccaaacattataggatatcgtgcttttactgaagccagtgatggtagtctgtgccttgctatggagtatggaggtgaaaagtctctgaatgacttaatagaagagcggaacaaagacagtggaagtccttttccagcagctgtaattctcagagttgctttgcacatggccagagggctaaagtacctgcaccaagaaaagaagctgcttcatggagacataaagtcttcaaatgttgtaattaaaggtgattttgaaacaattaaaatctgtgatgtaggagtctctctgccattggatgaaaatatgactgtgactgatcctgaggcctgttatattggtactgagccatggaaacccaaggaagcgttggaagaaaatggcatcattactgacaaggcagatgtgtttgcttttggccttactctgtgggaaatgatgactttatgtattccacacgtcaatcttccagatgatgatgttgatgaagatgcaacctttgatgagagtgacttcgatgatgaagcatattatgcagctctggggacaaggccatccatcaacatggaagagctggatgactcctaccagaaggccattgaactcttctgtgtgtgcactaatgaggatcctaaagatcgcccgtctgctgcacacatcgttgaagctttggaactagatggccaatgttgtggtctaagctcaaagcattaacttgtatgggaactgttaactagatatatgtagttaatataacttatggtagctagattctagaagtagctttaacactagtgacccctgtctaagatgacttaagaatcaagggaccattgctttgttacagatctttttagatattcttgcttctttagtgggttactaaaaatttcactacgtacatgtggtacagatatctgtctgctcatagtgtcagtccttcagctggcctgtcagcccatgcgccctgggacttgagaagagttcataaacgtagctcctagggtgtcttgcctctctacacttagcttctaatttattactttgtttctactgattgtgtcttaagtcttttaaaataaatgtaagaataaacaataaaagacagttttagtaccagg

SEQ ID NO: 1780 - DNA, 453 bp, Homo sapiens
atgggcgtgcaaccccccaacttctcctgggtgcttccgggacggctggccggactggcgttgccccggctgcccgcgcactaccagttcctgctggaccagggtgtgcggcacctggtgtccctgacggagcgcggaccccctcacagtgacagctgtcccggcctcacgctgcaccgaatgcgcatccctgacttttgcccgccgtccccggaacagatcgaccaatttgtgaagatcgtggacgaggccaatgcccggggagaggctgttggagtgcactgtgccctaggctttggccgcactggcaccatgctagcctgctacttggtgaaggagcgggctttggcgccaggagatgccattgctgagatccggcgcctgcgaccaggatccattgagacgtatgaacaggagaaggccgtcttccagttctaccagcgaacaaaatga

SEQ ID NO: 1781 - DNA, 225 bp, Homo sapiens
gaagaggaggaggcccagaccatgtttgggcaaattctgttagcaatgtagtactgcctctataaaaacgtcgcacatgcagacgtaagcttacaaatcatcctactccctgaagagcgcaatataaaaatcgtggactttggctttagcatgacattcggggaaaggagattcggaaaccctttttgtggcatgtacccctatgtggccacagaactcttcctg

SEQ ID NO: 1782 - DNA, 225 bp, Homo sapiens; identical to SEQ ID NO: 1781

SEQ ID NO: 1783 - DNA, 600 bp, Homo sapiens
gactcctatgttctaaagaatataaagtgtgaatcttggatccagtaaattgtcaaataccctaatgcttcccagctacaaaccctggagactaagaactcttattatgtgatgatggagctatgcctcagtggcaacctcatgaacaggatctgggatcaaaagaaactaagtgaaagggaagtgaagatgatcttcaggcagatgttgtccgcaatggagcatgtgcactggcatggaatggtacacaaggattatgcattttttttcttctcaggcaggaaaagccaccaaagcccccaagtttatgaaacccttgacattaatactgagaagttggagggtctttctcaggagcagttaagtactcagggtggaagtcctgcctatgcggcccctgaactgcttgctcatcagaaatatggccccaaagtggatgtctggttcatgggtaagtttctgatgctgactggcaccttaccgttcacattggagatattcagtattgagcaactctatcagaagatggtgattggtgcaatcagcaatgtcctacctgaaatctcctttggtaatttactgtggtctctaagtttggta

SEQ ID NO: 1784 - DNA, 600 bp, Homo sapiens; identical to SEQ ID NO: 1783

SEQ ID NO: 1785 - DNA, 600 bp, Homo sapiens
ccagataacttcctgatgggtactgggcgtcactgtaataagttgttccttattgattttggtttggccaaaaagtacagagacaacaggaccaggcaacacataccgtacagagaagataaacacctcattggcactgtccgatatgccagcatcaatgcacatcttggtattgagcagagccgccgagatgacatggaatccttaggctacgttttcatgtattttaatagaaccagcctgccgtggcaaggactaagggctatgacaaaaaaacaaaaatatgaaaagattagtgagaagaagatgtccacccctgttgaagttttatgtaaggggtttcctgcagaattcgccatgtacttgaactactgtcgtgggctgcgctttgaggaagtcccagattacatgtatctgaggcagctattccgcattcttttcaggaccctgaaccaccaatatgactacacatttgattggacgatgttaaagcagaaagcagcacagcaggcagcctcttccagtgggcagggtcagcaggcccaaacccagacaggcaagcaaactgaaaaaaacaagaataatgtgaaagataactaa

SEQ ID NO: 1786 - DNA, 600 bp, Homo sapiens; identical to SEQ ID NO: 1785

SEQ ID NO: 1787 - DNA, 354 bp, Homo sapiens
  misc_feature (230)..(230): n is a, c, g, or t
tctgaaggagttggctggactggttgtttcattgtcatagatgccatgttggaaagaatcaagcatgaaaaaactgtaggtaattatgcctatgcaactttaatgagaacccagaggaattacatggttcaagcaggagaccagtgtatctctgtccatgatgcactgttagaggcagttacttgtgtaaataccaaagttccagctagaaacttgtatgcctatattangaaactgacacaaatagagaggggacagaatgtcataggagtggtgctcaaatttaagcatctaatcagctcaaaagctcacatctcaggtttcctcagtgccaatcttccatgcaataatttc

SEQ ID NO: 1788 - DNA, 354 bp, Homo sapiens; identical to SEQ ID NO: 1787
  misc_feature (230)..(230): n is a, c, g, or t

SEQ ID NO: 1789 - DNA, 333 bp, Homo sapiens
gctacacccacccacccacaggaattcattgcctctcaggcgcctctcaagaaaacgctggagaacttctggcggctggtgcgggagtagcaggtccgcatcatcatcatgctgaccgtcggcatggagaacaggagggtgctgtgtgagcattactggctgaccgactctaccccggtcacccatgatcacatcaccatccacctcctagccgaggaggctgacgatgagtggaccaagcgggaattccagctgcagcacatgcgtgccccaaggatgagggggttgtccagcaacagcagcggagggtggagtaactgcaattcaccacct

SEQ ID NO: 1790 - DNA, 333 bp, Homo sapiens; identical to SEQ ID NO: 1789

SEQ ID NO: 1791 - DNA, 332 bp, Homo sapiens
  misc_feature (43)..(43): n is a, c, g, or t
  misc_feature (53)..(59): n is a, c, g, or t
  misc_feature (62)..(64): n is a, c, g, or t
  misc_feature (68)..(68): n is a, c, g, or t
  misc_feature (165)..(165): n is a, c, g, or t
  misc_feature (223)..(223): n is a, c, g, or t
  misc_feature (252)..(252): n is a, c, g, or t
ccgccgctcgaaagccctatacttagcgtttttaacttatatntctgtgcttnnnnnnnctnnngggnaagtggggggaatgaggagtgggggggagtgctacgcgcatgtgtgttctcaattccccttacggccccggcagaccttggcttgactgtggtctanagcacaagaatatgctaggctgcactctgctaatcagatgtgtgaatggtcctgtggngtgtattgaatgggaagcttttgcccggngaaccaaagctctcatggatgatgtggtgaaagccacttctaggggctgatcaccatcataggtggtggagacactgcca

SEQ ID NO: 1792 - DNA, 549 bp, Homo sapiens
atgcaaaagcggaaacccctgataaaactatcagatctcttgagacttattcgctactacgagaacagtatgggggaaactgcccccatgattcaaattatctcgcaccgggtccctctcacaacacttgtgaatcatgggagtacaattcaagatgagatttggataagagtatgtaaagcaacttatgacactactcttctggagaaagaaggtacccatgttctcgataggccttttgatgatggtgcaccaccatccaaccagattgatgactggttaagtcttgtgaaaattaagtttcataaagaacctcattgttgtactgctgttcattgcattgcaggccttgggagagctccagtacttgttgccctagcattaattgaaggcaaaatgaaagatgatgatgcagtacaattcgcaagaaaaaagcagtatggagcttttaacagcaagttaacttttgtatttggagaagtatcatccttaaagatgtggctgcacttcaaagactccagtggtcatagatacaactgttgcagttaa

SEQ ID NO: 1793 - DNA, 192 bp, Homo sapiens
gtgcagctgtatgagacctatcagagcagccggctcgtgctggagctggtgccctggggcgacctgctggagcacatccaggctgcagtggatcacctctgccgcccagggctggagaaggaagcccctggactcttctggcagctagttagtgccatggcacactgccacagcgtgggcatcgtgcaccag

SEQ ID NO: 1794 - DNA, 1400 bp, Homo sapiens
ttgggtgaagttgtgcaatattggaggctgactgtagggctgggcagctgggagacaggctcatggctcatggctcatggctcagggcggtgcctgccctgggccgggacccccctccccaccccccacctaggctttttgggttttgttcaaggaaggtaaagtgagaggtttaggtcagtgtttttaagtttttgttttttttttaaagcaaatcctgtatatgtatctacatgggagacaggtagacactacttatttgttacattttgtactacacgtttgtgttccaggtttcagcttccctcgctcctgttgttaagaagcgtccctgtcagcacaggtgtgcattgaggaaggggccccagggccttcgctccctcagcactggggtggaggcggcaggaaggggcggcccttacctggcaggtctgggcgcacctttagcaggtggactccgtggggctccaccagccagaagcctttggaaggcaacgaaggcaatgctgctccctgagtccagtccccgcccccaaacccagcccaggtgccttcagctacttcggcttcttaaaccctgcagtgttaaacagaggcattgagaaaggggaaaggcgggtatttttaaaagccaaagattgacccagttacttgagggtagggaggcgggcccagtgcaggaggctgcatccctggcctgctggtgcccaccgggggctgtgcctgtgccgggccgcagggaagctggctgcccccattcctgctgctgctgctgctgctgctctgtggctgtttcaaagactgggcgaaaggctgtccggagggcagaccaggtgccttgccgcagagaaaacaccaaagtctcctgttcgctcataaagaagtttttgggatgggagagaatccagaccatcttggggcagccaggcccttgccttcatttttacagaggtagcacaattgattccaacacaaaactccttcccctttttaaaatgatttctgttctaatgccatagatcaaaggcctcagaaaccattgtgtgtttcctctttgaagcaatgacaagcactttactttcacggtggtttttgttttttcttattgctgtggaacctcttttggaggacgttaaaggcgtgttttacttgtttttttaagagtgtgtgatgtgtgttttgtagatttcttgacagtgctgtaatacagacggcaatgcaatagcctatttaaagacactacgtgatctgattgagatgtacatagtttttttttttaccataactgaattattttatctcttatgttaacatgagaaatgtatgccaaatgattagttgatgtatgttttttaatttaatatttaaataaaatatttggaaggaaaaaaaaaaaaaaa

SEQ ID NO: 1795 - DNA, 600 bp, Homo sapiens
gggcctcgccttccaaagggccaggccgagctgacctgtctgcaccgagtccggcttggccgtggggccctgaatgcggacacgtcagttttgtgttaaataaaagaaagaaagaggtcacaggctcagcgtccgctgcgaatgccgcgcccctcccccgggggattgccccacccactcgcgtggccttctgggaaatgtagtcttttgaaagaagcctggaattcgccaataggcggacgagagtttggcgcatgcgcataggcgcacatgaagcaaaaagggaagtggtgcccgtcaacaccggaacccagaaaactgcaagtttagggtaccggggaaattcaacgtccactggaggaagagacttaaggctacgcccactcccatattttgacccggaagttatttattttagcgtagaagactacttttcccgacgcgccccaggaaagtgccctcgatcagtttcctaagggcccgagttagactttttttttctcttccagcttttgggacttgggggccggacaggtcgtcgtctttcttggggtatccggggtgcggacaaggtgggagagccctacggtatccaagctt

SEQ ID NO: 1796 - DNA, 600 bp, Homo sapiens; identical to SEQ ID NO: 1795

SEQ ID NO: 1797 - DNA, 600 bp, Homo sapiens
aagctagaacgggaacgaagacgcacacaaaggtattttatggaagccaaccggaacaccgtcacatgtcaccatgagctggctgttctatctcacgagacctttgagaaggcaagtttgagtagcagcagcagtggagcagccagcctgaaaagtgaactttcagaaagcgcagacctgccccctgaaggcttccaggcctcctatggtaaagacgaagacagggcctgtaacgaaatcctgtcagatgataacttcaacctggaaaatgctgagaaagatacatattcagaggtagatgatgaattggacatttcggataactccagcagctccagttcaagccctctgaaagaatctacattcaacattttaaagagaagttttagtgcttcaggaggagaaagacaatcccaaacaagggacttcactggaggaacaggatcaagaccaagaccagggccacagatgggcacattcttgtggcaagcatcagcaggaattgctgtgtcccagaggaaagtgcgtcagatcagtgatcctattcagcagatattaattcagctgcacaaaataatctatatcacacagcttcctcca

SEQ ID NO: 1798 - DNA, 600 bp, Homo sapiens; identical to SEQ ID NO: 1797

SEQ ID NO: 1799 - DNA, 600 bp, Homo sapiens
caactggatcgacatgaagcgggccctgatgatgatgaagtttgcggagaaggcggtggatcgcaggcggggcgtggagctggaggactggctttgctgccagtacctggcgtctgcggagcccggggccctcttacagtcgctgaagctcctgcagcttctgtgagccaagccccagcctgcaccgtcgctgccccttccctgcctaaccctttcctgtctcgccttggaagcacccatgtctccctgggaaatggtacagatgactgggatacctggatgtaaaatatataaatatatatatagaaaatacatataccatatataaatatgaaagactaaggatgctgttgcccgtccacactcgtctcctctctgcactaagtcctccctgttttcttctgtaattatacacatttccagttccatgcaacgtcctgaggacagttctgtgaactgaatgcagcctggacactggcctcaataccttgtttaggatttcttcacccttttgtcaaattgttatttaaagaaaaaaaaaaaagaagaaaattccattaaaattttttttggttgagtcatgaaaaaaaaaaaaaaaaa

SEQ ID NO: 1800 - DNA, 600 bp, Homo sapiens; identical to SEQ ID NO: 1799

SEQ ID NO: 1801 - DNA, 1400 bp, Homo sapiens
ttgcccaacctcaagtctctggtgaggaaaagttccaaatgagaaaaattcttggaaagaatgctgagattttgcccaggtctcaatttcaacctgtacgaagtactgaagatgaacaagaagagacatcaaaggagtcaccaaaggaactgaaagagaaagacatatcattgacggatattcaagacctgtctagtatctcctatgaaccagacagctcttttaaggaagcttcatgcaaaacacccaaaataaaccatgcacctaccagtgtcagcactccactcagcccagggtccgtttcttcagctgccagtcagtataaagactgccttgaaagtatcacatttcaggttaagacagagtttgcctcttgctggaacagtcaagaatttattcaaactttgtctgatgactttataagtgtccgagagagagcaaagaaactggattctctccttacttcctctgaaactcccccttcaagactgactggtcttaaaagattgtcttcatttattggggctggatcccccagccttgttaaggcatgtgactcatcaccaccccatgccacccagagaaggagcctgcctaaagagctcttgaaacagcagcagggctcatccacggtgttgcatgagaacacagcaagtgatggaggaggcactgcaaatgatcaaaggcacttagaagaacaagaaactgacagtaaaaaagaagatagtagtatgcttttgtccaaagaaactgaagatcttggagaggacacagagagagctcactctactctggatgaggacctggaaagatggctgcagccacctgaggagagcgtggagctacaagaccttcccaagggctctgaaagggagacaaatatcaaggatcaaaaagttggtgaagagaaaagaaaaagggaagatagcattacaccagagagaaggaaatcagagggtgttctagggacttctgaagaagatgaactaaaatcctgtttttggaagcgactaggttggtccgaatcatccaggataatcgtgctggatcagagtgacttgtcagactgattggaattggatcatagacggactcctggcctgagtttgagtgtcctggttgtaagctcctttcttctctttctgcttcagttgctgtcagggcagcagttccagttctgtaagtctcactttgttcagctgccacaatagacatcatcgtttggccctctctgttagcagcacattcaaccatttgttttcagtcagatttctgaaaagtgagaggtagttttgatagtaaaaatttttggttgtgcctagaatggctttggttttgttgatgttaattttcaaaaactttaactcttgttatataataaaatgtttaattttaataac

SEQ ID NO: 1802 - DNA, 600 bp, Homo sapiens
atgattcccccgtctgtggctgaagctcggaaaatgggggcaactgtggaaccagggtattttgaccaggttaccatatacttcagtgacattgtgggtttcaccatcatctcagccctgagtgaacccattgaggcggtgggcttgctcaacgatctctacatgctgtttgatgctgttctgggcagccatgacctgtataaggtggagaccattggggacgcctacatggtggtgtgggggctgcctcagtgcaatggcagtcagcatgcggccgagatcaataacatggctctggatatccttggctctgtgggtgacttccggaagaggcatgcacccaacgtgcccatttgcatcagggctggcctgcattcagggccctgtgcagcaggggtcgtgggtctcacgatgccttggtattgcctctctggggacactgtcaacacggcttcccagatggagtccacagggctgcatgaaattcatgtcagccaaagcactgtccagatactgctcagccttgatgaaagctaccaaattgatatcagaggtcagactgagctgaaggggaagggcatcgaagagacctactgggtg

SEQ ID NO: 1803 - DNA, 600 bp, Homo sapiens
gtatcgtattttgttgctcaagaatccaaaatgggtctgtggacatagggcaatttggggctcaaagtgagggagaaaacctgggtgtgtcctttcccagtgcttttcttttacaagaggtagtagactagtggaaatccccaaatggagccaagacttctgagctataacttgtgggagtaataccagcttgcaatgggtcagcactttaccttttttctttaaggctcccaacaatgctatacagcgcagttgtttccattcctatttttaataaatctcaggggaagcctcagagattacacagttaggatgctgacacagtctagaatccataatgctccctacatctcacactaacaggcaaattcagatgctgggattggcaatgatttaagcaccttcactaaagtcttattttatgttttagaacagttacagtctaattgtcttggacattttgggaagatatattgggttcacattctggagttctctttattttccaccacaaaaaataatctgagaattgtatcattaaaagtatctaaacacacaaaaaaaaaaaaaaaaaaaaaaaaaaaaaaaaaaaaaaaaaaa

SEQ ID NO: 1804 - DNA, 600 bp, Homo sapiens; identical to SEQ ID NO: 1803

SEQ ID NO: 1805 - DNA, 1400 bp, Homo sapiens
aacaacgtccccgacatcttcatcatcaacctctcggtagtagatctcctctttctcctgggcatgcccttcatgatccaccagctcatgggcaatggggtgtggcactttggggagaccatgtgcaccctcatcacggccatggatgccaatagtcagttcaccagcacctacatcctgaccgccatggccattgaccgctacctggccactgtccaccccatctcttccacgaagttccggaagccctctgtggccaccctggtgatctgcctcctgtgggccctctccttcatcagcatcacccctgtgtggctgtatgccagactcatccccttcccaggaggtgcagtgggctgcggcatacgcctgcccaacccagacactgacctctactggttcaccctgtaccagtttttcctggcctttgccctgccttttgtggtcatcacagccgcatacgtgaggatcctgcagcgcatgacgtcctcagtggcccccgcctcccagcgcagcatccggctgcggacaaagagggtgacccgcacagccatcgccatctgtctggtcttctttgtgtgctgggcaccctactatgtgctacagctgacccagttgtccatcagccgcccgaccctcacctttgtctacttatacaatgcggccatcagcttgggctatgccaacagctgcctcaacccctttgtgtacatcgtgctctgtgagacgttccgcaaacgcttggtcctgtcggtgaagcctgcagcccaggggcagcttcgcgctgtcagcaacgctcagacggctgacgaggagaggacagaaagcaaaggcacctgatacttcccctgccaccctgcacacctccaagtcagggcaccacaacacgccaccgggagagatgctgagaaaaacccaagaccgctcgggaaatgcaggaaggccgggttgtgaggggttgttgcaatgaaataaatacattccatggggctcacacgttgctggggaggcctggagtcaggtttggggttttcagatatcagaaatccccttgggggagcaggatgagacctttggatagaacagaagctgagcaagagaacatgttggtttggataaccggttgcactatatctgtgagctctcaaatgtcttcttcccaaggcaagaggtggaagggtactgactgggtttgtttaaagtcaggcagggctggagtgagcagccagggccatgttgcacaaggcctgagagacgggaaagggcccgatcgctctttcccgcctctcactggtgcgatggaaggtggcctttctcccaagctggtggataatgaaaaataaagcaccttctccctaaaaaaaaaaaaaaaaaaaaaaaaaaaaaaaaaaaaaaaaaaa

SEQ ID NO: 1806 - DNA, 1400 bp, Homo sapiens; identical to SEQ ID NO: 1805

SEQ ID NO: 1807 - DNA, 600 bp, Homo sapiens
cgtcttctctgcccccaactactgcgaccagatggggaacaaagcctcctacatccacctccagggctctgacctacggcctcagttccaccagttcacagcagtgggtaggcccagcagtggttcttgacatcacacgatgaggcgcgcatctcccgtcatccagggagaccagaggacccttgtctcactcccagttggctcttagtcacagccccgctttgtctttgacatggacgtttgtgatgatcacgttcctcccgctccccgtgtctgaagagtgctccctgactggctgccgtctcctccctgtcgggtctggctgggttctccagagggagtgctgcggaggggacacagcagaggccccatgctcgtgatgtatgttgcagatcattttcccccattctgtccttttttgttaaattgtggtaaaaagcacataacataaactgtaccaccttaaccatttgaaagtatatatcccagactgtcttttatctttagacttcacttgtggtttgttgccacagtacaagtttatttttatgaagccaaaaaaaaaaaaaaaaaaaaaaaaaaaaaaaaaaaaaaaaaaaa

SEQ ID NO: 1808 - DNA, 600 bp, Homo sapiens; identical to SEQ ID NO: 1807

SEQ ID NO: 1809 - DNA, 1400 bp, Homo sapiens
ccaggcttccgggagcccagagagcatgtggcaggcagtggggcctcttcatcagcagcctgcctggctggctcccttggctgtgggcaggtagcacgcctgctggcagaggtacctggtggctgccctgttcgcatcagtggcgatgactttatttgcggagcatttctgcaagcgttgcctggatgcggtggtgcattgtgggccctctgggctcctgcctcagaatgtcagtgagcaccatgctggaggtcacccagcactgtggcagcgcccaggagggcatagggcagcctaccacctccaagggggcaggcgccctcatctggggttgggtctgtgctgagctggagggcctctagggaaccgtggggcagggtggccagctgctggctcccagagcgcagcccaggcgtcctcaacggggagccccaaatgtccacgcccagaacaacagttggcaggacaggtgtgacacagccacagcagaggcaaggggtgccaggagtccccagcggcatcctcggggagatgctggtgaggggtccgtacagggtggggtccccacccctagccccttactgaggggggagtgcagcagttggcctgcttgtctggcggagaaagccagctccctgcaccctcggggctgagtcagatctgggtctgccgcaaaggccttgcctagaccaggtcacactgatgccctggtttccctatctgtaaaatggggccaatgacacctacctcactgggtcaccatcgagatcaatcctcctccctgccccgacacctcgggcacatcgcatgcactcagagcacagagccgggcagacgcagcacctgcatggggagcccagtgcccggcacagcacaggggcttccagggaggccacgcagggccgtggggctgagccacgctctcgttttgtcaggcagctatgcagttgctcttccttgtttttgttttgtttttgtttttgtttttaatatttatttttttagagacagggccttgctctgttgcctgggctggagaacagtggcaccatcatagctcactgcagcctcaaactcctgggctcaagcgatcctccccgctcagcctcctgagtagctgggactacaggtgtgcaccaccacacccagccaaaacagccatcctccccttgagagtcatcagaaaaatacattaggaaaatgtgtttagaaataaaagcacaaggcagggcagtgctcacgcctgtcatcccagcactttgggaggccgagacgggaggatcagttgaggtcaggagtttgagaccagcctcggcaacatggcaaaatcttgtctcttttttttggtattaaaaaaatcataaaaataaaagaaataatgcaaaaaaaaaaaaaaaaaa

SEQ ID NO: 1810 - DNA, 1400 bp, Homo sapiens; identical to SEQ ID NO: 1809

SEQ ID NO: 1811 - DNA, 1400 bp, Homo sapiens
gaatttaaggggtcccctagtctagtctctgcccctggatagtgtccagccttgtatatttctgaagaggtggatcccagagtggctctgatgtccacattagaaaaacttacttgtaatgatcatgtcagccttcagaagagaatccccaccaacttctgtgcctcctcagatggggatttatctggatctctgtggttccttctcagccgaaacaggtccagtatcccagtcatttcttcaaatgctgataggggtatgttggaatccgaagccacttccccgccttcaagccccagatgggctgctctcctgtaactttctaggagaagagacattttcttctttccctttcctggtccatccctgcaccctggtcctctcccagcctctcccccacattgtccctgactctaggggcacatccagtctccatcgtgctgcagcagctggactgagggcagagcctgtaggtgcagaggccctggctcccgaggtccagccactctccctggggcctctggggtgagagcagcttccgataggacctgcccagatttctgcatgtgcacttttgtttactgaaagagagaaaggggggggtcacagcaacatgccctggcctttctgccctgttccccaaccccactgaggcctgctgcacaggtcaatgccttcgttatcgttattgtactgtcactttgttcttgaggtagtagtcaaggatcaggaggggcagatgtcttctctgggctgcgtggggccggagcagaggtgagcagcaatgcactggttcgggagcccccatcagcctccttgtgcaaactgggcccccatgccacagtctggctttccctccatctgccccaggacaagagcaagaaggacatcagttgcccagtcatgtgatcccctgccatcttgccttaggaacagccttcccccaccagcagccatggctggctggggctttagccaagccacctactgccaggaattggagcctcagttccctcctgtgtcaagtagctaactgcagcagctggactgagggcagagtctgtgggtgcagagaccctgcatgtaggtcacaggttgaggcccagccactctccctggggcctggtgggtaggcaagtagctctggggccacctcaagtgaccaaatgctattaatttccatcctttagcaggctgggccctaggcaggaagctggcttctgggagaggagtgagaacgtgcagggcctgcctagcttgcgtgcttgaggaaggtggcattccgtgcttgcctccttgaggagggtggcattctgtgtcttctgcttatgaagcgcctttcttaaagtttggcaataaatccatttttatggaaaaaaaaaaaaaaaaaaaaaaaaaaa

SEQ ID NO: 1812 - DNA, 1400 bp, Homo sapiens
atctcgggcagttggcactgtcaaagtgtacctgcctaacaagcaacgcacagtggtgactgtccgggaaggcatgagtgtctatgactctttggacaaggccctgaaggtgcggggtctcaaccaggactgctgtgtggtctacaggctcatcaaaggaagaaagacagtcactgcctgggacacagccattgcgcctctggatggtgaggagctcattgtggaggtcctagaagatgtgccactgaccatgcacaattttgtacggaagacattcttcagcctggccttctgtgacttctgccttaagtttctgttccatggattccgctgccagacctgtggctacaagttccaccagcattgttcctccaaggtccccaccgtctgcgttgacatgagtaccaaccgccgacagttctaccacagcatccaggatctgtctggaggctccaggcagcaggaggctccctcaaatctctctgtgaatgagctgctaaccccccagggtcccaggtagggatgtcgtagatgaaaggccagggggccagtgaaagaaggattggaggaccctgagagattatactttcgtttatttgtttacgtgataaatactattgagtacctacaagtgttgaatatgggcatgggattgtgggatcattggtaaggcacccagtcactccaggtttcatttttttcatctgggaagaggggatgagattttccctagtgggttctgaagaggattaagggttgagatatttgcaatgcttaaagcaagatctgatacagagtaaataacaagtgttattcattacaagtgtatatataaaatcatctagtttgttcatttcttccagtataaccacaccccagtcttttctctttgaaataaatgttactgtatcagaaagtacttttatttcacttatgttggatatgatagcatatagttttgcataatatataaaaagtaaggttaatgtattattatttgtagttatgagtgcatgtgtgttgatttacctgtgaatttaatctcaggatggtgaaagtaacagaagaatgtttttctgtaaggtataattcatgggaggtggaggcaagacgatcaatagttcaaggctaccctccactaagtagcaagttcaaggccagcctgggctacatgagactgtcttaaaacagtaaaaaaggtgttttgtaacgtgatatatgtataatcgttatatgatgtgtgtaatgtgtattacataatataatatgtgtattgaaaacgttgccattttaatataggtaatgctcattattataaaataaataatatatttgaaaaatacatgtcattatgatatgtaataaaaagtcatatcttaccctttaaaaaaaaaaaaaaa

SEQ ID NO: 1813 - DNA, 1400 bp, Homo sapiens
gtggccaggcacagagccaggtgctttacatgtaactcatttaatccccaacaacccttgaagtaggtacagttatatccccattttgcagatcaggaaatgaaggcacaaagaaatcaaagttcttcctaaaggtcatgcagctggtggtggggagagctggatttgaacccaggcagggcagctgctcaccttcatgatgatgcatctgcatccatgtggctggcacagtgcctggagccagaataagacctcttatcatgagcagctgtcaggactaataattcatgccaattagggatgacataagctggcccccgagtgctgtgtgttcagtgtcactaattctccatcttcctggcagatttgggcatgtgagtgtggcacacctcctgttggatcacggggctgatgtcaatgcccagaaccggctgggggccagtgtgctcactgtggcttctcggggcggccacctgggtgtggtgaagctgctcctggaagccggtgcctttgtggaccatcaccacccttcaggcgagcaactggggttgggcggcagcagggatgagcccttggacatcacagccctgatggctgccatccagcacgggcacgaggccgtggtgcgtctactgatggagtggggcgcggaccccaaccacgcagcccggaccgtgggctggagcccgctgatgctggccgcactcactgggcggcttggagtggcccagcagctggtggagaagggcgccaaccctgaccacctcagcgtgctggagaagaccgccttcgaggttgcactggactgcaagcacagggaccttgtagactacctggacccgctgaccaccgtcaggcccaaaacaggtcaggctgcatgccccccgtggcttcacagaggaccccaaattgtgtttatgtggcttaagctgaggattgctctactggaaggacacgcagaactcagagtccagccctgcagaccactgagactgaggaagtggtgtgcttaagtatcggggggattgcctgtgacatgcaggttctgggcccactctctgcagagtgatttggtagccctgggcaagagcctggaagcctctataacaaggctgctctccccaagcacatcattctgatgcaggtggttctggggtccttctacaacaaggtttggcaaactttttctgtaaaaggccaaatagactgtatggaccatacagtctctgttaaaactacagtagtcacttctgctagagtgaaagcagccttacatatgtaatgagtaaatgaatgggtgtggctatgcatataatatgtaaatgagtcaggtatggctaggttccaataaattataactacaaaaaaaaaaaaaaaaaaaaaaaaaaaaaaaaaaaaaa

SEQ ID NO: 1814 - DNA, 1400 bp, Homo sapiens; identical to SEQ ID NO: 1813

SEQ ID NO: 1815 - DNA, 1400 bp, Homo sapiens
ttttaagtgcacaagttgacttgccatttgcagtggggtcgcctaagcgacctttggggaccaagttgtgtctggttccacaggtaggtcgaatcttctttcgcggtttctgggtcccagcgaggctctctctcctgggcaagggcaatggatcctgagaagccagaatagtcctgagagagagctctgaaaggagaagtgttgaaactaaatgtagagcttccctgcccaggaggaggctcacttcctcccctcaagccccgggctcagcactgaccctgcggtagccaatcccaaagggggttgcaacttttaaaaattgataatggaagggaatccctgccctgctttggtatcgtggataatgcccactagaagcagtgtacttgtaattgttgtctgaagcctgtctgagacagatctacatacagcctggcagtacttgaactagacgcttaatgccctgtgtttttggggagaactttgtgttacagcttaatttaagaacagttactttggcatcattcagtcttcactttttgtctatttaaacttggttggagaaacttgtggatttggtgcttcaaaccctatgtgtggcttggatggcgcagagaaaccttgaagagttaacagcaaaattctgatgctgagatctctatttttattatacttgaaactatatgggggtgggtgggtgggaatgggagatgaggagtgttaaactgagaatcaacacctatgattgtttgttttctgcagatttacaattttgtaattcctgtttagcgattgtcaagccacaactctaacaaacaaaccattatgtgtgctagtgccaaagtctgcagactgctttattttttctcttaatttcatgtacctgtcactttacacatttaaatccccataaatgaagggtatgatgggtgactcagcccacactgctgctatatttcttactaatgcaattggtaaaaccgattagtattggaaatatactgtttcttaacaagaaaagtgtctttatttcttatccaatttagtgagatgtgaaggagactgatgacatggggatagttcttacacaattgaggaatggggtgggggcaataggaggatgtatattttgacttgtaaaaaaatcttaaagtgcatgaaacttttatctgatagtcatttgcactctccttcccatctgtgattccttgtgtgctaacatataaagaaaccaagagaactatcttccttctccagaaaccttaaaaatacagttaagggccctaaaaacgatattgaaaagaaaataaacttgtttcttttttgttgttgttgttattgaagtttgggcaggagaaaagattgctagaaaatgacatataagaactttagaaaagctt

SEQ ID NO: 1816 - DNA, 600 bp, Homo sapiens
gcttccataaacaagtgcaattttttaaagtgctgtcttactaagtcttgtttattaactctcctttattctatatggaaataaaaaggaggcagtcatgttagcaaatgacacgttaatatccctagcagaggctgtgttcaccttccctgtcgatcccttctgaggtatggcccatccaagacttttaggccattcttgatggaaccagatccctgccctgactgtccagctatcctgaaagtggatcagattataaactggattacatgtaactgttttggttgtgttctatcaaccccaccagagttccctaaacttgcttcagttatagtaactgactggtatattcattcagaagcgccataagtcagttgagtatttgatccctagataagaacatgcaaatcagcaggaactggtcatacagggtaagcaccagggacaataaggatttttatagatataatttaatttttggtaattgggttaaggagaccaattttggagagcaagcaaatcttctttttaaaaaatagtatgaatgtgaatactagaaaagatttaagaaatagtatgagtgtgagtactaggaaggat

SEQ ID NO: 1817 - DNA, 457 bp, Homo sapiens
ttcgtcgccgccgcctccctgctgctcctcctcctttccccagcccgccgcggccatggcggacagcgccagcgagagcgacacggacggggcggggggcaacagcagcagctcggccgccatgcagtcgtcctgctcgtcgacctcgggcggcggcggtggcggcgggggaggcggcggcggtgggaagtcggggggcattgtcatctcgccgttccgcctggaggagctcaccaaccgcctggcctcgctgcagcaagagaacaaggtgctgaagatagagctggagacctacaaactgaagtgcaaggcactgcaggaggagaaccgcgacctgcgcaaagccagcgtgaccatcgaggatccaaagtgggaattccctcggaagaacttggttcttggaaaaactctaggagaaggcgaattggaaagtggtcaaggcaacggcttccatctg

SEQ ID NO: 1818 - DNA, 457 bp, Homo sapiens; identical to SEQ ID NO: 1817

SEQ ID NO: 1819 - DNA, 172 bp, Homo sapiens
gcagagattgccatcggtcttttcttcttgcagagcaagggcatcatttaccgtgacctgaaagttgacaacgtgatgctggattccgaggggcacatcaaaatcgctgactttggcatgtgtaaagagaatatctgggatggggtgacaaccaagacattctgtggcactc

SEQ ID NO: 1820 - DNA, 600 bp, Homo sapiens
gaccgcttcgtggccgtctgtcaccccctgcactatacggtcatcatgaacccccagctctgtggactgctggttctggggtcctggtgcatcagtgtcatgggttccctgctcgagaccttgactgttttgaggctgtccttctgcaccgaaatggaaattccacactttttttgtgatctacttgaagtcctgaagctcgcctgttctgacaccttcattaataacgtggtgatatactttgcaactggcgtcctgggtgtgatttccttcactggaatatttttctcttactataaaattgttttctctatactgaggatttcctcagctgggagaaagcacaaagcgttttccacctgtggttcccacctctcagtggtcaccttgttctatggcacgggctttggggtctatctcagttctgcagccacaccatcttctaggacaagtctggtggcctcagtgatgtacaccatggtcacccccatgctgaaccccttcatctacagcctgaggaacacggacatgaagagggccctggggagactcctcagtagggcaacattttttaatggtgacatcactgcaggactttca

SEQ ID NO: 1821 - DNA, 600 bp, Homo sapiens
gcaacgccagctggccggagcccgtggggctgtggggcgccgtcttcatcatctacacggccgtgctgggcttcttcgcgccgctgctggtcatctgcctgtgctacctgctcatcgtggtgaaggtgagggcggcgggcgtgcgcgtgggctgcgtgcggcggcgctcggagcggaaggtgacgcgcatggtgttggtggtggtgctggtgtttgcgggatgttggctgcccttcttcaccgtcaacatcgtcaacctggcggttgcgctgccccaggagcccgcctccgccggcctctacttcttcgtggtcatcctctcctacgccaacagctgtgccaaccccgtcctctacggcttcctctcggacaacttccgccagagcttccagaaggttctgtgcctccgcaagggctctggtgccaaggacgctgacgccacggagccgcgtccagacaggatccggcagcagcaggaggccacgcgcccgcgcaccgccgcagccaacgggcttatgcagaccagcaagctgtgagagtgcaggcggggggtgggcggccccgtgtcacccccaggagtcggaggttgcactgcggtga

SEQ ID NO: 1822 - DNA, 600 bp, Homo sapiens
ttacactcaatgggagcaggggatctgctaaactctatgtttgaatttagtgagaagctaaatgccctccaacttagtgatgaagagatgagtttgtttacagctgttgtcctggtatctgcagatcgatctggaaatagaaaaaacgtcaactctgtggaggctttgcaggaaactctcattcgtgcactaaggaccttaataatgaaaaaccatccaaatgaggcctctatttttacaaaactgcttctaaagttgccagatcttcgatctttaaacaacatgcactctgaggagctcttggcctttaaagttcacccttaaggcctttgtttatttaaacatgaactgatggtaactgtacattttgtgctaaaatgcatatttatatgtgtataccatatgtggagatagaaaagacctttaagcaataaaagattgtaggctatctctgtaatcatgcaatagctgttcggattgagaactcttcagccatgattagacgttgactgcatctccctgatagaccaatcagctgtgtcgcacttaaactggagaagttacactgaagtataatcacactgaatgttagaccttttc

SEQ ID NO: 1823 - DNA, 600 bp, Homo sapiens; identical to SEQ ID NO: 1822

SEQ ID NO: 1824 - DNA, 600 bp, Homo sapiens
ttattccgaactcacgtggtacctcacctccgtctaccagcacaacctcttcttcctgctgtccctggggattatcctgttctgctacgtggagatcctcaggaccctgttccgctcacgctccaagcggcgccaccgcacggtcaagctcatcttcgccatcgtggtggcctacttcctcagctggggtccctacaacttcaccctgtttctgcagacgctgtttcggacccagatcatccggagctgcgaggccaaacagcagctagaatacgccctgctcatctgccgcaacctcgccttctcccactgctgctttaacccggtgctctatgtcttcgtgggggtcaagttccgcacacacctgaaacatgttctccggcagttctggttctgccggctgcaggcacccagcccagcctcgatcccccactcccctggtgccttcgcctatgagggcgcctccttctactgaggggcctgtggcggtgcaggcgcaggtgcaggtggacagggactggaatgggggtcatggagaagcgggcctggaaggagcattgcagaacacagcagggtggagacgtctcctcctgctgcagg

SEQ ID NO: 1825 - DNA, 600 bp, Homo sapiens; identical to SEQ ID NO: 1824

SEQ ID NO: 1826 - DNA, 600 bp, Homo sapiens
ccaacacacaattaactccgtttccaaatacattccagtgtattttctgtgttgttcatagtcaatcaaacagggacactacaaacatggggagccataagggacatgtctttggcttcagaattgtttttagaaatttattcttatcttaggatttaccaaatagggcaaagaatcaacagtgaacagcttcacttaaaatcaaatttttctgggaagaaaatgagatgggttgagtttgctgtatacaaacaggtgctaacactgttcccagcaaagttttcagattgtaaaggtaggtgcatgccttcataaattatttctaaaacattaattgaggcttacagtaggagtgagaaatttttttccagaattgagagatgttttgttgatattggttctatttatttattgtatatatggatatttttaatttatgatataataaatatatatttatcatatttaataggataaattaatgagttttatccaagaccttacaaccacatttctggccatttaactagcactttataagccaatgaagcaaacacacagactctgtgagattctaaatgttcatgtgtaacttctaga

SEQ ID NO: 1827 - DNA, 1400 bp, Homo sapiens
gccctgggaggaggacttttgggagcccgacgtgaatgcagagaactgtgactccagcctgaatcgaacctacgccatctcttcctcgctcatcagcttctacatccccgttgccatcatgatcgtgacctacacgcgcatctaccgcatcgcccaggtgcagatccgcaggatttcctccctggagagggccgcagagcacgcgcagagctgccggagcagcgcagcctgcgcgcccgacaccagcctgcgcgcttccatcaagaaggagaccaaggttctcaagaccctgtcggtgatcatgggggtcttcgtgtgttgctggctgcccttcttcatccttaactgcatggtccctttctgcagtggacaccctgaaggccctccggccggcttcccctgcgtcagtgagaccaccttcgacgtcttcgtctggttcggctgggctaactcctcactcaaccccgtcatctatgccttcaacgccgactttcagaaggtgtttgcccagctgctggggtgcagccacttctgctcccgcacgccggtggagacggtgaacatcagcaatgagctcatctcctacaaccaagacatcgtcttccacaaggaaatcgcagctgcctacatccacatgatgcccaacgccgttacccccggcaaccgggaggtggacaacgacgaggaggagggtcctttcgatcgcatgttccagatctatcagacgtccccagatggtgaccctgttgctgagtctgtctgggagctggactgcgagggggagatttctttagacaaaataacacctttcaccccgaatggattccattaaactgcattaagaaaccccctcatggatctgcataaccgcacagacactgacaagcacgcacacacacgcaaatacatgcctttccagtgctgctccctttatcatgtgtttctgtgtagtagctcgtgtgcttagaaacctcaccccattgattggtagttcgaagaattggcagaatcagttgcaataaactcagtcaaatgtacccagcctaccagagatggaccaacgatcctatgagagaagagagtatggtgctgggtccttaaaaaaaaaaatgatacttggtccttaaaaaatatgctctcccctccctttttaaacaaatggcttgttcagtcacttgtttgtgtttgaattgatttttaaacagcaggttgtgtgtgtgtgcagtgatgtggtgggagcacagctttcctgggtctggattcccgtggctttgtgcttatgtcatttcttctctctgtgctggtgggggcctctttaccatagcttaagaagtatccctgatttattctggtgtctaataaacacagattatttgtaaaaaaaaaaaaaaaaaaaaaaa

SEQ ID NO: 1828 - DNA, 1400 bp, Homo sapiens; identical to SEQ ID NO: 1827

SEQ ID NO: 1829 - DNA, 600 bp, Homo sapiens
gccaagctgtcctaccccaaagaaaatcctagcaagcaaaggtggcttccttcctgaggccccagccaggtgtgtccaaccgtaggagccacagctcagagatcagagtgacttaacagttagagggcacttgatgagtaaggtgaaatagggaaaccaagtcagacgacacctcccttctgagtcccaaccatgtctacatctggagaagaacagttaagtcaagggatcacagacttgtgattagagactgccagggtccatatgaccaagcgggggtcccaggtgtgaagctggggttgaggatccattatctgaattttccactctatggatgatcacttttattcttttccttttcttgaatttatttccatttgtttattcctaaattccctggtagatcacctgtgaaagcttgcaactgtctgataagaataaagggggaaggatttgactttacagcagagacttcagaaggagtcctctctaggagcaaattgggggcaatccagtgggaaggaggtggaagactgcacttgagctgcgtttggacaacaggcacacaatctttacttacttttcaggctgctttgaggt

SEQ ID NO: 1830 - DNA, 600 bp, Homo sapiens; identical to SEQ ID NO: 1829

SEQ ID NO: 1831 - DNA, 461 bp, Homo sapiens
ccggcgccacgtgcctgctgctgcgcgcctacgtgacgcggcattgtcatgcactggctgacctatcatgagaccctgctgctgctcacactgtatggaacccacatctgcctacactgccacctggtaccaactgctctacttcttctatgatgtcatctgactgctgctacatgctagactgcgctattcaccggatccttgacaactttatcagccagactgccgggggcggctgcgatgctgtggtccattacttgctaaggaccagaccgcgggggcacatgcgcctcctcttccttctgtgacacccagcgttacataatcattaccacgggtgatagccagactgctgcgagcaacccgccaccctgcagccaagcctgagctttcaggcacaccattcgctcgcaaagacttgcgccatgtgtcccactcagtgtcttacacccagctgaggt

SEQ ID NO: 1832 - DNA, 461 bp, Homo sapiens; identical to SEQ ID NO: 1831

SEQ ID NO: 1833 - DNA, 1400 bp, Homo sapiens
tccctcctggtcacctgcctgcacaactacttctgcgtgttcctgggccgcggggcccccggcgcggcctgcaggcacatggacatcttcctgggcatcctcctgttcctgctctgctgcccgctcatggtgctgccctgcctggccctcatcctgcacgtggagtgccgggcccgacggcgccagcgctctgccaagctcaaccacgtcatcctggccatggtctccgtcttcctggtgtcctccatctacttagggatcgactggttcctcttctgggtcttccagatcccggcccccttccccgagtacgtcactgacctgtgcatctgcatcaacagcagcgccaagcccatcgtctacttcctggccgggagggacaagtcgcagcggctgtgggagccgctcagggtggtcttccagcgggccctgcgggacggcgctgagctgggggaggccgggggcagcacgcccaacacagtcaccatggagatgcagtgtcccccggggaacgcctcctgagactccagcgcctggaggaggcaggggcaggaagcggcctccaagacccttcgccttgggacaggaatgggcacctgcttctgagtccatacaggagaagaaagatctgtttcctctcctcgggcctccttctccctgggctggggactccaggggtggctgggagactgggcagccaccagcaaacagacctgtggcccctgcccggctcccccacccattctgctcccctagagacctcttgtacagaagttgcccccaggtggtggggcccctccttgccctaggctggttggtaaaagagaggaggtcaacacccagcctagccacctctgcctcttgggtcagccctccttgactgtgtcccagccagcaccaggccagcagcctcatccctgccattcagggctgttccagagattcgatcctcttaaggcattatcagtgagcaaatgtgaaggaaatggtgtctggaagaaagttctggttcacatgccttgtagctaagtctttctgcaaacaacctcccttccccccgtcgagtcatttggtgactttgatggggggatttctggttatgtcaaggctctggagacaggaagggcctttggccgccttgggtagttgacctgccttttctgactccgggacgagccagtcctaggctgcctccgggagcacttgaggtatcccgcaggccatgaggacccactgggcagctcctggacagcctcttggctccagcccccacccgaaagtggacactggctccgccctggccacctggggactggcactgtggtgcacagtggcccaatgtggccaacggaagttttataaaagacaaaatgtatatcaataaacattttataacttgc

SEQ ID NO: 1834 - DNA, 600 bp, Homo sapiens
gaaaaggaacacatctgctgcttagaagagtggaccagccctgtgcaccagaagatctacaccaccttcatcctgtcatcctcttcctcctgcctcttatggaagaagaaacgagctgtcattatgatggtgacagtggtggctctctttgctgtgtgctgggcaccattccatgttgtccatatgatgattgaatacagtaattttgaaaaggaatatgatgatgtcacaatcaagatgatttttgctatcgtgcaaattattggattttccaactccatctgtaatcccattgtctatgcatttatgaatgaaaacttcaaaaaaaatgttttgtctgcagtttgttattgcatagtaaataaaaccttctctccagcacaaaggcatggaaattcaggaattacaatgatgcggaagaaagcaaagttttccctcagagagaatccagtggaggaaaccaaaggagaagcattcagtgatggcaacattgaagtcaaattgtgtgaacagacagaggagaagaaaaagctcaaacgacatcttgctctctttaggtctgaactggctgagaattctcctttagacagtgggcattaa

SEQ ID NO: 1835 - DNA, 600 bp, Homo sapiens; identical to SEQ ID NO: 1834

SEQ ID NO: 1836 - DNA, 600 bp, Homo sapiens
gcttgttatcctgcagagggtgcctctgcctctctgtgtcaggggacagcttgtgtcaccacgcccggctaatttttgtattttttttagtagagctgggctgtcacccccgagctccttagacactcctcacacctgtccatacccgaggatggatattcaaccagccccaccgcctacccgactcggtttctggatatcctctgtgggcgaactgcgagccccattcccagctcttctccctgctgacatcgtcccttagcacacctgtccatacccgaggatggatattcaaccagccccaccgcctacccgactcggtttctggatatcctctgtgggcgaactgcgagccccattcccagctcttctccctgctgacatcgtcccttagttgtggttctggccttctccattctcctccaggggttctggtctccgtagcccggtgcacgccgaaatttctgtttatttcactcaggggcactgtggttgctgtggttggaattcttctttcagaggagcgcctggggctcctgcaagtcagctactctccgtgcccacttcccctcacacacacacccccctcgtgccgaattc

SEQ ID NO: 1837 - DNA, 551 bp, Homo sapiens
ttctttttttttttttttgaagccactgagacattcttgttttattcccagacccctaaatcagaaaacccgatcgaatactgagcataatttcttcattgacatttgtctctaaatgtcaagttgttctggaaattttttcttgattttatgattccttgccttattcatttgagacaaactgagttagcatgatgttgtcggaggaatctccagtatgagaaaatgcataatggcctttgttttgcaatgggttgaaaggctttgagaatttgggtttggcagataaatctgatgagttttgcttttctgtttgcttccaagaacttaaggcagacaacttgttgaacagaagttgtcgcagcttactgtccaagagtattccaaagcataagataaaaaaatccctggaatgcattgagtaaagcaaaaataacatgccaagccagattctggctgtccactattgttcctattccaaagccccaggtgagccctagcagaggggtcagaatgaggaggcttttccccacgcggatgatggtggcctt

SEQ ID NO: 1838 - DNA, 1400 bp, Homo sapiens
tcctggtgtggctgctggccttctgcgtgtctctgcctgacacctactacctgaagaccgtcacgtctgcgtccaacaatgagacctactgccggtccttctaccccgagcacagcatcaaggagtggctgatcggcatggagctggtctccgttgtcttgggctttgccgttcccttctccattatcgctgtcttctacttcctgctggccagagccatctcggcgtccagtgaccaggagaagcacagcagccggaagatcatcttctcctacgtggtggtcttccttgtctgctggttgccctaccacgtggcggtgctgctggacatcttctccatcctgcactacatccctttcacctgccggctggagcacgccctcttcacggccctgcatgtcacacagtgcctgtcgctggtgcactgctgcgtcaaccctgtcctctacagcttcatcaatcgcaactacaggtacgagctgatgaaggccttcatcttcaagtactcggccaaaacagggctcaccaagctcatcgatgcctccagagtctcagagacggagtactctgccttggagcagagcaccaaatgatctgccctggagaggctctgggacgggtttacttgtttttgaacagggtgatgggccctatggttttctagagcaaagcaaagtagcttcgggtcttgatgcttgagtagagtgaagaggggagcacgtgccccctgcatccattytctctttctcttgatgacgcagctgtcatttggctgtgcgtgctgacagttttgcaacaggcagagctgtgtcgcacagcagtgctgtgcgtcagagccagctgaggacaggcttgcctggacttctgtaagataggattttctgtgtttcctgaattttttatatggtgatttgtatttaaattttaagactttattttctcactattggtgtaccttataaatgtatttgaaagttaaatatattttaaatattgtttgggaggcatagtgctgacatatattcagagtgttgtagttttaaggttagcgtgactttcagttttgactaaggatgacactaattgttagctgttttgaaattatatatatataaatatataaatatatgccagtcttggctgaaatgttttatttaccatagttttatatctgtgtggtgttttgtaccggcacgggatatggaacgaaaactgctttgtaatgcagtttgtgacattaatagtattgtaaagttacattttaaaataaacaaaaaactgttctggactgcaaatctgcacacacaacgaacagttgcatttcagagagttctctcaatttgtaagttatttttttttaataaagatttttgtttcctaaaaaaaaaaaaaaaaaaaaa

SEQ ID NO: 1839 - DNA, 330 bp, Homo sapiens
ctccatctcactcaacaaagccctctgaaaaacagcctttagggactccctgtgcctcttcctgtagagttactcagccaagaagtagatgactaggtgaggcatgctgaccacaatggacagtagcaacaggaggtcaaaggcaagggtcagaaactttcctggcaggcacacaaggacaactaagggcaggacccaaaggaagaagctgatgatcacaaagcagacaacatgataggtcctgatgggggaacaccactggggacagcacagaccccagatgatcaggatcagcttggacatgcccattacaaagcaaataagtacatg

SEQ ID NO: 1840 - DNA, 330 bp, Homo sapiens; identical to SEQ ID NO: 1839

SEQ ID NO: 1841 - DNA, 492 bp, Homo sapiens
acatgccaagcacttctcccagtactcacagacctggctaactgcatacaaagaaagggccagggcccacctcaccatggcagaggtgtgctctgggcggtggcagcaccaggtgggacagagggcacagagaaagctctcaatactcatggccaccaggagacagagacccactgtgtcggagaaataggagacaggatccagaaacacagccacctgcaatgccgcctggtgatacagcatgaggattttctccagcaggatcacagttacacaggagaggttgaccatatcaacagtggccaggttaaggatgtaggtcacataggggctgctccagacctgtgagtagagaagccagcagatcacatcattgcctaccagtccacagagggccaccagcactgtcagggagaagaccacctgcctgtccaccaaccactcacctcccgtatggctcatgttcacatgtcctgaggtctcagtctcatt

SEQ ID NO: 1842 - DNA, 600 bp, Homo sapiens
tttccctgctggcccccagctgctatggggctatgtgcacttgaaggtgacctcccagaatctccatatgaacatgtcttctggggtcctggcaaggcgcagggaagtcggggggctggctgttgcaaagcaggaggctgaatgagccctgcagaacccagaaggcactggcacagtcaggaccagcgccatgtgcagagtgtcccagctgacacagacctggcccaggatgcctcggcctgccaggcactgcaggatgagtctgaagtgctagctgttaaggaaaaccaggatgatggtggccgtacagttctccatcagccagatgatgtttttcatcttcagggactcccgggtggggatgcagagttggaattcaatgcagaccccagcctggcccagctcctggacgaccagagacctgccctgcagctcaaagtcgtccccctgcgccaggacgctcacccaagaccatcggaagtgaagcatcagctgcaccactgcatgggtggtcgtgaggtgactgagcagggtctgaaagaaggatgggaactgggtcctgtcgctgaggctggccagtgtggaggaggggctgacctg

SEQ ID NO: 1843 - DNA, 600 bp, Homo sapiens
tatttctggagagcttatgaccaatgtaaaaaacgaggaactaagactcaaaatcttagaaaccagatacgctcaaagcaagtcacagtgatgctgctgagcattgccatcatctctgctctcttgtggctccccgaatgggtagcttggctgtgggtatggcatctgaaggctgcaggcccggccccaccacaaggtttcatagccctgtctcaagtcttgatgttttccatctcttcagcaaatcctctcatttttcttgtgatgtcggaagagttcagggaaggcttgaaaggtgtatggaaatggatgataaccaaaaaacctccaactgtctcagagtctcaggaaacaccagctggcaactcagagggtcttcctgacaaggttccatctccagaatccccagcatccataccagaaaaagagaaacccagctctccctcctctggcaaagggaaaactgagaaggcagagattcccatccttcctgacgtagagcagttttggcatgagagggacacagtcccttctgtacaggacaatgaccctatcccctgggaacatgaagatcaagagacaggggaaggtgttaaatag

SEQ ID NO: 1844 - DNA, 600 bp, Homo sapiens; identical to SEQ ID NO: 1843

SEQ ID NO: 1845 - DNA, 600 bp, Homo sapiens
gcccttgaggacctggcttttggcaatttgtttctctgttccctacttgatcttcaaggaaactcgtggtggaaagtgtcaccctctttgtacaaccagtatgatctgcagaatgaaactcaaggaagtcaccaactttggaaagagattatcattccatggcaccaaacgctggtcacaacagcccactttttctttggcttctttctccctctggctatcatcactggctactacatccttgtagccttgaagttaagagaaaggcagctggttaagtttagctgacccttccaggtccttgcgactgtggtaaccaccttcttcctctgctggttgcccttgcaagtgtccctgtggctggacttcacatcatttcgggaagacagagagggcctgaaccaggtggccttactcctaagacccctggccttgtctatggcctttatcaacagctgtctcaatccagttctctatgtcttcattgggcatgatttctgggagcacttgctccactccctgctagctgccttagaacgggcacttagtgaggagccagatagtgcctgaatcccagctcccaggcagatgagtccttta

SEQ ID NO: 1846 - DNA, 600 bp, Homo sapiens; identical to SEQ ID NO: 1845

SEQ ID NO: 1847 - DNA, 537 bp, Homo sapiens
gatgcatccatgtaacccagtactggaggtcaagatggagacaatctccacagccaccatggcctttccctgagtgctactataactcaggaggaaagccacccagatactgcagaacaccaacatgctgaaggtgagacatttggtttcattgaagatgtcaggcgggttactttccaggaagactacagcaaaggtccccagaaccaagaagcccaaatagctcaagacacagtagaaaacagtgatagagcccccattacactggatgatgattataccaggactatgggtctttgtctagggaggaaggagatgtttccaactagattccagagatggtcacttggatgagggggcaaaggtgacaacagaatgagattttagggtacccaacaggaccttgggtcctggctggccttgtagctttcccatcctgctagctggccttgtagcttggaaggccatgaccacagtgaaagttttggctgaagcagaagacacagccactgtgaactgaactgaaaaggtggcctg

SEQ ID NO: 1848 - DNA, 537 bp, Homo sapiens; identical to SEQ ID NO: 1847

SEQ ID NO: 1849 - DNA, 600 bp, Homo sapiens
gaggcactgagcagtggggctggcactggccacctgtgcctggcacccttctttggaccaaccccccctgccctggaagagactgtgatcccagaagacacagtgaggggaaccatctgtgttcccaaagtccatgatgacctctccctggctgaaggcccggtcacctgccatgatggaaatgacaaggaccaggccaggagtggcatagagggaatcccccagcccttgtccatagtttgagggcagaaggtggtccagttttcgcagcaccaggctagtaatacttatttcagttccattacggaccaatggggccagtgagtgcctgggaatctgagcctgcagtgggggccgagtagggaaggagatgctgtagtcagcaggaaacgtgggtccaaacagctggctctgcagcagcacattgggtaagctgaaggcgaaggggtggtcctgtgggcacaggctgcatgccagggtctccacagccagcaggagagtcgagcctgcccagggcttccgggcttgggccagggtccacagagacctggtgtccatatctaggaccttgtctgtggcaatcaggagattctgcagcac

SEQ ID NO: 1850 - DNA, 600 bp, Homo sapiens
tggccacccagaccccatcacttgtgctgtgcaccaggcagattttggggtcaccttcatggtctgcacatccactgtgctggccaagaccatcgtggtggtggcagccttccatgccacccaggcagacacccagcttagggggtgggcggggacagtcctcctcagcaccatcctcactgttccctgacccaggcagccttgtgtgcactctgggtgaccagatggccccctcagcctgtgaaactctacagaaccctggcccacagtgactgtaaagtgtgataaaggctccttggaacttctcttggaactgggctacttgagtttgctagatctggtcagcttgctggtgaccttccccacctgccggctgcctgacaccttcaatgaagcaaagcatatcactctcagcatgttgtctgctcctgtgtctgggtgtccttcatacctgcccacatgcatgcccacagcaaagacaccatggccatggaggtctttgtcatcttggcatcagcaggaggcctcatgtcctccctcttcttttccaaatgctacatcatccttctccatcctgaaaagaacacaaaagaccaaatg

SEQ ID NO: 1851 - DNA, 600 bp, Homo sapiens; identical to SEQ ID NO: 1850

SEQ ID NO: 1852 - DNA, 600 bp, Homo sapiens
aggccaggaatgtacagctctgttcctttcccccagatcagccatggatctcagcgcccccagttttccaactgtttccagttcccatccttcctccgcacagtgcccagcagcacccaccagccttgagtcctggccaagctcttgagttactttaactggacctgagtaggcctggtcagttatgacaacagcaactttgagtggctggatcagcagctgcagaagcagatcgggggcgagggtggctgcatggccttctcaaagatcagcagtgtagatgacagcatcaacagcatggccaccgtcattgcctaaacccctgctgccaccgtcattgtctgtgactgctaccattttcacttcagactcctggcgggggcccttcaggagaacaatgtgaatgggaggatgtggatcttttccacctccttcacatataacccctcggtgctgggtcccaaagcccacgagttgctgaatggcagcttgagcctgaccatacacttaggaataatacctgcctttaaggacttcctgttggcgctgcgcccagccgtgtagccaggcaacagtctgatgaggaagctgtgggaggag

SEQ ID NO: 1853 - DNA, 600 bp, Homo sapiens
tggagcatgagccccagagggcctcctggtgggtggtcttggtagcctggtcttcattgtcaggaaggtgaggtcataatttatcaggtaaccatcactgaagacatacggcttgtggtctgaggggcagtagttgatgccctgcagcttttccagcatcttgtccaacaggatgctgaggcggcgctcctgcccggtggtggtgtcaaaagcatagaagatctcctcttggtgggtgttcagtgagtgtaaggcatagagcaccccacaggccatgaaggcccctgacagggctggcttgtactggctggtacgccaggttttctccacttctagggtgctagcgttgagacgactcacaaccaggttgcccttgctctcctcagtggcatacagaacccacagccccttctcatcaccagcaaaatctaagtccttccagggcacaccagcacaggaaaagcggttgttataggtggcaccaggcagcagacgccacagcaccagtgtgttggaggaaaggtccattttggccatgtcacttgtgccacagtagttaaagtacataaagttcttgtacacaacgtttccactgccatc

SEQ ID NO: 1854 - DNA, 792 bp, Homo sapiens
ttgtgtgacaccagtgggtcacttcagcctgatacagtccacctcttctgtggtgggcaccccgttggttctgaggtcaaggtcagcactggacttgctcccccgctgggagggacgccagtgcagcagcatcatcttcttgaagtacttcatggtgttgttcttgaccgtcacgaagcacacggtgttgatcatgctgttgctcatggcgatgcactcgaccacgtagaaggcagtgaggtagtgcttttccttcacgaacacagtggggaagaagtcacgaacgatggtgaaaccgtagaagggtgcccagcacagcacataggccgtgagaatgcacatgagcaccaggaccgtcttcctgcggcagcgcagccgcttgcgaatctgctccgtctggaacccagggactgccttgaaccagagctcccgggagatcctggcatagcacagggtcatggtgaccacagggcccacgaactcgacaccaaagatgaagaggaagtaggacttgtagtagagctgctgatccacaggccagatctggccacagaagatcttctcctggctcttgacaataaagaggaccgtttctgttgcaaagtaagccgatgggatggcaatgagaatggacaccatccagaccaaggcgatcaggaaggaggccgtttgataattcatccgtggtttcaaggggtgaacgatggcgagatatctggtgggggagggaagccaacagtagtaatgatgaatacgtggaaacgttagtttgtaactaaccccaaacataca

SEQ ID NO: 1855 - DNA, 792 bp, Homo sapiens; identical to SEQ ID NO: 1854

SEQ ID NO: 1856 - DNA, 600 bp, Homo sapiens
aaagaggatgagcgccagtggcaggaagaactccagcaggtacagtgcctggtgccagcggagcgaggccgagggcttcgtgcccaccctgtagctgaggcaggaggggccggagaaggtgctcaggagcaggtgcccgttgaggagcaggatgcccacccagagtcccccggccacccgggcagctgcccccacggaagcacggctcagcacgtggtggggctgcaccaccttcaggtagcggttgagtgcgatggctgtgaggaagacaacgctggccgtgcggttggtggacagcatgaagaggttgactttgcaggcagcagccccaaagcgccaggtctcatggaggaggtagtagtccacgcggaggggcaggttgctgatcaggaggaagtcagcggccaccaggctgaccaggaacaccgtgttggaggtccagggccgcgtgtggatgcagaagatgaagagggccaaactgttccccaccaggcccaggacaaactccagggccaggattggtgccaggaaggcagacaccagcgaggaagaggtggggtggcagggccctccagaggacccccccacagtggtaaaggc

SEQ ID NO: 1857 - DNA, 600 bp, Homo sapiens
gaggaggtctggcaagatagatggtgtattatttatggatcaggctgctgcatacaaaccttgcatactattatgcagcttacctaactctcagactattctgagtaatgcttgcttgctaatgaatgtataggagaccacattgtaattgttcttagatgatggagtccatgcagtttcttagaaatcggtctcagtgcatgctgtgctttttcacatttgctctgggttatctgggaagtatcaggttctgggaggcaacagcattaagtgataagaaaaggagacattctggcaaagccaatctgcttaaaggcaaagtccagaacctggaacctagaggcctttctctctgcacgaaaaacaggtagtttgcagtctgagatatgggagagcttttaggctacacagcaacccaagggacctctcaccttttgctgagcttcaatcaggaagctatttgcctggctccagcagatgatgagataatgaggtagtgggttttttattactgttccattttgcaacatcctgcaacaccatcctgggagacaagagcattacccagcttggctttcacgggggagggttgtattcagt

SEQ ID NO: 1858 - DNA, 427 bp, Homo sapiens
acaggtacgaagagatgtcttctgtgcccagaggagcagtactcaagccgcaccagagatggctgcctgcccaggacagagaccttcctggcctttgacgaccccctgggactcatgctcgccttggtggcgctcatgctggccagcctggcagtgctggtcctcagactgttctgaagcaccgagacacacctgtggtcggggccaacaacagagctctcagctgcacgccgctcacctccctgaccctctgtgccctctgtcccttgccttgccttggttgtcccacagctgccacctgccgcctctaccagaccacagttgctgttgtgttcaccatggctgtctcttccgtcctggccttcagggtcaccaggtgacagggtctgggtgtgcctgggacctggcgcttcaactcggtggtcct

SEQ ID NO: 1859 - DNA, 427 bp, Homo sapiens; identical to SEQ ID NO: 1858

SEQ ID NO: 1860 - DNA, 429 bp, Homo sapiens
gctgattgcctgatgggtgtttacttgttctttgttggcattttcgatataaaataccgagggcagtatcagaagtatgccttgctgtggatggagagcgtgcagtgccgcctcatggggttcctggccatgctgtccaccgaagtctctgttctgctactgacctacttgactttggagaagttcctggtcattgtcttccccttcagtaacattcgacctggaaaacggcagacctcagtcatcctcatttgcatctggatggcgggatttttaatagctgtaattccattttggaataaggattattttggaaacttttatgggaaaaatggagtatgtttcccactttattatgaccaaacagaagatattggaagcaaagggtattctcttggaattttcctaggtaaattatattttttcatt

SEQ ID NO: 1861 - DNA, 429 bp, Homo sapiens; identical to SEQ ID NO: 1860

SEQ ID NO: 1862 - DNA, 600 bp, Homo sapiens
caggcggccgagatcttcgtggagtcagaactgcctctgagctgggcagaccggctgagtggctgcctgcgggggccctgggcctggctggtggtgctgctggccatgctggtggaggtcgcactgtgcacctggtacctggtggccttcccgccggaggtggtgacggactggcacatgctgcccacggaggcgctggtgcactgccgcacacgctcctgggtcagcttcggcctagcgcacgccaccaatgccacgctggcctttctctgcttcctgggcactttcctggtgcggagccagccgggccgctacaaccgtgcccgtggcctcacctttgccatgctggcctacttcatcacctgggtctcctttgtgcccctcctggccaatgtgcaggtggtcctcaggcccgccgtgcagatgggcgccctcctgctctgtgtcctgggcatcctggctgccttccacctgcccaggtgttacctgctcatgcggcagccagggctcaacacccccgagttcttcctgggagggggccctggggatgcccaaggccagaatgacgggaacacaggaaatcaggggaaacatgagtga

SEQ ID NO: 1863 - DNA, 600 bp, Homo sapiens
agcggtcgaggctgagggcggccagcaggaagaggccggaggagtaggacacgccccataggaagtagtagaagcggcaggcagctgtccccagcggccagtgtcccccatgccggatctctaggatctggaaggccgctgctgccaggaacaagaagtcagagagggccaggctgagcaggagcagcgccagacgcgtgccagctccatgccgggcctgggagccggccagccacgccatcaacccattggctggcagcccaaggagcagcagggccaccaggaagaccgtgtcccagccaccttgggggtaggagtcctcatcatcaagctctgtgcggggcctgtggccagtggcacccaggtcagcttccatggtagtgtccatttggggtccccagagtcctgctggacacggagtgggtgcctggtgaatcaatgatggtgtgaatgaccgagtatgggagagacggtgctgtgcatctccaggcaagtcaccatccctccctgcgccattgtcatcaccttttgagtaattatcctatgccaaggacttgaagtggatgacctcatggagtcctcatacaatctactttacag

SEQ ID NO: 1864 - DNA, 575 bp, Homo sapiens
tttccaagaattatttttattattaattgatattaaatctatgacacttctgttgtgtatttttcagaatattggttcttcttttatctgaagtgaggagcaccagaggactgatcacggcatagacattgactacaagactctgaacttgctggttgattgggccatatgcccacaacattgctgaggagaaggagatgatgaaatccacccaacagaggaccacagagaaacttaccagcagcagtatggtctggatggcccgtttctcaggggaagctcctggggaaggaccattgctgtgaaggtggtgggatcacctctgaggcctgaataagagagtcaccatgtatgcaattaagaacagcagtattcctaccaggaaagcatccctaagtgttgtcagaataagaaacgtggccctgaggatgaagctcatggagaaaactgagcagtacttacctatattcagtacatttgtctggctcacactggaagcagctacagtgtagaagatcctgttactactgaaagacaagttgaggaaccataagaagaagaaaacatggataatg

SEQ ID NO: 1865 - DNA, 575 bp, Homo sapiens; identical to SEQ ID NO: 1864

SEQ ID NO: 1866 - DNA, 328 bp, Homo sapiens
gttggtgagatttaaacataaaatcacaaaatacaatatcctggctttattattctttggtccctcaatttttctttcaacagtgacatgattatctacattgtaggtttttccagtgtgacccagataattctgaatgtcagtaaatactgctcactttccccaatgaatgtcaccatcagaaggctgtttgttactctgtcgttatccagagatgtcttccttgtaggaatcatgccgctctcaagtgcctacatggtgattctcttgtccaggcatcagaggcgctcccagcaccttcacagcactagctttttattaagaacct

SEQ ID NO: 1867 - DNA, 328 bp, Homo sapiens; identical to SEQ ID NO: 1866

SEQ ID NO: 1868 - DNA, 1400 bp, Homo sapiens
agctgtccaggatgaggatacagcctgtgtgactgtgcaaacacaggggcacaggggagggagctcaatatgtcctggaacaggatgtctctctgtgaccctgggagcagccagagggaccctggggattggcagtgggggacataggagaagggaagaggaggcggaggtggtaggagcagtgggaaggccccatcagggactggcttaggtgtctccagacctgacctggggacaggaagccctgggagggggttggttagctttgcagggtgaagaccaaagaaggaagtgctgcagggcaggaaagggatgacccatttaaggacagcaggagcgggggtgatgccagagtctccacatgtggaagagaggagcggattggatggtgggggtgaaggatgggttcagttgtgaccccgggagtcaagagcccggggagcatcccaggagatgctctgtaggcagcgttaggcgttaccagctcttactctgggatgtggactctgggaaggcccatccctgacccaggacacaacctggcccttccatgcaacctcccccactgctcggtgacccagtgtgtggagggtcatcgggagactgcccccagtgaactgctcctcagctaaacagatgtgtgctgtttgtttgcagaccaaggggctgatccccagccaggaccccaggatgtaggacgcccactggctctccctttcttctgagacacatccagcccccccacgtctccctcatatacacagacccaggattatgctgtgagcctgcaggctttggaagtggccctgtcacccgtgctgcacgggattcacagccccagccccatggcccctctccacacctcaaaactcctgccccataacgtcctccgcatccactttccagctcagcagccgcacccgaggctcagcctgaggggtgtgtgcccaggccctcccacttcccgagttgtctgcctctcctcaaatgctgtgtgctgcaattgtccaggcgatgacaatggtgatggctccagagaacacaccagctatttatgagcctctgcccccaggctgggcctgtcactggcataggaaggccagccccgcatctcccactgccaacagctgaagccgagcacagacctccctttgcacgctggaacagttactcacctgtggcttcttcccccagtgtaccgttccactgtggcccacattcttgtgcacgcgggcatttgcaggcacgctctcgcgtagttacctatctgaatgcacaccaagcacatgcgtgcacactctgcgtctgtgattcatttcatgtagtggtctaagctcctcccagggctgtgtggatctgacagggtataggaaaataaaaagcggagaaggtgtcttcag

SEQ ID NO: 1869 - DNA, 1400 bp, Homo sapiens; identical to SEQ ID NO: 1868

SEQ ID NO: 1870 - DNA, 600 bp, Homo sapiens
agagtctcgttctgtcgcccaggctggagtgcagtggtgtgatctcagctcactgcaacctccgcttcccgggttcaagcgattctcctgcctcagcctcccgagtagctgggactacaggctcccgctaccatgcctggccaattttttgtaatttttaatagagacagagtttcaccatattggccaggctggtctcaaactcctgacctctagtgatctgcccacctcggcctcccaaagtgctggagttacaggcgtgagccaccgcacccggtcgagctattattcttacaccctgtgtaaaatggagacagagagatgggaggaaataagcgtgcagctgggagatggggatggggaaccatgtctcagctggaatggttgtatatgctctgaagtggggtataatgaaagtctcacataaagaactcagaggttggcccctaagcccctcttgaaggtgtgttctccaggacaggggttcctctttggttcctgtattgagatgcatcaatgataaaggttagccatcagaaggattttctaggaggcagcccctagaaaggagggaggcagagggaagatgaggtagagctc

SEQ ID NO: 1871 - DNA, 600 bp, Homo sapiens
ttcttctactgcgacatgctcaagattgcctccatgcacagccagcagattcgaaagatggaacatgcaggagccatggctggaggttatcgatccccacggactcccagcgacttcaaagctctccgtactgtgtctgttctcattgggagctttgctctatcctggacccccttccttatcactggcattgtgcaggtggcctgccaggagtgtcacctctacctagtgctggaacggtacctgtggctgctcggcgtgggcaactccctgctcaacccactcatctatgcctattggcagaaggaggtgcgactgcagctctaccacatggccctaggagtgaagaaggtgctcacctcattcctcctctttctctcggccaggaattgtggcccagagaggcccagggaaagttcctgtcacatcgtcactatctccagctcagagtttgatggctaagacggtaagggcagagaagtttcaaagtgcctttctcctccccactctggagccccaactagatcagcaggagctagggggatgagagcacttgcttcaggcaattgacccctgtcccagcatcccccacccccagac

SEQ ID NO: 1872 - DNA, 600 bp, Homo sapiens; identical to SEQ ID NO: 1871

SEQ ID NO: 1873 - DNA, 518 bp, Homo sapiens
tgtgtgcattccaggggactgtgtctctccatgcacctacagggaaaaccctatctctttctacctatgaggtaagcgcagaagggcaaaaaataactccagcctctaagaaaatagaagtctatcgatccaaaagtgttggccatgaaccaaactcagaagattcttcatccacgtttgtggacaccagtgtgaaaatacacttggaggttcttgaaatttgtgataatgaagaggccttggacactgtgtcaatcattagtaacatcagtcagtcctccacacaagtcagatctccatccctacgttactccaggaaagaaaacagatttgtttcatgtgacctaggggaaacagcctcatactccctctttttgcccaccagtaatcctgatggtgatattaatatctccattccagacacagtagaagcacacaggcagaacagtaaaaggcagcatcaagagagggatggctaccaggaggaaatccagttgttaaataaagcttacagaaaa

SEQ ID NO: 1874 - DNA, 518 bp, Homo sapiens; identical to SEQ ID NO: 1873

SEQ ID NO: 1875 - DNA, 600 bp, Homo sapiens
gctgcatagcagatcttgtaaaatatatttcttctatctaataataattatgtttcctttgaccaacatctttccatcctgtcctccaccaccgcaggctctggtaaccaccattctcctctctacttctaagagataagcttcgtggatccagatatcctgcaggaattcctcgagacgtacggtgcgcgcgatgcattcgaagatctccgctgtattacaaattttaatttctcctggcgtgggagttcacagcagccttatggagggaaattcctccaagcctgcgtgtcataaactgaactacagggtttagggtcctcaggctgcccagggatgctggaggtccacaggtcaactgcagggagatggattccccaaatgagcaagaggttctgatgctcaggaaatagattagtagctccaggcaggtgtggcttcatgaccgtaaggaaatggaagcaaagagttgttgggcatgtagaactttcatttcttgcacatttattcagagacagagcatatgcatttttggtagaaaattcaatattgctgttgatctcaaattcaagtgtagctgggcacacatgcatacagctg

SEQ ID NO: 1876 - DNA, 600 bp, Homo sapiens; identical to SEQ ID NO: 1875

SEQ ID NO: 1877 - DNA, 600 bp, Homo sapiens
actccaggtgggcagagatgaaagtaaaagccccgacatacattggtctctccaatatcctgtgctgggccttccacatgctggtaaatgccatttttcctatttatacaactggcaaatggagcaacaacaacatcacaaagaaaggagatttgggatattgttctgccccacttagtgatgaagtcacaaagtcagtatatgcagcattgacatccttccatgatgttttgtgtctggggctcatgctctgggccagcagctccatcgttttggtcttgtacaggcacaaacagcaggtacaacacatctgtaggaacaatctctaccccaactcttctcctgggaacagagccatccaaagcatccttgcattggtgagcacctttgcattatgttacgccctttccttcatcacctacgtttatttagctctcttcgataattccagttggtggctagtgaacactgctgcactaatcattgcctgttttccaactattagcccttttgttctcatgtgccgtgaccccagcagatccaggctctgcagtatctgctgcagaagaaatagacgattctttcatgatttcaggaaaa

SEQ ID NO: 1878 - DNA, 600 bp, Homo sapiens
tggttggtgtcagacatttgatttcatcactgcagcgtggctgatttttttattcatggttctctgtgggtccagtctggccctgctggtcaggatcctctgtggctccaggggtctgccactgaccaggctgtacctgaccatcctgctcacagtgctggtgttcctcctctgcggcctgccctttggcattcagtggttcctaatattatggatctggaaggattctgatgtcttattttgtcatattcatccagtttcagttgtcctgtcatctcttaacagcagtgccaaccccatcatttacttcttcgtgggctcttttaggaagcagtggcggctgcagcagccgatcctcaagctggctctccagagggctctgcaggacattgctgaggtggatcacagtgaaggatgcttccgtcagggcaccccggagatgtcgagaagcagtctggtgtagagatggacagcctctacttccatcagatatatgtggctttgagaggcaactttgcccctgtctgtctgatttgctgaactttctcagtcctgattttaaaacagttaagagagtccttgtgaggattaagtgagaca

SEQ ID NO: 1879 - DNA, 600 bp, Homo sapiens
ggcccaataacacaccacaagggatgtgtggcagccacattttttgttcatttcttttacctttctgtatttttctggatgcttgccaaggcactccttatcctctatggaatcatgattgttttccataccttgcccaagtcagtcctggtggcatctctgttttcagtgggctatggatgccctttggccattgctgccatcactgttgctgccactgaacctggcaaaggctatctacgacctgagatctgctggctcaactgggacatgaccaaagccctcctggccttcgtgatcccagctttggccatcgtggtagtaaacctgatcacagtcacactggtgattgtcaagacccagcgagctgccattggcaattccatgttccaggaagtgagagccattgtgagaatcagcaagaacatcgccatcctcacaccacttctgggactgacctggggatttggagtagccactgtcatcgatgacagatccctggccttccacattatcttctccctgctcaatgcattccaggtaagtccagatgcttctgaccaagtgcaaagtgagagaattcatgaagatgttctgtga

SEQ ID NO: 1880 - DNA, 1400 bp, Homo sapiens
gccttaagatgccctcctccctcgtgtgccagcctccttggttgttcttgggccacaggagctggccgtgtccccgcagtgcctggtgtccaggtggaaagtggagggcattttccagggcactgctttccccagaggcttcctcatggctcacaggcactctacgaagtttctaatgggcagaccacgcggcaggtagcacagtgcgctccgtctggtcaccatgagaccgacctgcgctgagtccccactgacctggagagggagggctggtgacagccgtgtcttctgtgttgagggaaatttatggactcagactcagccccagaggagatgggataattgttatggacccatgtgtgggcatgatcctgtggaacacaggtttgggatcatagatgtgaattaagacaccaccgagatacgggctgtgaggttcatactgtgctgatagcactcgtggtgtctgtgaaatgtgggtaagacattcaaacctggttttgatactggaaactcttcctttaaaactgtgaccatgatttcattcagcccctccacacccctatgtctgccttgtttcagagtgagttttctatggagcctgtggcccttttgcagcccacctggtggcttcttaatgtaactcttcccctggtcgcctggagtggaccactcatctgcaggcctctcctgcatggggagggtaggcagggagcagcatgtctgcaggggtgaacctttgctcttctgtcaggcgaggcccaggctgcaccagccacctgccacatggtgacagtgccacgggccctgcgtatggcccctgcaaccgtgctctggcgggcacacctggctgctgcaggccaaggccgctgttcagtgaagagtcccatgtttagtatggactaaagtcccatgtttagccactgccccaggctcccgtgaccccagaaaccaggtcacatggaccacagtgccagatcctcatcacgccggtgagcacctagaagtgagaacactgtattcctacaatgtacacttggatatttctccttatttagtttctagtgaaacaaatcaagtaaggaactatctttagtttagatggaattatttgtttttaattgttgccgtattcatctatatagctaatatttcaagataagtaatgaacaaaacctgtctaaaccttttgtttccaatgaatgaaagtcatgcactttatttataggctctatgttttggcttctgcagtacttttattatctatacataatttggccaaaaataagaaattggaaagaatgaaatgtttagtttatagtagaagaaagatgatgacactaagttgtgaaaatatgttgtgatttttatgaaataaactcatgtcctgaaaaaaaaaa

SEQ ID NO: 1881 - DNA, 600 bp, Homo sapiens
tgggctggtcccctgctctttgccagtctgcccgctctggggtggaaccactggacccctggtgccaactgcagctcccaggctatcttcccagccccctacctgtacctcgaagtctatgggctcctgctgcccgccgtgggtgctgctgccttcctctctgtccgcgtgctggccactgcccaccgccagctgcaggacatctgccggctggagcgggcagtgtgccgcgatgagccctccgccctggcccgggcccttacctggaggcaggcaagggcacaggctggagccatgctgctcttcgggctgtgctgggggccctacgtggccacactgctcctctcagtcctggcctatgagcagcgcccgccactggggcctgggacactgttgtccctcctctccctaggaagtgccagtgcagcggcagtgcccgtagccatggggctgggcgatcagcgctacacagccccctggagggcagccgcccaaaggtgcctgcaggggctgtggggaagagcctcccgggacagtcccggccccagcattgcctaccacccaagcagccaaagcagtgtcgacctggacttgaactaa

SEQ ID NO: 1882 - DNA, 600 bp, Homo sapiens
gtacttgacggtgtcgttcttgacggtcacgaagcacagagtgttgatcatgctgttgctcatggcgatgcactcgacgatgtagaaggcagtgaggtagtgcttctccttcacaaacacggtggggaagaagtcgcgcacgatggtgaagccgtagaagggcgcccagcatagcacgtaggcggtgaggatgcacatgagcaccaggaccgtcttcctgcggcagcgcagcctcttgcggatctgctctgtctggaatccagggaccgccttgaaccagagctcccgggagatcctggcatagcacagggtcatggtgaccacggggcccacgaattctatgccaaagataaagaggaagtaggacttgtagtagagctgctggtccacaggccagatctggccgcagaagatcttttcctggctcttgacaatgacgaggaccgtctcggtggtgaagtaggcggaagggatggcgatcaggatggacaccgtccacaccaaggcaatcaggccagtggctgtttggcacttcattcgtggtctcagcggatggacaatagccagatacctagggcaagaacacaagtggaggcagcc

SEQ ID NO: 1883 - DNA, 1400 bp, Homo sapiens
gctgagcctcgaccactacatcgagcgtgcactgccgcggacctacatggccagcgtgtacaacacgcggcacgtgtgcggcttcgtgtggggtggcgcgctgctgaccagcttctcctcgctgctcttctacatctgcagccatgtgtccacccgcgcgctagagtgcgccaagatgcagaacgcagaagctgccgacgccacgctggtgttcatcggctacgtggtgccagcactggccaccctctacgcgctggtgctactctcccgcgtccgcagggaggacacgcccctggaccgggacacgggccggctggagccctcggcacacaggctgctggtggccaccgtgtgcacgcagtttgggctctggacgccacactatctgatcctgctggggcacacggtcatcatctcgcgagggaagcccgtggacgcacactacctggggctactgcactttgtgaaggatttctccaaactcctggccttctccagcagctttgtgacaccacttctctaccgctacatgaaccagagcttccccagcaagctccaacggctgatgaaaaagctgccctgcggggaccggcactgctccccggaccacatgggggtgcagcaggtgctggcgtaggcggcccagccctcctggggagacgtgactctggtggacgcagagcacttagttaccctggacgctccccacatccttccagaaggagacgagctgctggaagagaagcaggaggggtgtttttcttgaagtttcctttttcccacaaatgccactcttgggccaaggctgtggtccccgtggctggcatctggcttgagtctccccgaggcctgtgcgtctcccaaacacgcagctcaaggtccacatctgcaaaagcctcctcgccttcagcctcctcagcattcagtttgtcaatgaagtgatgaaagcttagagccagtatttatactttgtggttaaaatacttgattcccccttgtttgttttacaaaaacagatgtttcctagaaaaatgacaaatagtaaaatgaacaaaaccctacgaaagaatggcaacagccagggtggccgggccctgccagtgggcggcgtgtgctagcaaggcctgccgggtgtgccgcagtcaccacagggttctgagaacatttcacagaagtgcctgagacgcggagacatggctggtgttaaatggagctattcaatagcagtgacgcgctctcctcagccaccaaatgtccctgacaccctccccagcccccacagataacatcagctgaggtttttttcagtatgaacctgtcctaaatcaattcctcaaagtgtgcacaaaactaaagaatataaataaacaaaagaaaggtgaaaaaaaaaaaaaaaaaaa

SEQ ID NO: 1884 - DNA, 1400 bp, Homo sapiens; identical to SEQ ID NO: 1883

SEQ ID NO: 1885 - DNA, 1400 bp, Homo sapiens
cgctggactgaggcctccctgctgggccccgttgcctgccacctgctcttctacgtgatgaccctgagcggcagcgtcaccatcctcacgctggccgcggtcagcctggagggcatggtgrgcatcgrgcacctggagcgcggcgtgcggggtcctccgcggcgggcgcgggcagtgctgctggcsctcatctgggcctattcggcggtcgccgctctgcctctgtgcgtcttctttcgagtcgtcccgcaacggctccccggcgccgaccaggaaatttcgatttgcacactgatttggcccagcattcctcgagagatctcgtgggatgtctcttttgttactttgaacttcttggtgccaggactggtcattgtgatcagttactccaaaattttacagatcacaaaggcatcaaggaagaggctcaccgtaagcctggcctactcggagacccaccagatccgcgtgtcccagcaggacttccggctcttccgcaccctcttcctcctcatggtctccttcttcatcatgtggagccccatcatcatcaccatcctcctcatcctgatccagaacttcaagcaagacctggtcatctggccgtccctcttcttctgggtggtccccttcacatttgctaattcagccctaaaccccatcctctacaacatgacactgtgcaggaatgagtggaagaaaattttttgctgcttctggttcccagaaaagggagccattttaacagacacatctgtcaaaagaaatgacttgtcgattatttctggctaattttctttatagccgagtttctcacacctggcgagctgtggcatgcttttaaacagagttcatttccagtaccctccatcagtgcaccctgctttaagaaaatgaacctatgcaaatagacatccacagcgtcggtaaattaaggggtgatcaccaagtttcataatattttccctttataaaaggatttgttggccaggtgcagtggttcatgcctgtaatcccagcagtttgggctgaggtgggtggatcacctgaggtcaggagttcgagaccaacctgaccaacatggtgagacccccgtctctactaaaaataaaaaaaaaaattagctgggagtggtggtgggcacctgtaatcctagctacttgggaggctcaaccacgagaatctcttgaacctgggaggcagaggttgcagtgagccgagatcgtgccattgcactccaaccagggcaacaagagtgaaactccatcttaaaaaaaaaaaaaaaagatttgttatgggttccttttaaatgtgaacttttttagtgtgtttgtatatgatcaaatttaataaatatttatttatgactgttcagcaaaaaaaaaaaaaaaaaagggcgg

SEQ ID NO: 1886 - DNA, 1400 bp, Homo sapiens
ggactgtctttgagtctgtctgtatgaccttgggcctgccacttctcacagaccctaggtatccacagctgtgacatgggggcaagcggctttgtttcagcctaacccaggagcttagtaaaaattgcataagaccagggggaagagtgtcagcgtggggtgggaattcccgcggcctccacctgcttgctaggggcaggatctcattcaggctgccctggaagcacctgcttggccctgccaccttcctccaggggagggccagatggcatcctggcttggggcgggtgggacctacccaggctctgagactttactggcctatgcctgaggcctcttttcctttaactccctaaattatgatgactccaagtccaagcccacccttcccaaagattgggaggttccgccgttcccagaggctcctcctgcggtgctcccaagacttccatagaccatctggaccagtagcccatcccgcagttttcttgggggcagaggaaaacgcttctttctcctccagctgaatcagctggatcccagtgtcctggctgtttggtgattgggcaagattgaatttgcccaggtaggcgtgagagtgtgggttttaaattcgaagctcaggccatagtttcagagaatcacccttaccccagaccttcatgagacagtgctcatgaagccagtgcgtttcccagaacgaacactaggcggcaccgttggtccacactcagaggcccttggcgccaagactgcatctagaatcgctcaaacacctgtttgcagaccccatgcaccagctggaggggccgtaactgcaggactgcgcctactgagtgacccatttcctccaggaggaaaggcaagacacgcttacacggccatttgtctcttttcccaatgcggcggtgcactttcgctcttgggggctgcaccccagacatagctggcaccagagcagggtgctcaggtggtgggtgctcagggccctgccccaggccactgggccgttttgatgacctcgaaggtcacaggcagaaaataggagcaggatttcccctggggaaaagttctcctgggacatcttctgctcttctgtacatttctagatgcaaataactccttcaccaggcagtgagtggcgtaggctctggagccaggctgcctgggctccaatgccagctctgccacttgctagctgtgagactgtggacaaaccactcagcctctgtgtgcctcagttttcctatttgtaaaatagaggccatagtggtacctattttgaagactaagtaaaagaattcaaataaagagacttggcacagagtaagtgctcagtaaaaaaaaaaaaaaaaaaaaaaaaaaaaaaaaaaaaaaaaaaaaaaaaaatagcggccgcc

SEQ ID NO: 1887 - DNA, 1400 bp, Homo sapiens; identical to SEQ ID NO: 1886

SEQ ID NO: 1888 - DNA, 600 bp, Homo sapiens
gagaaacctacaaaatgtcaaaccagcttcccgactcccaggagctcaagccaagcccagaggcagtggctggggtccctgcaggtcatgaggggcctatgcctttactccttttaaacaccagcacccgtcttttccccaacctaaaaccaaccaccagcatttcactacaggaccaaatggaaaccgagggaaccctgggtcttgggaagaacaacaggaaaccaaggtctgacctagggttccctcccagtcttcacatcactctggcctcatcaccaaggtgacagaggacacaggggagggggaaaacccacacacactccttggaatgggtcctgttatttatgcttgctgcacagacatattagaagaaaaaaaaaagctttgtattattcttccacatatgctggctgctgtttacacaccctgccaatgccttagcactggagagctttttgcaatatgctggggaaaggggagggagggaatgaaagtgccaaagaaaacatgtttttaagaactcgggttttatacaatagaatgttttctagcagatgcctcttgttttaatatattaaaattttgcaaagccctttg

SEQ ID NO: 1889 - DNA, 600 bp, Homo sapiens
gtatttgtttaggtcatgaagcaaacaatgctctaatcacaatattaactgtttaattaaaatgttgtaacaagtataaaacagggaatgtaagtttattaccaaagtgatatgtattccaaaaaagtcatagaagatgaagcactataatattgttcccatatatttaaaatacccaagtacattctaattaccagtatatcagaggaaaattttcgtagtctttgtaaaataatatactcatcatagaaaacttgaaaaatgcagaaatgtataaaaaagcaaaaatgattactgataatatcacaacccagaagtaaccacctttaaaaagcaacccccatgtatgcctatatgtgtattgtatactttttttacataattggagtcatactgtaaacagttttataagtagatctttttcattgcaaaattgccacattttcttatggcattaaaaattttacaaaaacataattttaatggctatattatattccatttaatggatgcaactcagtttatttaaccattcccatgttgttaactatttaggttgtttctaattttcattattataaagttgcagaaatttggtgt

SEQ ID NO: 1890 - DNA, 600 bp, Homo sapiens; identical to SEQ ID NO: 1889

SEQ ID NO: 1891 - DNA, 1400 bp, Homo sapiens
ctggttcagccagagggctggatggacagtgtttgctgagtcacagatatctctctcatgtagcctttgtctccacagtggtgaccaggaggcacagaacccaaacctggtatctcagctctgtggcgtctttcttcaaaatgagacgaatgaaaccatacatatgcagatgagcatggcagtgggacagcaggccctgcccttgaatatcattgcccccaaggctgtgctggtctccctctgtggggtcttattgaatggcactgtcttctggctgctttgctgtggggccacgaatccctacatggtatacatcctccacctggtcgctgctgacgtgatctatctttgctgctcggcagtggggttcttacaggtgactctgctaacttatcatggagtcgtgttttttatccctgatttcctggccatattgtctcccttctcctttgaggtgtgtctctgtctcctggtggccatcagcacagagcggtgtgtgtgtgtcctcttccccatctggtacagatgccaccgcccaaaatacacatctaatgttgtctgcaccctcatctggggcctgcctttttgcatcaacatagtaaaatcacttttcctaacttactggaaacatgtaaaggcatgtgtcatatttctaaagctttctgggctcttccatgctatcctttcacttgtgatgtgtgtgtcgagtctgactctactcattagattcctgtgctgctcccagcagcaaaaggccaccagggtctatgcggtggtgcagatctcggcccccatgttcctactctgggccctacccctgagcgtggcacccctcataacagatttcaaaatgtttgtcaccacctcctatttaatttccttgttcctcattataaacagcagcgccaaccctatcatttatttctttgtggggagcctcagaaagaaaaggctgaaggaatctctcagagtgattctccaacgggcgttagcagataagccagaggtggggaggaacaaaaaggcagctggcatcgacccaatggagcaaccacactctactcagcatgtggagaaccttcttcccagggagcacagggtcgatgtggaaacataatttcccacatctgagctggggaattgtacacatagtaacccagcctgttctgcatcataaggctgctgcatcaaatcaatgctttattctaatcaagttcagctttcatggactttcaaaacaaccccttgctgtttgtggttggaagagacattaacttccttcctaggcagtaagcccagtttgaatgtgctccagttccaacgatgaggggaatgggacccagtgagactttcctggtacctgtggaatccaaataaagaccatacaaaggcatgaattc

SEQ ID NO: 1892 - DNA, 1400 bp, Homo sapiens
agactcacgctgactgcaggcagcggggggcatcgaggggtgcttagccccagggcactcagaaacccgggcgctgcctgctctgcgtttcctcgtctggggtggctctgcagcctcctgcgggcgggcgtctgctgctcctacaagggaagcttcttgctgccaggcccacacatccccagttgttggtttggccactcttgacctggagccatcttcctagtgggccacccctaatcactattgcttcctaaaggtattttcaccctcttcgcctggtacagccctcacagctcttcagagcaagcactggactacaagggcatggctcacaaaaggttaatggatgggggttacctagccctggctaattccccttccattcccaactctctctctctttttgaagaaaaatgctaagggcagccctgcctgccctccccatcccccgctgtaaatatacactatttttgatagcacacatggggcccccatatctcttggccttggttttgatgttgaaatcctggccttgggagagatgccttccaggcagacacagctgtctggttcaggccaagcccctttgcaatgcaagccctttctggtgttatgaagtccctctatgtcgtcgttttcaccagcaactggtgactgtcccttcgacacggacctgctttgagatttcctgacagggaaaagatttctgtccatttttttcctgtgcctaacagcataattgccttttcctatgtaaatattatgatggtggatcaagacataagtaaatgagcctttctgcctcacatcagccctgtgtataaagccattattctctgatgcactgtttgccccagtaactcactttaaaacctctctttccagtgttccctctctccctccagggccactgcttgaagaagaatatgtatgtttctatcttgtatgtctgtgtgcccctcctgccccgaaagtgctgactatggggaaatcttttagctgctgtttttagactccaaggagtggaaattatgtggaagaagcaaacctgatacaatttgcccaaggtaaacagtttgaaaagacaaatgggcctgccaaactgtacagtttcttccccaagagctgttaggtatcaaaatgttgtcctttcccccctccgtgcttttctggttgagatcatgtcattgatgaactgccaaagtcaggggaggagggcagagactttgtgtttacatctgcatttctacatgttttagacagagacaatttaaggcctgcactcttatttcactaaagaaaaactaatgtcagcacatgttgctaatgacagtggatttttttttaaataaaaaagtttacagatcaaatgtgaaataaatatgaatggagtggtcaaa

SEQ ID NO: 1893 - DNA, 1400 bp, Homo sapiens
gtcccggcaggcgctgggatgggggcttatggggtggcatcgtctctgggccctcctttccccctttgcctgtttcggatctgtggttcctttgaaagccagaacaatggatcggcttccttacccagcacccctccggtaggtgggtggccacgtggatgcctcgctggggaggtcttggaggcctggtctctgcctcgacgggagatccccgatcactggcattcaccccctgcaaaaatcggggcgacaatagctcactgcctacttgctgcagggagatgaaaggctttgcagaaagctttgagctctgtgggggaacacactagagaaccaaaaatgtgattatatggtgatataaaaatccctttcctctgtgtttaccaccacctgtcttcctgtagacttttgttctgtccctggggtgtgtgaattcctaccccgaactggaagccgggagtggcagacagaatcactatttcaagttaaaggatctctttgagaatgtgttcttctggctgcaaaggtctgagttattacgctacatgacaacgtttcgacatttcaccggcaacaccaagagggtttttagtggcttgggtctccccagtgggggataagtcttttgtcatcaaggaggcaaattgtctccccaagacagctcaaaatatccacacctcggcaacagtctaagatgagagcctgtgacaggtggcagcgcccccaggtggggtactggcatcagagcctggtgcgcccctaggggagcctcccactggagtgcccggccaggtctccaagccccaaatgagtccttgtgaaccacaactgatccccccaggtgggtgcttgtggactgcctcggacccagccacgctgctccccgcaatgctgatggggctgtgcattgaggacccctgcttcctggttctcagtcccaccccaaaacctggcacccagaacagttggaagtgtggaaaggaggtttatcggccttcccttggagagggcctggcttcaacattgggccagtaggcatcttagcttggcaggtgtcgggggaatgggccagatggacctgctagatttggaagggcaccgagggagttttctgggtgtagagagaatggaggggaccaaaaagagtccttcctggggtgtgggaggcttcccagcttggtcctcagtgggttgttgaggccagagtatcgccctgggatgtggtggggagctgggccaggagagggactgactgtgaccctctgctggccggtcttgtgtgcgccccatgggacccccagtgttcttgcctgtgacctcttattgcgacatgcaggtggtgtttttttttttttttaaactctgagctattttatcaataaaggatattttgtaataag

SEQ ID NO: 1894 - DNA, 1400 bp, Homo sapiens; identical to SEQ ID NO: 1893

SEQ ID NO: 1895 - DNA, 1400 bp, Homo sapiens
cggccgtcatctccttcccgccgctggtctcgctctaccgccagcccgacggcgccgcctacccgcagtgcggcctcaacgacgagacctggtacatcctgtcctcctgcatcggctccttcttcgcgccctgcctcatcatgggcctggtctacgcgcgcatctaccgagtggccaagcgtcgcacgcgcacgctcagcgagaagcgcgcccccgtgggccccgacggtgcgtccccgactaccgaaaacgggctgggcgcggcggcaggcgaggcgagaacgggcactgcgcgcccccgcccgccgacgtggagccggacgagagcagcgcagcggccgagaggcggcgcgccggggccgttgcggcggggcgggcggcggcgagcgggcgcggaggggggcgcgggcggtgcggacgggcagggggcggggccgggggcggctcagtcgggggcgctgaccgcctccaggtccccggggcccggtggccgcctctcgcgcgccagctcgcgctccgtcgagttcttcctgtcgcgccggcgccgggcgcgcagcagcgtgtgccgccgcaaggtggcccaggcgcgcgagaagcgcttcacctttgtgctggctgtggtcatgggcgtgttcgtgctctgctggttccccttcttcttcatctacagcctgtacggcatctgccgcgaggcctgccaggtgcccggcccgctcttcaagttcttcttctggatcggctactgcaacagctcgctcaacccggtcatctacacggtcttcaaccaggatttccggccatccttcaagcacatcctcttccgacggaggagaaggggcttcaggcagtgactcgcacccgtctgggaatcctggacagctccgcgctcggggctgggcagaaggggcggcccggacgcgggggagctttcccagagacccggggagctttcccagagacccggggatggattggcctccagggcgcaggggagggtgcggcagggcaggagcttggcagagagatagccgggctccagggagtggggaggagagagggggagacccctttgccttcccccctcagcaaggggctgcttctggggctccctgcctggatccagctctgggagccctgccgaggtgtggctgtgaggtcagggttttagagagcagtggcagaggtagccccctaaatgggcaagcaaggagccccccaaagacactaccactccccatccccgtctgaccaagggctgacttctccaggacctagtcggggggtggctgccagggggcaaggagaaagcaccgacaatctttgattactgaaagtatttaaatgtttgccaaaaacaacagccaaaacaaccaaactattttctaaataaacctttgtaa

SEQ ID NO: 1896 - DNA, 1400 bp, Homo sapiens; identical to SEQ ID NO: 1895

SEQ ID NO: 1897 - DNA, 600 bp, Homo sapiens
cagacgggaaggtggcagtgaacctggccaagctgaagctgttccggcattactatgtcatggtcatctgctacgtctacttcacccgcatcatcgccatcctgctgcaggtggctgtgccctttcagtggcagtggctgtaccagctcttggtggagggctccaccctggccttcttcgtgctcacgggctacaagttccagcccacagggaacaacccgtacctgcagctgccccaggaggacgaggaggatgttcagatggagcaagtaatgacggactctgggttccgggaaggcctctccaaagtcaacaaaacagccagcgggcgggaactgttatgatcacctccacatctcagaccaaagggtcgtcctcccccagcatttctcactcctgcccttcttccacagcgtatgtggggaggtggagggggtccatgtggaccaggcgcccagctccccgggaccccggttcccggacaagcccatttggaagaagagtcccttcctccccccaaatattgggcagccctgtccttaccccgggaccacccctcccttccagctatgtgtacaataatgaccaatctgtttggct

SEQ ID NO: 1898 - DNA, 1400 bp, Homo sapiens
tattattagtaccctcattgtagccatgggaaaattgatgttcagtggggatcagtgaattaaatggggtcatacaagtataaaaattaaaaaaaaaaaagacttcatgcccaatctcatatgatgtggaagaactgttagagagaccaacagggtagtgggttagagatttccagagtcttacattttctagaggaggtatttaatttcttctcactcatccagtgttgtatttaggaatttcctggcaacagaactcatggctttaatcccactagctattgcttattgtcctggtccaattgccaattacctgtgtcttggaagaagtgatttctaggttcaccattatggaagattcttattcagaaagtctgcatagggcttatagcaagttatttatttttaaaagttccataggtgattctgataggcagtgaggttagggagccaccagttatgatgggaagtatggaatggcaggtcttgaagataacattggccttttgagtgtgactcgtagctggaaagtgagggaatcttcaggaccatgctttatttggggctttgtgcagtatggaacagggactttgagaccaggaaagcaatctgacttaggcatgggaatcaggcatttttgcttctgaggggctattaccaagggttaataggtttcatcttcaacaggatatgacaacagtgttaaccaagaaactcaaattacaaatactaaaacatgtgatcatatatgtggtaagtttcattttctttttcaatcctcaggttccctgatatggattcctataacatgctttcatccccttttgtaatggatatcatatttggaaatgcctatttaatacttgtatttgctgctggactgtaagcccatgagggcactgtttattattgaatgtcatctctgttcatcattgactgctctttgctcatcattgaatcccccagcaaagtgcctagaacataatagtgcttatgcttgacaccggttatttttcatcaaacctgattccttctgtcctgaacacatagccaggcaattttccagccttctttgagttgggtattattaaattctggccattacttccaatgtgagtggaagtgacatgtgcaatttctatacctggctcataaaaccctcccatgtgcagcctttcatgttgacattaaatgtgacttgggaagctatgtgttacacagagtaaatcaccagaagcctggatttctgaaaaaactgtgcagagccaaacctctgtcatttgcaactcccacttgtatttgtacgaggcagttggataagtgaaaaataaagtactattgtgtcaagaaaaaaaaaaaaaaaaaaaaaaaaaaaaaaaaaaaaaaaaaaaaaaaaaaaa

SEQ ID NO: 1899 - DNA, 530 bp, Homo sapiens
tttaaatttaaaaactttattggaatagcatgttagcagcagtgaacagggcatggcacagaaggtttccaaaacaagtttagcatgaaggatgccatatgctgttgccaacaactagaacacggtgactaaagacacagttctgaatgtccagcacaacctctggcctgcaactatgttcagtgatgatgataaacaaggtggtgacttggaaggaatccctatgtcaagtgagaaaaaaaaatgatgtctgacctccttatatatgtaaaaaatataccttcagagtccgtcagtaagctggaagaagtggatgttgaagtttttaacatcgatgatgggtctccagttgttcatcaacccatggtgaaatagctgaacggttctgaatcaaaggtgatcctaatagtgaagacattaacattgcagaaaaagtgcctacagattatatggtgaaaatacgtgatgggcttcttgaaggactagagcagtgtgtattcaaaacagaacaagaaatcacgtcagtttat

SEQ ID NO: 1900 - DNA, 530 bp, Homo sapiens; identical to SEQ ID NO: 1899

SEQ ID NO: 1901 - DNA, 600 bp, Homo sapiens
gctgggggtgctctgtgcgccaatggcgcggtgaggcaaggtgacgatggcgccgccctggaggtgatcgaggtgcaccgagtgggcaactccaaagagcacttgcctctgcccagcgaggctggtcctaccccttgtgcccccgcctctttcgagaggaaaaatgagcgcaacgccgaggcgaagcgcaagatggccctggcccgagagaggaagacagtgaagacgctgggcatcatcatgggcaccttcatcctctgctggctgcccttcttcatcgtggctcttgttctgcccttctgcgagagcagctgccacatgcccaccctgttgggcgccataatcaattggctgggctactccaactctctgcttaaccccgtcatttacgcatacttcaacaaggactttcaaaacgcgtttaagaagatcattaagtgtaacttctgccgccagtgatgacggaggagtagccggccagtcgaggctacaggatccgtcccattcactatgcttcccccaaccctagggaatccacacttaatataattcgccacttctcctctttttctctgctccgctcacggcttgcagacctgg

SEQ ID NO: 1902 - DNA, 600 bp, Homo sapiens; identical to SEQ ID NO: 1901

SEQ ID NO: 1903 - DNA, 600 bp, Homo sapiens
aagcggaagaccttctcgctggtcaaggagaagaaggcggctcggaccctgagtgccatcctcctggccttcatcctcacctggacaccgtacaacatcatggtgctggtgtccacgttctgcaaggactgtgttcccgagaccctgtgggagctgggctactggctgtgctacgtcaacagcaccatcaaccccatgtgctacgcactctgcaacaaagccttccgggacacctttcgcctgctgctgctttgccgctgggacaagagacgctggcgcaagatccccaagcgccctggctccgtgcaccgcactccctcccgccaatgctgatagtcccctctcctgcatccctccaccccagtccccgggaaaaggccggtcggaagagggcaggggctgcatcctcagccccagggccctgctcaggcctcacctggcttcccaggaccctgggtcaccttcctgggcagcccagagagacctgccaactttccagacttcgctattcccaggcagggagggaaacccggggaactggtttttctgttccctgctgggtgggaatgcgctcttcacaggaagaaggcccgggaggag

SEQ ID NO: 1904 - DNA, 600 bp, Homo sapiens; identical to SEQ ID NO: 1903

SEQ ID NO: 1905 - DNA, 600 bp, Homo sapiens
atgtgcatcacctactaccgcatcttcaaggtcgcccgggatcaggccaagaggatcaatcacattagctcctggaaggcagccaccatcagggagcacaaagccacagtgacactggccgccgtcatgggggccttcatcatctgctggtttccctacttcaccgcgtttgtgtaccgtgggctgagaggggatgatgccatcaatgaggtgttagaagccatcgttctgtggctgggctatgccaactcagccctgaaccccatcctgtatgctgcgctgaacagagacttccgcaccgggtaccaacagctcttctgctgcaggctggccaaccgcaactcccacaaaacttctctgaggtccaacgcctctcagctgtccaggacccaaagccgagaacccaggcaacaggaagagaaacccctgaagctccaggtgtggagtgggacagaagtcacggccccccagggagccacagacaggtaaaagctccaggtgtggagtgggacagaagtcacggccccccagggagccacagacaggtaagcgctgaacagagacttccgcaccgggtaccaacagctcttctgctgcagg

SEQ ID NO: 1906 - DNA, 600 bp, Homo sapiens; identical to SEQ ID NO: 1905

SEQ ID NO: 1907 - DNA, 600 bp, Homo sapiens
atgttttcagtgttgctgagagaaacaaaaaatttcctaatgcatctgagagataagcttcggcagtatcacaagaagattaaagtggcagacaccccttccagcggaagttactaattcggacctgactgatgcagtttccatagcaacccatgtttcctgggaaacccgaaaaaggttgtcatggcatctcttgcacagtaacctttccagatggttcctacttaaatgatttcataaggaaaaccactgtttgaataagccgcacaaaaaataaagttaagtctgagactctaaggaggtgaaatgaatcccaaatgcattttttaactatgaaaatcattatgtcattccataatgactgaatcaaggaggaaaatatggtgtttggaatgttagatattaaccacaataaggcatgatctggattaaatgccatttattaggcaataatttttaaagatgcttcccaagaactttcaagccaacaaatgaaatttaaaagcaaatgtaaaagtgttcctgtacataagcaaatgagagattcgatcagtgtgcctgaaaccttactacaagggaccttcaggccttttctctttt

SEQ ID NO: 1908 - DNA, 600 bp, Homo sapiens; identical to SEQ ID NO: 1907

SEQ ID NO: 1909 - DNA, 600 bp, Homo sapiens
ctcatcatcctatatggccggatctaccgggctgcccggaaccgcatcctgaatccaccctcactctatgggaagcgcttcaccacggcccacctcatcacaggctctgccgggtcctcgctctgctcgctcaactccagcctccatgaggggcactcgcactcggctggctcccctctctttttcaaccacgtgaaaatcaagcttgctgacagtgccctggaacgcaagaggatttctgctgctcgagaaaggaaagccactaaaatcctgggcatcattctgggggcctttatcatctgctggctgcccttcttcgtggtgtctctggtcctccccatctgccgggactcctgctggatccacccggcgctctttgacttcttcacctggctaggctatttaaactccctcatcaatccaataatctacactgtgtttaatgaagagtttcggcaagcttttcagaaaattgtccctttccggaaggcctcctagtcttattcggtgatgactcttgttatcttttgtgtcctgtaacctcatcgggattgtcttttttttttttaattattttctgagacttggattaattcatgg

SEQ ID NO: 1910 - DNA, 600 bp, Homo sapiens; identical to SEQ ID NO: 1909

SEQ ID NO: 1911 - DNA, 600 bp, Homo sapiens
ccattatgagtcccaaaattcaaccctcccgatagggctgggcctgaccaaaaatatactgggtttcctgtttccttttctgatcattcttacaagttatactcttatttggaaggccctaaagaaggcttatgaaattcagaagaacaaaccaagaaatgatgatatttttaagataattatggcaattgtgcttttctttttcttttcctggattccccaccaaatattcacttttctggatgtattgattcaactaggcatcatacgtgactgtagaattgcagatattgtggacacggccatgcctatcaccatttgtatagcttattttaacaattgcctgaatcctcttttttatggctttctggggaaaaaatttaaaagatattttctccagcttctaaaatatattcccccaaaagccaaatcccactcaaacctttcaacaaaaatgagcacgctttcctaccgcccctcagataatgtaagctcatccaccaagaagcctgcaccatgttttgaggttgagtgacatgttcgaaacctgtccataaagtaattttgtgaaagaaggagcaagagaacattcctctgcag

SEQ ID NO: 1912 - DNA, 600 bp, Homo sapiens; identical to SEQ ID NO: 1911

SEQ ID NO: 1913 - DNA, 600 bp, Homo sapiens
ggtgtgggcaccctcgtgccagcggcgccggcgctccgaacgcagggtcacgcgcatggtggtggccgtggtggcgctcttcgtgctctgctggatgcccttctacgtgctcaacatcgtcaacgtggtgtgcccactgcccgaggagcctgccttctttgggctctacttcctggtggtggcgctgccctatgccaacagctgtgccaaccccatcctttatggcttcctctcctaccgcttcaagcagggcttccgcagggtcctgctgcggccctcccgccgtgtgcgcagccaggagcccactgtggggcccccggagaagactgaggaggaggatgaggaggaggaggatggggaggagagcagggaggggggcaaggggaaggagatgaacggccgggtcagccagatcacgcagcctggcaccagcgggcaggagcggccgcccagcagagtggccagcaaggagcagcagctcctaccccaagaggcttccactggggagaagtccagcacgatgcgcatcagctacctgtaggggcctggggaaagccaggatggcccgaggaagaggcagaagccgtgggtgtgcctagg

SEQ ID NO: 1914 - DNA, 600 bp, Homo sapiens; identical to SEQ ID NO: 1913

SEQ ID NO: 1915 - DNA, 1400 bp, Homo sapiens
gatggtgtggattgtgtcaggccttacctccttcttgcccattcagatgcactggtaccgggccacccaccaggaagccatcaactgctatgccaatgagacctgctgtgacttcttcacgaaccaagcctatgccattgcctcttccatcgtgtccttctacgttcccctggtgatcatggtcttcgtctactccagggtctttcaggaggccaaaaggcagctccagaagattgacaaatctgagggccgcttccatgtccagaaccttagccaggtggagcaggatgggcggacggggcatggactccgcagatcttccaagttctgcttgaaggagcacaaagccctcaagacgttaggcatcatcatgggcactttcaccctctgctggctgcccttcttcatcgttaacattgtgcatgtgatccaggataacctcatccgtaaggaagtttacatcctcctaaattggataggctatgtcaattctggtttcaatccccttatctactgccggagcccagatttcaggattgccttccaggagcttctgtgcctgcgcaggtcttctttgaaggcctatgggaatggctactccagcaacggcaacacaggggagcagagtggatatcacgtggaacaggagaaagaaaataaactgctgtgtgaagacctcccaggcacggaagactttgtgggccatcaaggtactgtgcctagcgataacattgattcacaagggaggaattgtagtacaaatgactcactgctgtaaagcagtttttctacttttaaagacccccccccccccaacagaacactaaacagactatttaacttgagggtaataaacttagaataaaattgtaaaaattgtatagagatatgcagaaggaagggcatccttctgccttttttatttttttaagctgtaaaaagagagaaaacttatttgagtgattatttgttatttgtacagttcagttcctctttgcatggaatttgtaagtttatgtctaaagagctttagtcctagaggacctgagtctgctatattttcatgacttttccatgtatctacctcactattcaagtattaggggtaatatattgctgctggtaatttgtatctgaaggagattttccttcctacacccttggacttgaggattttgagtatctcggacctttcagctgtgaacatggactcttcccccactcctcttatttgctcacacggggtattttaggcagggatttgaggagcagcttcagttgttttcccgagcaaaggtctaaagtttacagtaaataaaatgtttgaccatgccttcattgcacctgtttgtccaaaaccccttgactggagtgctgttgcctcccccactggaaaccgc

SEQ ID NO: 1916 - DNA, 600 bp, Homo sapiens
caatcagataaataaatatcactgaatgcagttcatcctcggcccactttccctccgtttgttttcttttcataatccacttactcccttcccttctactctgcgctggcttttgacagaggcagtaaattaggcctaatcctcactcttttcttcctaatcttcatcaaacaaaaaatgaaaagtctgtctggacgaaggggagtgagcttgagcctttgatatcttgctcccccacccttcctgaaactcttgaaatccagttgccattgagtagcaaagccacgctccccacaggacttggacagagggcccacagggggatgggctggctgtggccaggtttagggcagggggcatttgtcccctccatgctataatccagtggtgccttacatggtgtgtgtgtgtgtgtgtgcgtgtgtgtgtgtgtgtgtgtgtctggaggcacaggcacaaagcattgcttgggttggtcaaatgtcttgtgtcataaatatattctgatgtttcccagcctttccacaacctctaccttcccactcaccttccccagctacaaaaatctgtattatcctcttaaagtaaaactggagttac

SEQ ID NO: 1917 - DNA, 600 bp, Homo sapiens
gcgagagagctgcatcagttcacttttgacctgctaatcaagtcacacatggtgagcgtggactttccggaaatgatggcagagatcatctctgtgcaagtgcccaagatcctttctgggaaagtcaagcccatctatttccacacccagtgaagcattggaaaccctatttccccaccccagctcatgccccctttcagatgtcttctgcctgttataactctgcactactcctctgcagtgccttggggaatttcctctattgatgtacagtctgtcatgaacatgttcctgaattctatttgctgggctttttttttctctttctctcctttctttttcttcttccctccctatctaaccctcccatggcaccttcagactttgcttcccattgtggctcctatctgtgttttgaatggtgttgtatgcctttaaatctgtgatgatcctcatatggcccagtgtcaagttgtgcttgtttacagcactactctgtgccagccacacaaacgtttacttatcttatgccacgggaagtttagagagctaagattatctggggaaatcaaaacaaaaaacaagcaaacaaaaaaaaaa

SEQ ID NO: 1918 - DNA, 600 bp, Homo sapiens; identical to SEQ ID NO: 1917

SEQ ID NO: 1919 - DNA, 600 bp, Homo sapiens
gctcagcaccagctacagccctgctgatccaaaaggctctggttcgagggggcctgggcaccttggcagctgatgcaaacttcatcatggcaacaggccaggccctcggagatgcctgccaaatggaaccagaggaagtggagatcatggcaacagagctactgaaaggacgagaggccccagacggcatggccagctccctgggatgcctgaacctcgggtcctccctgggcagcctcgaccaacaccagggctcccaggagacccttattcctccaaggctgtgatgcccacacagcatcagcatgggcttagagctggcatgaccaatgggggtggggaagttgctggggtggagaagggctagcccaccgcagcagcctccctccctctcagcagctagatgcatgcctgaggcagggtggtcaggaaccacctcaaaaagtgcggaggaagtagctggacaggccctgcccctcaccagcaagaggcatgattggatggagcttctaatgtcattcaaaaaggcctggtcagtgcctgtccctagggccactcccacctgcaggacattaaaatctccaggcctgtgacactggc

SEQ ID NO: 1920 - DNA, 600 bp, Homo sapiens; identical to SEQ ID NO: 1919

SEQ ID NO: 1921 - DNA, 600 bp, Homo sapiens
gagggcaaaggcaaaacaagccctgataagcaaaagcagtccccacagccacagcctggcagctctgatcaggaaagtgaggaacagcaacaattccggaacattttcaagcagatagcaggagatgacatggagatctgtgcagatgagctcaagaaggtccttaacacagtcgtgaacaaacacaaggacctgaagacacacgggttcacactggagtcctgccgtagcatgattgcgctcatggatacagatggctctggaaagctcaacctgcaggagttccaccacctctggaacaagattaaggcctggcagaaaattttcaaacactatgacacagaccagtccggcaccatcaacagctacgagatgcgaaatgcagtcaacgacgcaggattccacctcaacaaccagctctatgacatcattaccatgcggtacgcagacaaacacatgaacatcgactttgacagtttcatctgctgcttcgttaggctggagggcatgttcagagcttttcatgcatttgacaaggatggagatggtatcatcaagctcaacgttctggagtggctgcagctcaccatgtatgcctga

SEQ ID NO: 1922 - DNA, 600 bp, Homo sapiens
cccaaatatcatgtttttctccacaatgaaaagaccatccagagaaaagcaagacaaaaagatttttacagaagacattgatatctctgacatttctggaaagccagggcctccacccatgggcttccactctcccctgatcaaacaccccgaggtgaaaagtgccatcgagggcatcaagtacatcgcagagaccatgaagtcagaccaggagtctaacaatgcggcggcagagtggaagtacgttgcaatggtgatggaccacatactcctcggagtcttcatgcttgtttgcatcatcggaaccctagccgtgtttgcaggtcgactcattgaattaaatcagcaaggatgagcagaaaatgagctgagcttagctctgccctggaacctaccagagcagagaagggcaggagaggaagatttgtctacttgctccactcgcacttatcaaacgtgttatattccatacttattattgatgataagatttacctttatgtaagtttatggccttgaagtgttttcatattgcttctccctttagttctgctgtctccctgaagagtgaaccctctttagtaaatgaaactaatcact

SEQ ID NO: 1923 - DNA, 600 bp, Homo sapiens; identical to SEQ ID NO: 1922

SEQ ID NO: 1924 - DNA, 600 bp, Homo sapiens
tgcaggacttgcacacagggaggctgtagccaggaaaccctcttcttccctggtctggctctgctggagcgggtgggaaccaaacaccttcagtgctggtggccctcaggcccacaggtttaaggctgaggctgccctgacccttccacagtcatttcttctaggttttcttggcccagcactgcccatcccaccccatgaggctcactcattgcagatcccagcccaccctgcccctttcttccccaccctggaggctctctctgcctagtctacagtactgacagaaagcaaggacatgcggcctgcatggtgggagctggttgaattgtctttattaacaaacaggatatccaaggccactacattgaggaggggggaggggggagggaggagaagggttacttgctgctcacactatatacagatgcaagcaaggggcgtggagagtgagggctccctgctccctccctccaccggggaagggcatgggctagaagaggagaggggggtcgggaatggggggaatgttttggctgcggggtcccccctccattccctggagtttgggggaaggggaatcattaaagtgctttcaga

SEQ ID NO: 1925 - DNA, 600 bp, Homo sapiens; identical to SEQ ID NO: 1924

SEQ ID NO: 1926 - DNA, 600 bp, Homo sapiens
gaggcctgggagcaggagcagctgagccagcctgtctgttttgattcctgctgtattgaccagtctcccttccagctggtggagcagacaaccctgcacaagactcataccctgttttcactccttggcctccacctcgcttacgtgaccagcatggggaagctcaggggcgtcctggccctggaggagctacagaaggccattgaggggcacaccaagtctggggtgcagctccgccctccccttgccagcttccggaacacgacttcaactcgaaagagtaccggggcacctccatcttctgcagagaactggaacctgcctgaggacaggcctggggccactggaacaggggatgtgattgctgcctccccagagacccctgtgccatctccttccccagagccccctctctccctggccccaggcaaggtagagggcgagttggaggagctggagctggtggagagtccagggctggaagaggagctggccgacatcttgcagggccccagcctgcgatccacagacgaggaggatgaggatgaactgatcctttgaccccctcccacgacctcctcataaagaccgtggagaggc

SEQ ID NO: 1927 - DNA, 600 bp, Homo sapiens
accatggatatgttgtttaacggtacccaaaacacattttccatatttggatggtgaagtcacattagtgtgttgtctctttcctacaagttaaccagttgcactacataatctctggaaattaattttctctttaggagaaattatagttaggcttccatgatgttacattaggaagatatcatgaaagaataaataagattgctatggtttaattatatttgctttttaaaagatttttttaacttaaaaagtagttagccaatatgcaatcactgaaaactatgcaagagaaattccaaccgtcctgacctataacctgtaggaaaccgacgaaaaagtcactcttttgggatctaactgttgttactggaagacgaaggtaaactaaggggctttgcttttcaaaccagagaaaggaaagccagaaggaaaagagtaatggtattttctagactgtgaagattcagttcaaatgttatccttgttcctgttacaatatttagcattattagtttgttatgtgtgtatgtttatgttaattttaatttctgattataagacaatgctgctttggttaatctcttctaaaggaattta

SEQ ID NO: 1928 - DNA, 600 bp, Homo sapiens; identical to SEQ ID NO: 1927

SEQ ID NO: 1929 - DNA, 1400 bp, Homo sapiens
gcagaaaggatcacagatgtggctttggatttctggaggagtggaaagcagagggaagacatcaagctcaaagacattgaacacgcgttgtctgtgtcggttttcaataacaagaacagtggcttctggcacagcagcttaattgaccggaacctcattgattattttgttcccttcctccccctggaatacaaacacctaaaaatgtgtatccgagtggaaatgcagtcccgaggctatgaaattgatgaagacattgtaagcagagtggctgaggagatgacatttttccccaaagaggagagagttttctcagataaaggctgcaaaacggtgttcaccaagttagattattactacgatgattgacagtcatgattggcagccggagtcactgcctggagttggaaaagaaacaacactcagtccttccacacttccacccccagctcctttccctggaagaggaatccagtgaatgttcctgtttgatgtgacaggaattctccctggcattgtttccaccccctggtgcctgcaggccacccagggaccacgggcgaggacgtgaagcctcccgaacacgcacagaaggaaggagccagctcccagcccactcatcgcagggctcatgattttttacaaattatgttttaattccaagtgtttctgtttcaaggaaggatgaataagttttattgaaaatgtggtaactttatttaaaatgatttttaacattatgagagactgctcagattctaagttgttggccttgtgtgtgtgtttttttttaagttctcatcattattacatagactgtgaagtatctttactggaaatgagcccaagcacacatgcatggcatttgttcctgaacaggagggcatccctggggatgtggctggagcatgagccagctctgtcccaggatggtcccagcggatgctgccaggggcagtgaagtgtttaggtgaaggacaagtaggtaagaggacgccttcaggcaccacagataagcctgaaacagcctctccaagggttttcaccttagcaacaatgggagctgtgggagtgattttggccacactgtcaacatttgttagaaccagtcttttgaaagaaaagtatttccaacttgtcacttgccagtcactccgttttgcaaaaggtggcccttcactgtccattccaaatagcccacacgtgctctctgctggattctaaattatgtgaattttgccatattaaatcttcctcatttatactattatttgttacgttcaatcagaatccccgaaacctcctataaagcttagctgccccttctgaggatgctgagaacggtgtctttctttataaatgcaaatggctaccgttttacaataaaattttgcatgtgc

SEQ ID NO: 1930 - DNA, 1400 bp, Homo sapiens; identical to SEQ ID NO: 1929

SEQ ID NO: 1931 - DNA, 600 bp, Homo sapiens
tttaacatactgataagtaagaaacaattataatttctttacatactcaaaaccaagatagaaaaaggtgctatcgttcaacttcaaaacatgtttcctagtattaaggactttaatatagcaacagacaaaattattgttaacatggatgttacagctcaaaagatttataaaagattttaacctattttctcccttattatccactgctaatgtggatgtatgttcaaacaccttttagtattgatagcttacatatggccaaaggaatacagtttatagcaaaacatgggtatgctgtagctaactttataaaagtgtaatataacaatgtaaaaaattatatatctgggaggattttttggttgcctaaagtggctatagttactgattttttattatgtaagcaaaaccaataaaaatttaagtttttttaacaactaccttatttttcactgtacagacactaattcattaaatactaattgattgtttaaaagaaatataaatgtgacaagtggacattatttatgttaaatatacaattatcaagcaagtatgaagttattcaattaaaatgccacatttctggtctctggg

SEQ ID NO: 1932 - DNA, 600 bp, Homo sapiens; identical to SEQ ID NO: 1931

SEQ ID NO: 1933 - DNA, 1400 bp, Homo sapiens
caactagctccatttacagccatttctaaaatggcagcttcagttctagagaagaaagaacaacatcagcagtaaagtccatggaatagctagtggtctgtgtttcttttcgccattgcctagcttgccgtaatgattctataatgccatcatgcagcaattatgagaggctaggtcatccaaagagaagaccctatcaatgtaggttgcaaaatctaacccctaaggaagtgcagtctttgatttgatttccctagtaaccttgcagatatgtttaaccaagccatagcccatgccttttgagggctgaacaaataagggacttactgataatttacttttgatcacattaaggtgttctcaccttgaaatcttatacactgaaatggccattgatttaggccactggcttagagtactccttcccctgcatgacactgattacaaatactttcctattcatactttccaattatgagatggactgtgggtactgggagtgatcactaacaccatagtaatgtctaatattcacaggcagatctgcttggggaagctagttatgtgaaaggcaaataaagtcatacagtagctcaaaaggcaaccataattctctttggtgcaagtcttgggagcgtgatctagattacactgcaccattcccaagttaatcccctgaaaacttactctcaactggagcaaatgaactttggtcccaaatatccatcttttcagtagcgttaattatgctctgtttccaactgcatttcctttccaattgaattaaagtgtggcctcgtttttagtcatttaaaattgttttctaagtaattgctgcctctattatggcacttcaattttgcactgtcttttgagattcaagaaaaatttctattcatttttttgcatccaattgtgcctgaacttttaaaatatgtaaatgctgccatgttccaaacccatcgtcagtgtgtgtgtttagagctgtgcaccctagaaacaacatacttgtcccatgagcaggtgcctgagacacagacccctttgcattcacagagaggtcattggttatagagacttgaattaataagtgacattatgccagtttctgttctctcacaggtgataaacaatgctttttgtgcactacatactcttcagtgtagagctcttgttttatgggaaaaggctcaaatgccaaattgtgtttgatggattaatatgcccttttgccgatgcatactattactgatgtgactcggttttgtcgcagctttgctttgtttaatgaaacacacttgtaaacctcttttgcactttgaaaaagaatccagcgggatgctcgagcacctgtaaacaattttctcaacctatttgatgttcaaataaagaattaaact

SEQ ID NO: 1934 - DNA, 600 bp, Homo sapiens
ccttgttgaaactggaaaccacagtgaattacacagattctcaacgacccatatgcctgccttccaaaggagatagaaatgtaatatacactgattgctgggtgactggatgggggtacagaaaactaagagacaaaatacaaaatactctccagaaagccaagatacccttagtgaccaacgaagagtgccagaagagatacagaggacataaaataacccataagatgatctgtgccggctacagggaaggagggaaggacgcttgcaagggagattcgggaggccctctgtcctgcaaacacaatgaggtctggcatctggtaggcatcacgagctggggcgaaggctgtgctcaaagggagcggccaggtgtttacaccaacgtggtcgagtacgtggactggattctggagaaaactcaagcagtgtgaatgggttcccaggggccattggagtccctgaaggacccaggatttgctgggagagggtgttgagttcactgtgccagcatgcttcctccacagtaacacgctgaaggggcttggtgtttgtaagaaaatgctagaagaaaacaaactgtcacaagttgttatgtcc

SEQ ID NO: 1935 - DNA, 600 bp, Homo sapiens; identical to SEQ ID NO: 1934

SEQ ID NO: 1936 - DNA, 1400 bp, Homo sapiens
gctggggccagctgctggaccgtggcgccacggccctggagctcatggtgctcaacgtgccccggctgatgacccaggactgcctgcagcagtcacggaaggtgggagactccccaaatatcacggagtacatgttctgtgccggctactcggatggcagcaaggactcctgcaagggggacagtggaggcccacatgccacccactaccggggcacgtggtacctgacgggcatcgtcagctggggccagggctgcgcaaccgtgggccactttggggtgtacaccagggtctcccagtacatcgagtggctgcaaaagctcatgcgctcagagccacgcccaggagtcctcctgcgagccccatttccctagcccagcagccctggcctgtggagagaaagccaaggctgcgtcgaactgtcctggcaccaaatcccatatattcttctgcagttaatggggtagaggagggcatgggagggagggagaggtggggagggagacagagacagaaacagagagagacagagacagagagagactgagggagagactctgaggacatggagagagactcaaagagactccaagattcaaagagactaatagagacacagagatggaatagaaaagatgagaggcagaggcagacaggcgctggacagaggggcaggggagtgccaaggttgtcctggaggcagacagcccagctgagcctccttacctcccttcagccaagccccacctgcacgtgatctgctggccctcaggctgctgctctgccttcattgctggagacagtagaggcatgaacacacatggatgcacacacacacacgccaatgcacacacacagagatatgcacacacacggatgcacacacagatggtcacacagagatacgcaaacacaccgatgcacacgcacatagagatatgcacacacagatgcacacacagatatacacatggatgcacgcacatgccaatgcacgcacacatcagtgcacacggatgcacagagatatgcacacaccgatgtgcgcacacacagatatgcacacacatggatgagcacacacacaccaagtgcgcacacacaccgatgtacacacacagatgcacacacagatgcacacacaccgatgctgactccatgtgtgctgtcctctgaaggcggttgtttagctctcacttttctggttcttatccattatcatcttcacttcagacaattcagaagcatcaccatgcatggtggcgaatgcccccaaactctcccccaaatgtatttctcccttcgctgggtgccgggctgcacagactattccccacctgcttcccagcttcacaataaacggctgcgtctcctccgcacacctgtggtgcctgccaccc

SEQ ID NO: 1937 - DNA, 1400 bp, Homo sapiens
agctcacttaatgaaagatggatttccaaggttaattcattggaattgaaaattaacagggcctctcactaactaatcactttcccatcttttgttagatttgaatatatacattctatgatcattgctttttctctttacaggggagaatttcatattttacctgagcaaattgattagaaaatggaaccactagaggaatataatgtgttaggaaattacagtcatttctaagggcccagcccttgacaaaattgtgaagttaaattctccactctgtccatcagatactatggttctccactatggcaactaactcactcaattttccctccttagcagcattccatcttcccgatcttctttgcttctccaaccaaaacatcaatgtttattagttctgtatacagtacaggatctttggtctactctatcacaaggccagtaccacactcatgaagaaagaacacaggagtagctgagaggctaaaactcatcaaaaacactactccttttcctctaccctattcctcaatcttttaccttttccaaatcccaatccccaaatcagtttttctctttcttactccctctctcccttttaccctccatggtcgttaaaggagagatggggagcatcattctgttatacttctgtacacagttatacatgtctatcaaacccagacttgcttccatagtggagacttgcttttcagaacatagggatgaagtaaggtgcctgaaaagtttgggggaaaagtttctttcagagagttaagttattttatatatataatatatatataaaatatataatatacaatataaatatatagtgtgtgtgtgtatgcgtgtgtgtagacacacacgcatacacacatataatggaagcaataagccattctaagagcttgtatggttatggaggtctgactaggcatgatttcacgaaggcaagattggcatatcattgtaactaaaaaagctgacattgacccagacatattgtactctttctaaaaataataataataatgctaacagaaagaagagaaccgttcgtttgcaatctacagctagtagagactttgaggaagaattcaacagtgtgtcttcagcagtgttcagagccaagcaagaagttgaagttgcctagaccagaggacataagtatcatgtctcctttaactagcataccccgaagtggagaagggtgcagcaggctcaaaggcataagtcattccaatcagccaactaagttgtccttttctggtttcgtgttcaccatggaacattttgattatagttaatccttctatcttgaatcttctagagagttgctgaccaactgacgtatgtttccctttgtgaattaataaactggtgttctggttcat

SEQ ID NO: 1938 - DNA, 600 bp, Homo sapiens
gctcatcttcactgacttcctctgcatggcacccatttctttctttgccatttctgcctccctcaaggtgcccctcatcactgtgtccaaagcaaagattctgctggttctgtttcaccccatcaactcctgtgccaaccccttcctctatgccatctttaccaaaaactttcgcagagatttcttcattctgctgagcaagtgtggctgctatgaaatgcaagcccaaatttataggacagaaacttcatccactgtccacaacacccatccaaggaatggccactgctcttcagctcccagagtcaccagtggttccacttacatacttgtccctctaagtcatttagcccaaaactaaaacacaatgtgaaaatgtatctgagtattgaatgataattcagtccttgcctttgaagggtatgtcacaaggagctgacagtgcttctacacatttcatctaatttaatattcctggcatacctttaaggtaaattggtcaggaactattaattccatgtgatacattaggaagctgaattattagtaacaacaataataattaaagaatgcaatactgtaaaaaagcggccgcgaatt

SEQ ID NO: 1939 - DNA, 600 bp, Homo sapiens; identical to SEQ ID NO: 1938

SEQ ID NO: 1940 - DNA, 1400 bp, Homo sapiens
cagtgccagatggatggcgaggagattgaggtccagaaggaggtggccaagatgtacagcagcttccaggtgatgtacacagtgggctacagcctgtccctgggggccctgctcctcgccttggccatcctggggggcctcagcaagctgcactgcacccgcaatgccatccacgcgaatctgtttgcgtccttcgtgctgaaagccagctccgtgctggtcattgatgggctgctcaggacccgctacagccagaaaattggcgacgacctcagtgtcagcacctggctcagtgatggagcggtggctggctgccgtgtggccgcggtgttcatgcaatatggcatcgtggccaactactgctggctgctggtggagggcctgtacctgcacaacctgctgggcctggccaccctccccgagaggagcttcttcagcctctacctgggcatcggctggggtgcccccatgctgttcgtcgtcccctgggcagtggtcaagtgtctgttcgagaacgtccagtgctggaccagcaatgacaacatgggcttctggtggatcctgcggttccccgtcttcctggccatcctgatcaacttcttcatcttcgtccgcatcgttcagctgctcgtggccaagctgcgggcacggcagatgcaccacacagactacaagttccggctggccaagtccacgctgaccctcatccctctgctgggcgtccacgaagtggtctttgccttcgtgacggacgagcacgcccagggcaccctgcgctccgccaagctcttcttcgacctcttcctcagctccttccagggcctgctggtggctgtcctctactgcttcctcaacaaggaggtgcagtcggagctgcggcggcgttggcaccgctggcgcctgggcaaagtgctatgggaggagcggaacaccagcaaccacagggcctcatcttcgcccggccacggccctcccagcaaggagctgcagtttgggaggggtggtggcagccaggattcatctgcggagacccccttggctggtggcctccctagattggctgagagccccttctgaaccctgctgggaccccagctagggctggactctggcacccagaggcgtcgctggacaacccagaactggacgcccagctgaggctgggggcgggggagccaacagcagcccccacctaccccccacccccagtgtggctgtctgcgagattgggcctcctctccctgcacctgccttgtccctggtgcagaggtgagcagaggagtccagggcgggagtgggggctgtgccgtgaactgcgtgccagtgtccccacgtatgtcggcacgtcccatgtgcatggaaatgtcctccaacaataaagagctcaagtggtcaccgtg

SEQ ID NO: 1941 - DNA, 1400 bp, Homo sapiens; identical to SEQ ID NO: 1940

SEQ ID NO: 1942 - DNA, 1400 bp, Homo sapiens
ggccctgtctgtacctaacgccctatttttgcaatggctatatggcaagaaagctggtaaactatttgtctttcaggaccttttgaagtagtttgtataacttcttaaaagttgtgattccagataaccagctgtaacacagctgagagacttttaatcagacaaagtaattcctctcactaaactttacccaaaaactaaatctctaatatggcaaaaatggctagacacccattttcacattcccatctgtcaccaattggttaatctttcctgatggtacaggaaagctcagctactgatttttgtgatttagaactgtatgtcagacatccatgtttgtaaaactacacatccctaatgtgtgccatagagtttaacacaagtcctgtgaatttcttcactgttgaaaattattttaaacaaaatagaagctgtagtagccctttctgtgtgcaccttaccaactttctgtaaactcaaaacttaacatatttactaagccacaagaaatttgatttctattcaaggtggccaaattatttgtgtaatagaaaactgaaaatctaatattaaaaatatggaacttctaatatatttttatatttagttatagtttcagatatatatcatattggtattcactaatctgggaagggaagggctactgcagctttacatgcaatttattaaaatgattgtaaaatagcttgtatagtgtaaaataagaatgatttttagatgagattgttttatcatgacatgttatatattttttgtaggggtcaaagaaatgctgatggataacctatatgatttatagtttgtacatgcattcatacaggcagcgatggtctcagaaaccaaacagtttgctctaggggaagagggagatggagactggtcctgtgtgcagtgaaggttgctgaggctctgacccagtgagattacagaggaagttatcctctgcctcccattctgaccacccttctcattccaacagtgagtctgtcagcgcaggtttagtttactcaatctccccttgcactaaagtatgtaaagtatgtaaacaggagacaggaaggtggtgcttacatccttaaaggcaccatctaatagcgggttactttcacatacagccctcccccagcagttgaatgacaacagaagcttcagaagtttggcaatagtttgcatagaggtaccagcaatatgtaaatagtgcagaatctcataggttgccaataatacactaattcctttctatcctacaacaagagtttatttccaaataaaatgaggacatgtttttgttttctttgaatgctttttgaatgttatttgttattttcagtattttggagaaattatttaataaaaaaacaatcatttgctttttg

SEQ ID NO: 1943 - DNA, 1400 bp, Homo sapiens
gtgcattgccgaggattagagaccagtttggctgaatgtacttttactaagagaagaactatgggttaccaggatttcgctgatgtggtttgttatacacagaaagcagattctccaatggatgacttctttcagtgtgtgaatgggaaatacatttctcagatgaaagcctgtgatggtatcaatgattgtggagaccaaagtgatgaactgtgttgtaaagcatgccaaggcaaaggcttccattgcaaatcgggtgtttgcattccaagccagtatcaatgcaatggtgaggtggactgcattacaggggaagatgaagttggctgtgcaggctttgcatctgtggctcaagaagaaacagaaattttgactgctgacatggatgcagaaagaagacggataaaatcattattacctaaactatcttgtggagttaaaaacagaatgcacattcgaaggaaacgaattgtgggaggaaagcgagcacaactgggagacctcccatggcaggtggcaattaaggatgccagtggaatcacctgtgggggaatttatattggtggctgttggattctgactgctgcacattgtctcagagccagtaaaactcatcgttaccaaatatggacaacagtagtagactggatacaccccgaccttaaacgtatagtaattgaatacgtggatagaattattttccatgaaaactacaatgcaggcacttaccaaaatgacatcgctttgattgaaatgaaaaaagacggaaacaaaaaagattgtgagctgcctcgttccatccctgcctgtgtcccctggtctccttacctattccaacctaatgatacatgcatcgtttctggctggggacgagaaaaagataacgaaagagtcttttcacttcagtggggtgaagttaaactaataagcaactgctctaagttttacggaaatcgtttctatgaaaaagaaatggaatgtgcaggtacatatgatggttccatcgatgcctgtaaaggggactctggaggccccttagtctgtatggatgccaacaatgtgacttatgtctggggtgttgtgagttggggggaaaactgtggaaaaccagagttcccaggtttttacaccaaagtggccaattattttgactggattagctaccatgtaggaaggccttttatttctcagtacaatgtataaaattgtgatctctctcttcattctattctttttctctcaagagttccatttaatggaaataaaacggtataattaataattctctaggggggaaaaatgaagcaaatctcattggatatttttaaaggtctccacagagtttatgccatattggaattttgttgtataattctcaaataaatattttggtgaagcat

SEQ ID NO: 1944 - DNA, 1400 bp, Homo sapiens
cgtcattgagcagtactcgcagggccacctcaacctcatggtgcgcatcaaggagctgcagaggaggctggaccagtccattgggaagccctcactgttcatctccgtctcagaaaagagcaaggatcgcggcagcaacacgatcggcgcccgcctgaaccgagtagaagacaaggtgacgcagctggaccagaggctggcactcatcaccgacatgcttcaccagctgctctccttgcacggtggcagcacccccggcagcggcggcccccccagagagggcggggcccacatcacccagccctgcggcagtggcggctccgtcgaccctgagctcttcctgcccagcaacaccctgcccacctacgagcagctgaccgtgcccaggaggggccccgatgaggggtcctgaggaggggatggggctgggggatgggcctgagtgagaggggaggccaagagtggccccacctggccctctctgaaggaggccacctcctaaaaggcccagagagaagagccccactctcagaggccccaataccccatggaccatgctgtctggcacagcctgcacttgggggctcagcaaggccacctcttcctggccggtgtgggggccccgtctcaggtctgagttgttaccccaagcgccctggcccccacatggtgatgttgacatcactggcatggtggttgggacccagtggcagggcacagggcctggcccatgtatggccaggaagtagcacaggctgagtgcaggcccaccctgcttggcccagggggcttcctgaggggagacagagcaacccctggaccccagcctcaaatccaggaccctgccaggcacaggcagggcaggaccagcccacgctgactacagggccaccggcaataaaagcccaggagcccatttggagggcctgggcctggctccctcactctcaggaaatgctgacccatgggcaggagactgtggagactgctcctgagcccccagcttccagcaggagggacagtctcaccatttccccagggcacgtggttgagtggggggaacgcccacttccctgggttagactgccagctcttcctagctggagaggagccctgcctctccgcccctgagcccactgtgcgtggggctcccgcctccaacccctcgcccagtcccagcagccagccaaacacacagaaggggactgccacctccccttgccagctgctgagccgcagagaagtgacggttcctacacaggacaggggttccttctgggcattacatcgcatagaaatcaataatttgtggtgatttggatctgtgttttaatgagtttcacagtgtgattttgattattaattgtgcaagcttttcctaataaacgtggagaatcaca

SEQ ID NO: 1945 - DNA, 1400 bp, Homo sapiens; identical to SEQ ID NO: 1944

SEQ ID NO: 1946 - DNA, 600 bp, Homo sapiens
acgttcagcaagaacgcagtgatcagcaaacggggagggaagctttgcctcctaatccgagtggctaatctcaggaagagccttcttattggcagtcacatttatggaaagcttctgaagaccacagtcactcctgaaggagagaccattattttggaccagatcaatatcaactttgtagttgacgctgggaatgaaaatttattcttcatctccccattgacaatttaccatgtcattgatcacaacagccctttcttccacatggcagcggagacccttctccagcaggactttgaattagtggtgtttttagatggcacagtggagtccaccagtgctacctgccaagtccggacatcctatgtcccagaggaggtgctttggggctaccgttttgctcccatagtatccaagacaaaggaagggaaataccgagtggatttccataactttagcaagacagtggaagtggagacccctcactgtgccatgtgcctttataatgagaaagatgttagagccaggatgaagagaggctatgacaaccccaacttcatcttgtcagaagtcaatgaaacagatgacaccaaaatgtaa

SEQ ID NO: 1947 - DNA, 600 bp, Homo sapiens
aggtattttgcatatctttttttcattttcgtaatttgtattgcattctataaaaatattagttcataacagatcagaaatttaaaataaggggctttttcctcaggtagtttgaaaaacacactctagagatgcactgttcaattcggtacgcactagccacatgtggctaaattaaaattaaataaaatgagaaatgtagtttctcagttgcactacgtttcaagttctcaatggctacgtcaagttctcaatggctacgtgtgactagtgcttaccatactggacagcacagacacagaatattttcatcaccacagaaagttctatctgttctattatagagacttttatgtatgccctatctggattctacttatttataatttaaggtaaacatctgaaagcacatttcagcctatttgcttagtgaaacattaagctgtagactgtaaactcctcgtgagtaggaaccctgtctcagtgcattttgttttcctgcttcctacctcaagatcttggcaatggtacactacaaatgtgctgagttagaattactctgaagttatgaaacatataatgaaaacaatttttccggcc

SEQ ID NO: 1948 - DNA, 1400 bp, Homo sapiens
ctacacaagatccatcgggacgacctgctggaggtgctggacatgtaccctgagttctccgaccacttctggtccagcctggagatcaccttcaacctgcgagataccaacatgatcccgggctcccccggcagtacggagttagagggtggcttcagtcggcaacgcaagcgcaagttgtccttccgcaggcgcacggacaaggacacggagcagccaggggaggtgtcggccttggggccgggccgggcgggggcagggccgagtagccggggccggccgggggggccgtggggggagagcccgtccagtggcccctccagccctgagagcagtgaggatgagggcccaggccgcagctccagccccctccgcctggtgcccttctccagccccaggccccccggagagccgccgggtggggagcccctgatggaggactgcgagaagagcagcgacacttgcaaccccctgtcaggcgccttctcaggagtgtccaacattttcagcttctggggggacagtcggggccgccagtaccaggagctccctcgatgccccgcccccacccccagcctcctcaacatccccctctccagcccgggtcggcggccccggggcgacgtggagagcaggctggatgccctccagcgccagctcaacaggctggagacccggctgagtgcagacatggccactgtcctgcagctgctacagaggcagatgacgctggtcccgcccgcctacagtgctgtgaccaccccggggcctggccccacttccacatccccgctgttgcccgtcagccccctccccaccctcaccttggactcgctttctcaggtttcccagttcatggcgtgtgaggagctgcccccgggggccccagagcttccccaagaaggccccacacgacgcctctccctaccgggccagctgggggccctcacctcccagcccctgcacagacacggctcggacccgggcagttagtggggctgcccagtgtggacacgtggctcacccagggatcaaggcgctgctgggccgctccccttggaggccctgctcaggaggccctgaccgtggaaggggagaggaactcgaaagcacagctcctcccccagcccttgggaccatcttctcctgcagtcccctgggccccagtgagaggggcaggggcagggccggcagtaggtggggcctgtggtccccccactgccctgagggcattagctggtctaactgcccggaggcacccggccctgggccttaggcacctcaaggacttttctgctatttactgctcttattgttaaggataataattaaggatcatatgaataattaatgaagatgctgatgactatgaataataaataattatcctgaggagaaaa

SEQ ID NO: 1949 - DNA, 1400 bp, Homo sapiens
cccggccgccggcccgcgggccccgggtcccccgcgacgtccccgccggcctcggtccgcatcctgcgcgctgccgctgcctgcgaccttctcggctgcctgggtatggtgatccggtccaccgtgtggttaggattcccaaattttgttgacagcgtctcggatatgaaccacacggaaatttggcctgctgctttctgcgtggggagtgcgatgtggatccagctgttgtacagtgcctgcttctggtggctgttttgctatgcagtggatgcttatctggtgatccggagatcggcaggactgagcaccatcctgctgtatcacatcatggcgtggggcctggccaccctgctctgtgtggagggagccgccatgctctactacccttccgtgtccaggtgtgagcggggcctggaccacgccatcccccactatgtcaccatgtacctgcccctgctgctggttctcgtggcgaaccccatcctgttccaaaagacagtgactgcagtggcctctttacttaaaggaagacaaggcatttacacggagaacgagaggaggatgggagccgtgatcaagatccgatttttcaaaatcatgctggttttaattatttgttggttgtcgaatatcatcaatgaaagccttttattctatcttgagatgcaaacagatatcaatggaggttctttgaaacctgtcagaactgcagccaagaccacatggtttattatgggaatcctgaatccagcccagggatttctcttgtctttggccttctacggctggacaggatgcagcctgggttttcagtctcccaggaaggagatccagtgggaatcactgaccacctcggctgctgagggggctcacccatccccactgatgccccatgaaaaccctgcttccgggaaggtgtctcaagtgggtgggcagacttctgacgaagccctgagcatgctgtctgaaggttctgatgccagcacaattgaaattcacactgcaagtgaatcctgcaacaaaaatgagggtgaccctgctctcccaacccatggagacctatgaaggggatgtgctgggggtccagaccccatattcctcagactcaacaattcttgttctttagaactgtgttctcaccttcccaacactgcactgccgaagtgtagcggcccccaaaccttgctctcatcaccagctagagcttcttcccgaagggcctttaggataggagaaagggttcatgcacacacgtgtgagaatggaagagccccctccagaccactctacagctgctctagccttagttgccactaggaagttttctgaggctggctgtaaagtaagtgtaaggtccacatccttggggaagtagttaaataaaatagttatgactg

SEQ ID NO: 1950 - DNA, 1400 bp, Homo sapiens
gcagggaggcctcctttgacggcatcagcaagttcgaagtcaacaataccattcttcacccagagatcgttgagagccgagtgtttaagacggatatggagctggaggttctgcgctataccaataaaatctccagcgaggcccaccgtgaggtaatgaaggctgtaaaagtgggaatgaaagaatatgggttggaaagcctcttcgagcactactgctactcccggggcggcatgcgccacagctcctacacctgcatctgcggcagtggtgagaactcagccgtgctacactacggacacgccggagctcccaacgaccgaacgatccagaatggggatatgtgcctgttcgacatgggcggtgagtattactctgtcgcttccgacatcacctgctcctttccccgcaacggcaagttcactgcagaccagaaggccgtctatgaggcagtgctgctgagctcccgtgccgtcatgggtgccatgaagccaggtgactggtggcctgacatcgaccgcctggctgaccgcatccacctggaggagctggcccacatgggcatcctgagcggcagcgtggacgccatggtccaggctcacctgggggccgtgtttatgcctcacgggcttggccacttcctgggcattgacgtgcacgacgtgggaggctacccagagggcgtggagcgcatcgacgagcccggcctgcggagcctgcgcactgcacggcacctgcagccaggcatggtgctcaccgtggagccgggcatctacttcatcgaccacctcctggatgaggccctggcggacccggcccgcgcctccttccttaaccgcgaggtcctgcagcgctttcgcggttttggcggggtccgcatcgaggaggacgtcgtggtgatcgacagcggcatagagctgctgacctgcgtgccccgcactgtggaagagattgaagcatgcatggcaggctgtgacaaggcctttacccccttctctggccccaagtagagccagccagaaatcccagcgcacctgggggcctggccttgcaacctcttttcgtgatgggcagcctgctggtcagcactccagtagcgagagacggcacccagaatcagatcccagcttcggcatttgatcagaccaaacagtgctgtttcccggggaggaaacacttttttaattacccttttgcaggcaccacctttaatctgttttataccttgcttattaaatgagcgacttaaaatgattgaaaataatgctgtcctttagtagcaagtaaaatgtgtcttgctgtcatttatattccttttcccaggaaagaagcatttctgatactttctgtcaaaaatcaatatgcagaatggcatttgcaataaaaggtttcctaaaatg

SEQ ID NO: 1951 - DNA, 1400 bp, Homo sapiens
aggaatccagatgccgataaaggcccctggtgttttaccacagaccccagcgtcaggtgggagtactgcaacctgaaaaaatgctcaggaacagaagcgagtgttgtagcacctccgcctgttgtcctgcttccagatgtagagactccttccgaagaagactgtatgtttgggaatgggaaaggataccgaggcaagagggcgaccactgttactgggacgccatgccaggactgggctgcccaggagccccatagacacagcattttcactccagagacaaatccacgggcgggtctggaaaaaaattactgccgtaaccctgatggtgatgtaggtggtccctggtgctacacgacaaatccaagaaaactttacgactactgtgatgtccctcagtgtgcggccccttcatttgattgtgggaagcctcaagtggagccgaagaaatgtcctggaagggttgtgggggggtgtgtggcccacccacattcctggccctggcaagtcagtcttagaacaaggtttggaatgcacttctgtggaggcaccttgatatccccagagtgggtgttgactgctgcccactgcttggagaagtccccaaggccttcatcctacaaggtcatcctgggtgcacaccaagaagtgaatctcgaaccgcatgttcaggaaatagaagtgtctaggctgttcttggagcccacacgaaaagatattgccttgctaaagctaagcagtcctgccgtcatcactgacaaagtaatcccagcttgtctgccatccccaaattatgtggtcgctgaccggaccgaatgtttcatcactggctggggagaaacccaaggtacttttggagctggccttctcaaggaagcccagctccctgtgattgagaataaagtgtgcaatcgctatgagtttctgaatggaagagtccaatccaccgaactctgtgctgggcatttggccggaggcactgacagttgccagggtgacagtggaggtcctctggtttgcttcgagaaggacaaatacattttacaaggagtcacttcttggggtcttggctgtgcacgccccaataagcctggtgtctatgttcgtgtttcaaggtttgttacttggattgagggagtgatgagaaataattaattggacgggagacagagtgacgcactgactcacctagaggctgggacgtgggtagggatttagcatgctggaaataactggcagtaatcaaacgaagacactgtccccagctaccagctacgccaaacctcggcattttttgtgttattttctgactgctggattctgtagtaaggtgacatagctatgacatttgttaaaaataaactctgtacttaactttgatttgagtaaattttggtttt

SEQ ID NO: 1952 - DNA, 1400 bp, Homo sapiens; identical to SEQ ID NO: 1951

SEQ ID NO: 1953 - DNA, 600 bp, Homo sapiens
aatttcatgggggatgagtggtttgtggattccctcaaccagaagatggaggtgcagcgccggccctggttagtgaagtacggggacagcggggagcagattgccggcttcgtgaaggagttctcccacatcgcctttctcacgatcaagggcgccggccacatggttcccaccgacaagcccctcgctgccttcaccatgttctcccgcttcctgaacaagcagccatactgatgaccacagcaaccagctccacggcctgatgcagcccctcccagcctctcccgctaggagagtcctcttctaagcaaagtgcccctgcaggcgggttctgccgccaggactgcccccttcccagagccctgtacatcccagactgggcccagggtctcccatagacagcctgggggcaagttagcactttattcccgcagcagttcctgaatggggtggcctggccccttctctgcttaaagaatgccctttatgatgcactgattccatcccaggaacccaacagagctcaggacagcccacagggaggtggtggacggactgtaattgatagattgattatggaattaaattgggtacagcttc

SEQ ID NO: 1954 - DNA, 1400 bp, Homo sapiens
gcagcttcagctgcgactgccgcagcggctgggagggccgcttctgccagcgcgaggtgagcttcctcaattgctcgctggacaacggcggctgcacgcattactgcctagaggaggtgggctggcggcgctgtagctgtgcgcctggctacaagctgggggacgacctcctgcagtgtcaccccgcagtgaagttcccttgtgggaggccctggaagcggatggagaagaagcgcagtcacctgaaacgagacacagaagaccaagaagaccaagtagatccgcggctcattgatgggaagatgaccaggcggggagacagcccctggcaggtggtcctgctggactcaaagaagaagctggcctgcggggcagtgctcatccacccctcctgggtgctgacagcggcccactgcatggatgagtccaagaagctccttgtcaggcttggagagtatgacctgcggcgctgggagaagtgggagctggacctggacatcaaggaggtcttcgtccaccccaactacagcaagagcaccaccgacaatgacatcgcactgctgcacctggcccagcccgccaccctctcgcagaccatagtgcccatctgcctcccggacagcggccttgcagagcgcgagctcaatcaggccggccaggagaccctcgtgacgggctggggctaccacagcagccgagagaaggaggccaagagaaaccgcaccttcgtcctcaacttcatcaagattcccgtggtcccgcacaatgagtgcagcgaggtcatgagcaacatggtgtctgagaacatgctgtgtgcgggcatcctcggggaccggcaggatgcctgcgagggcgacagtggggggcccatggtcgcctccttccacggcacctggttcctggtgggcctggtgagctggggtgagggctgtgggctccttcacaactacggcgtttacaccaaagtcagccgctacctcgactggatccatgggcacatcagagacaaggaagccccccagaagagctgggcaccttagcgaccctccctgcagggctgggcttttgcatggcaatggatgggacattaaagggacatgtaacaagcacaccggcctgctgttctgtccttccatccctcttttgggctcttctggagggaagtaacatttactgagcacctgttgtatgtcacatgccttatgaatagaatcttaactcctagagcaactctgtggggtggggaggagcagatccaagttttgcggggtctaaagctgtgtgtgttgagggggatactctgtttatgaaaaagaataaaaaacacaaccacgaaaaaaaaaaaaaaaaaaaaaaaaaaaaaaaaaaaaaaaacccccccccgccccccccccctgcag

SEQ ID NO: 1955 - DNA, 600 bp, Homo sapiens
atgcactatgagatgctcttcaactccttccagggattttttgtcgcaatcatatactgtttctgcaatggcgaggtacaagctgagatcaagaaatcttggagccgctggacactggcactggacttcaagcgaaaggcacgcagcgggagcagcagctatagctacggccccatggtgtcccacacaagtgtgaccaatgtcggcccccgtgtgggactcggcctgcccctcagcccccgcctactgcccactgccaccaccaacggccaccctcagctgcctggccatgccaagccagggaccccagccctggagaccctcgagaccacaccacctgccatggctgctcccaaggacgatgggttcctcaacggctcctgctcaggcctggacgaggaggcctctgggcctgagcggccacctgccctgctacaggaagagtgggagacagtcatgtgaccaggcgctgggggctggacctgctgacatagtggatggacagatggaccaaaagatgggtggttgaatgatttcccactcagggcctggggccaagaggaaaaacagggaaaaaaagaaaaaaaaaagaaaaaggaa

SEQ ID NO: 1956 - DNA, 1400 bp, Homo sapiens
acatgaacacccttagaaaatgtgtcctatctatcttccaaatgcaatttgattgactgcccattcaccaaaattatcctgaactcttctgcaaaaatggatattattagaaattagaaaaaaattactaattttacacattagattttattttactattggaatctgatatactgtgtgcttgttttataaaattttgcttttaattaaataaaagctggaagcaaagtataaccatatgatactatcatactactgaaacagatttcatacctcagaatgtaaaagaacttactgattattttcttcatccaacttatgtttttaaatgaggattattgatagtactcttggtttttataccattcagatcactgaatttataaagtacccatctagtacttgaaaaagtaaagtgttctgccagatcttaggtatagaggaccctaacacagtatatcccaagtgcactttctaatgtttctgggtcctgaagaattaagatacaaattaattttactccataaacagactgttaattataggagccttaatttttttttcatagagatttgtctaattgcatctcaaaattattctgccctccttaatttgggaaggtttgtgttttctctggaatggtacatgtcttccatgtatcttttgaactggcaattgtctatttatcttttatttttttaagtcagtatggtctaacactggcatgttcaaagccacattatttctagtccaaaattacaagtaatcaagggtcattatgggttaggcattaatgtttctatctgattttgtgcaaaagcttcaaattaaaacagctgcattagaaaaagaggcgcttctcccctcccctacacctaaaggtgtatttaaactatcttgtgtgattaacttatttagagatgctgtaacttaaaataggggatatttaaggtagcttcagctagcttttaggaaaatcactttgtctaactcagaattatttttaaaaagaaatctggtcttgttagaaaacaaaattttattttgtgctcatttaagtttcaaacttactattttgacagttattttgataacaatgacactagaaaacttgactccatttcatcattgtttctgcatgaatatcatacaaatcagttagtttttaggtcaagggcttactatttctgggtcttttgctactaagttcacattagaattagtgccagaattttaggaacttcagagatcgtgtattgagatttcttaaataatgcttcagatattattgctttattgcttttttgtattggttaaaactgtacatttaaaattgctatgttactattttctacaattaatagtttgtctattttaaaataaattagttgttaagagtc

SEQ ID NO: 1957 - DNA, 1400 bp, Homo sapiens
  misc_feature (143)..(143): n is a, c, g, or t
  misc_feature (203)..(203): n is a, c, g, or t
  misc_feature (217)..(218): n is a, c, g, or t
  misc_feature (394)..(395): n is a, c, g, or t
  misc_feature (455)..(455): n is a, c, g, or t
  misc_feature (635)..(636): n is a, c, g, or t
  misc_feature (650)..(650): n is a, c, g, or t
  misc_feature (655)..(655): n is a, c, g, or t
  misc_feature (658)..(660): n is a, c, g, or t
  misc_feature (668)..(668): n is a, c, g, or t
  misc_feature (670)..(674): n is a, c, g, or t
  misc_feature (678)..(679): n is a, c, g, or t
  misc_feature (702)..(702): n is a, c, g, or t
  misc_feature (723)..(723): n is a, c, g, or t
  misc_feature (738)..(739): n is a, c, g, or t
  misc_feature (780)..(780): n is a, c, g, or t
  misc_feature (791)..(791): n is a, c, g, or t
  misc_feature (907)..(907): n is a, c, g, or t
  misc_feature (951)..(951): n is a, c, g, or t
  misc_feature (984)..(984): n is a, c, g, or t
  misc_feature (1018)..(1018): n is a, c, g, or t
  misc_feature (1022)..(1022): n is a, c, g, or t
  misc_feature (1054)..(1054): n is a, c, g, or t
  misc_feature (1076)..(1076): n is a, c, g, or t
  misc_feature (1125)..(1125): n is a, c, g, or t
  misc_feature (1144)..(1144): n is a, c, g, or t
  misc_feature (1198)..(1200): n is a, c, g, or t
  misc_feature (1259)..(1259): n is a, c, g, or t
  misc_feature (1353)..(1354): n is a, c, g, or t
  misc_feature (1373)..(1376): n is a, c, g, or t
gggtgcaagccccattcacggcctggcatgcagcttgtccttgctcctggaacctggcaggccctgccagccagccaatggaagagaggggctgagccatgggggtttggggctaagaagttcaccagccctgagccatggsnsccctcagcctgcctgaagagaggaaactggcgatctcccagggctctctggaccatacncggaggagttttcnngtgtggtctccagctcctctccagacacagagacatgggagtggggagcggacgttggccctggccctgtgcagggaaagggatggtcaggcccagttctcgtgccccttagaggggaatgaaccatggcacctttgagagagggggcactgtggtcaggcccagcctctctggcnnagtcccgggatcctgatggcacccacacagaggacctctttggggcaagatccaggtggntcccataggtcttgtgaaaaggctttttcagggaaaaatattttactagtccaatcacccccaggacctcttcagctgctgacaatcctatttagcatatgcaaatcttttaacatagagaactgtcaccctgaggtaacagggtcaactggcgaagagcaggccagggggcttggctgnnccattccagctctnccacngannncctccwmncnnnnncatnnctcccaggccacctcagtctcanctgccggctctgggctggctnctcctaacctacctnnccgagctgtcggagggctggacatttgtggcagtgctgaanggggcattgsnggcgagtaaagtattakgtttcttcttgtcaccccagttcccttggtggcaaccccagacccaacccatgcccctgacagatctagttctcttctsctgtgttccctttgagtccngtgtgggacacggtttaactgtcccagcgagatttctccaagtngaaatcctatttttgtagatctccatgctttgnctctcaaggcttggagaggtatgtgcccctcctnggbnctcaccgcctgctacacaggcaggaatgcggnttgggaggcaggtcgggctssnagcccagctggccggaaggagactgtggtttttgtgtgtgtggacagcncgggagctttgagacaggntgcctggggctggctgcagacggtgtggttgggggtgggaggtgagctagaccnnncccttagcttttagcctggctgtcacctttttaatttccagaactgcacaatgaccagnaggaggggagaagagagtaggaaaaaggagggaaggacagacatcaagtgccagatgttgtctgaactaatcgagcacttctcaccaaacttcnngtataaataaaatacatannnnggggcaaaccaataaatggcttac

SEQ ID NO: 1958 - DNA, 1400 bp, Homo sapiens; identical to SEQ ID NO: 1957
  misc_feature (143)..(143): n is a, c, g, or t
  misc_feature (203)..(203): n is a, c, g, or t
  misc_feature (217)..(218): n is a, c, g, or t
  misc_feature (394)..(395): n is a, c, g, or t
  misc_feature (455)..(455): n is a, c, g, or t
  misc_feature (635)..(636): n is a, c, g, or t
  misc_feature (650)..(650): n is a, c, g, or t
  misc_feature (655)..(655): n is a, c, g, or t
  misc_feature (658)..(660): n is a, c, g, or t
  misc_feature (668)..(668): n is a, c, g, or t
  misc_feature (670)..(674): n is a, c, g, or t
  misc_feature (678)..(679): n is a, c, g, or t
  misc_feature (702)..(702): n is a, c, g, or t
  misc_feature (723)..(723): n is a, c, g, or t
  misc_feature (738)..(739): n is a, c, g, or t
  misc_feature (780)..(780): n is a, c, g, or t
  misc_feature (791)..(791): n is a, c, g, or t
  misc_feature (907)..(907): n is a, c, g, or t
  misc_feature (951)..(951): n is a, c, g, or t
  misc_feature (984)..(984): n is a, c, g, or t
  misc_feature (1018)..(1018): n is a, c, g, or t
  misc_feature (1022)..(1022): n is a, c, g, or t
  misc_feature (1054)..(1054): n is a, c, g, or t
  misc_feature (1076)..(1076): n is a, c, g, or t
  misc_feature (1125)..(1125): n is a, c, g, or t
  misc_feature (1144)..(1144): n is a, c, g, or t
  misc_feature (1198)..(1200): n is a, c, g, or t
  misc_feature (1259)..(1259): n is a, c, g, or t
  misc_feature (1353)..(1354): n is a, c, g, or t
  misc_feature (1373)..(1376): n is a, c, g, or t

SEQ ID NO: 1959 - DNA, 600 bp, Homo sapiens
atagttgccttcgtcatcgtctgctgctgtcatgtgaagatctacatcacagtccgaaatccgcagtacaacccaggggacaaagataccaaaattgccaagaggatggctgtgttgatcttcaccgacttcatatgcatggccccaatctcattctatgctctgtcagcaattctgaacaagcctctcatcactgttagcaactccaaaatcttgctggtactcttctatccacttaactcctgtgccaatccattcctctatgctattttcaccaaggccttccagagggatgtgttcatcctactcagcaagtttggcatctgtaaacgccaggctcaggcataccgggggcagagggttcctccaaagaacagcactgatattcaggttcaaaaggttacccacgacatgaggcagggtctccacaacatggaagatgtctatgaactgattgaaaactcccatctaaccccaaagaagcaaggccaaatctcagaagagtatatgcaaacggttttgtaagttaacactacactactcacaatggtaggggaacttacaaaataatagtttcttgaatatgcattccaatcccat

SEQ ID NO: 1960 - DNA, 600 bp, Homo sapiens
gtctacgaagtggtggtggacaggaagcatgtccctgaagaggtgctagctgtgttagagcaggaacccattatcctgccagcatgggaccccatgggagctttggctgagtgatactgccctccagctctttcctccttccatggaacctgacgtagctgcaaaggacagatccagggactgaagccaaagttatgcaagggactgtgtgttgccacaggacacagtcagatttccagtctccaccaggaacctcttcagaaagtgtgctttatgctgaaacagaatactgttaaaggaaaaaaaagaggggggaagatcaggtcatactatctactctcctcatctctaacagctcaggatctcttagcattttaattagatgtaattgtttgtctttaactgtcaaaaagtttggttctgtgtctgtgttttaataagacgagaggacgagcgattgaggtgtatggagagaaaacagacctaatgctccttgttcctagagtagagtggagggagggtggcctaagagttgagctctcggaactgcatgctgctggacagtatcactgtctttcctagatggcagtcactgaattc

SEQ ID NO: 1961 - DNA, 600 bp, Homo sapiens
ctaacccagcaagagcagcagcagcagcccctgaccctcccacagcagcaacgatctcagcagcagcccagatgcaagcagaaggtcatctttggcagcggcacggtcaccttctcactgagctttgatgagcctcagaagaacgccatggcccacgggaattctacgcaccagaactccctggaggcccagaaaagcagcgatacgctgacccgacaccagccattactcccgctgcagtgcggggaaacggacttagatctgaccgtccaggaaacaggtctgcaaggacctgtgggtggagaccagcggccagaggtggaggaccctgaagagttgtccccagcacttgtagtgtccagttcacagagctttgtcatcagtggtggaggcagcactgttacagaaaacgtagtgaattcataaaatggaaggagaagactgggctagggagaatgcagagaggtttcttggggtcccagggatgaggaatcgccccagactcctttcctctgaggaagaagggataatagacacatcaaatgccccgaatttagtcacaccatcttaaatgacagtgaattgacccatgttcccttt

SEQ ID NO: 1962 - DNA, 600 bp, Homo sapiens; identical to SEQ ID NO: 1961

SEQ ID NO: 1963 - DNA, 1400 bp, Homo sapiens
tttaatttgggaaaaaaacctgaagtatatttccatccataaccttgaggcttctcttggtgtccatacatatgaactggctatgaaccacctgggggacatgaccagtgaagaggtggttcagaagatgactggactcaaagtacccctgtctcattcccgcagtaatgacaccctttatatcccagaatgggaaggtagagccccagactctgtcgactatcgaaagaaaggatatgttactcctgtcaaaaatcagggtcagtgtggttcctgttgggcttttagctctgtgggtgccctggagggccaactcaagaagaaaactggcaaactcttaaatctgagtccccagaacctagtggattgtgtgtctgagaatgatggctgtggagggggctacatgaccaatgccttccaatatgtgcagaagaaccggggtattgactctgaagatgcctacccatatgtgggacaggaagagagttgtatgtacaacccaacaggcaaggcagctaaatgcagagggtacagagagatccccgaggggaatgagaaagccctgaagagggcagtggcccgagtgggacctgtctctgtggccattgatgcaagcctgacctccttccagttttacagcaaaggtgtgtattatgatgaaagctgcaatagcgataatctgaaccatgcggttttggcagtgggatatggaatccagaagggaaacaagcactggataattaaaaacagctggggagaaaactggggaaacaaaggatatatcctcatggctcgaaataagaacaacgcctgtggcattgccaacctggccagcttccccaagatgtgactccagccagccaaatccatcctgctcttccatttcttccacgatggtgcagtgtaacgatgcactttggaagggagttggtgtgctatttttgaagcagatgtggtgatactgagattgtctgttcagtttccccatttgtttgtgcttcaaatgatccttcctactttgcttctctccacccatgacctttttcactgtggccatcaggactttccctgacagctgtgtactcttaggctaagagatgtgactacagcctgcccctgactgtgttgtcccagggctgatgctgtacaggtacaggctggagattttcacataggttagattctcattcacgggactagttagctttaagcaccctagaggactagggtaatctgacttctcacttcctaagttcccttctatatcctcaaggtagaaatgtctatgttttctactccaattcataaatctattcataagtctttggtacaagtttacatgataaaaagaaatgtgatttgtcttcccttctttgcacttttgaaataaagtatttatc

SEQ ID NO: 1964 - DNA, 600 bp, Homo sapiens
ttcatgatggtggtgatcagcctggaccgctccctggctatcacgaggcccctagctttgaaaagcaacagcaaagtcggacagtccatggttggcctggcctggatcctcagtagtgtctttgcaggaccacagttatacatcttcaggatgattcatctagcagacagctctggacagacaaaagttttctctcaatgtgtaacacactgcagtttttcacaatggtggcatcaagcattttataactttttcaccttcagctgcctcttcatcatccctcttttcatcatgctgatctgcaatgcaaaaatcatcttcaccctgacacgggtccttcatcaggacccccacgaactacaactgaatcagtccaagaacaatataccaagagcacggctgaagactctaaaaatgacggttgcatttgccacttcatttactgtctgctggactccctactatgtcctaggaatttggtattggtttgatcctgaaatgttaaacaggttgtcagacccagtaaatcacttcttctttctctttgcctttttaaacccatgctttgatccacttatctatggatatttttctctgtga

SEQ ID NO: 1965 - DNA, 600 bp, Homo sapiens; identical to SEQ ID NO: 1964

SEQ ID NO: 1966 - DNA, 1400 bp, Homo sapiens
cctgcttgcaagcgacattcacaccgatgtccctgagcccttctcagtccctcgtggtccatgacgtggaatatttgaaaaacatgtcacaactggtggaggagatgctgctaaagcagagggactttctgcagagccacatgatcttagggctggtggtgaccctttctccagccctggacagtcaattccaggaggcacgcagaaagctcagccagaaactgcgggaactgacagagcaaccacccatgcctgcccgcccacgatggatgaagtgcgtggaggagacaggcacgttcttcgagcccacgctggcggctttgtttgttcgtgaggcctttggcccgagcacccgaagtgctgccatgaaattattcactgcgatccgggatgccctcatcactcgcctcagaaaccttccctggatgaatgaggagacccagaacatggcccaggacaaggttgctcaactgcaggtggagatgggggcttcagaatgggccctgaagccagagctggcccgacaagaatacaacgatatacagcttggatcgagcttcctgcagtctgtcctgagctgtgtccggtccctccgagctagaattgtccagagcttcttgcagcctcacccccaacacaggtggaaggtgtccccttgggacgtcaatgcttactattcggtatctgaccatgtggtagtctttccagctggactcctccaacccccattcttccaccctggctatcccagagccgtgaactttggcgctgctggcagcatcatggcccacgagctgttgcacatcttctaccagctcttactgcctgggggctgcctcgcctgtgacaaccatgccctccaggaagctcacctgtgcctgaagcgccattatgctgcctttccattacctagcagaacctccttcaatgactccctcacattcttagagaatgctgcagacgttggggggctagccatcgcgctgcaggcatacagcaagaggctgttacggcaccatggggagactgtcctgcccagcctggacctcagcccccagcagatcttctttcgaagctatgcccaggtgatgtgtaggaagcccagcccccaggactctcacgacactcacagccctccacacctccgagtccacgggcccctcagcagcaccccagcctttgccaggtatttccgctgtgcacgtggtgctctcttgaacccctccagccgctgccagctctggtaacttggttaccaaagatgccacagcacagaaatatcgaccaacacctccctggtcacatccatggaatcagagcaagatttcctttctgcttctgttccaaaaataaaagctggcacttggcttccgcttgtctcttaaaaaaaaaaaaaaaaa

SEQ ID NO: 1967 - DNA, 1400 bp, Homo sapiens
attccagaattccaaaccttagcaggcgctttcagtatagatggctggaattctcaagggtaatccaggggaccacaactttgctgcctcaatgggacaaatgtgtaaactttattgaaagtgccctcccttatgttgttggaaagatgtttgtagatgtgtacttccaggaagataagaaggaaatgatggaggaattggttgagggcgttcgctgggcctttattgacatgctagagaaagaaaatgagtggatggatgcaggaacgaaaaggaaagccaaagaaaaggcgagagctgttttggcaaaagttggctatccagagtttataatgaatgatactcatgttaatgaagacctcaaagctatcaagttttcagaagccgactactttggcaacgtcctacaaactcgcaagtatttagcacagtctgatttcttctggctaagaaaagccgttccaaaaacagagtggtttacaaatccgacgactgtcaatgccttctacagtgcatccaccaaccagatccgatttccagcaggagagctccagaagcctttcttttggggaacagaatatcctcgatctctgagttatggtgctataggagtaattgtcggacatgaatttacacatggatttgataataatggtagaaaatatgataaaaatggaaacctggatccttggtggtctactgaatcagaagaaaagtttaaggaaaaaacaaaatgcatgattaaccagtatagcaactattattggaagaaagctggcttaaatgtcaaggggaagaggaccctgggagaaaatattgctgataatggaggcctgcgggaagcttttagggcttacaggaaatggataaatgacagaaggcagggacttgaggagcctcttctaccaggcatcacattcaccaacaaccagctcttcttcctgagttatgctcatgtgaggtgcaattcctacagaccagaagctgcccgagaacaagtccaaattggtgctcacagtccccctcagtttagggtcaatggtgcaattagtaactttgaagaattccagaaagcttttaactgtccacccaattccacgatgaacagaggcatggactcctgccgactctggtagctgggacgctggtttatggcatcctgagacagttgcacagtgccagcggaggctgcactgagccttcatcgcccattgctttaggcctggagactttcatttttagtgcattttcattatttgggtaggtgacctgcttggatctagacagcatctgttcaaagtcgtagggcttataaagtggaatataagaatgaactaagtatgtttctttagaaaatcaaaccaacaaaaataaatccctaggctacttttgttaaaaaa

SEQ ID NO: 1968 - DNA, 1400 bp, Homo sapiens; identical to SEQ ID NO: 1967

SEQ ID NO: 1969 - DNA, 600 bp, Homo sapiens
tttacaaaaatcatcacaccagcaattaccagagtggtggattttgccaaaaagttgcctatgttttgtgagctgccatgtgaagaccagatcatcctcctcaaaggctgctgcatggagatcatgtcccttcgcgctgctgtgcgctatgacccggaaagtgagactttaaccttgaatggggaaatggcagtgatacggggccagctgaaaaatgggggtcttggggtggtgtcagacgccatctttgacctaggcatgtctctgtcttctttcaacctggatgacactgaagtagccctccttcaggccgtcctgctgatgtcttcagatcgcccggggcttgcctgtgttgagagaatagaaaagtaccaagatagtttcctgctggcctttgaacactatatcaattaccgaaaacaccacgtgacacacttttggccaaaactcctgatgaaggtgacagatctgcggatgataggagcctgccatgccagccgcttcctgcacatgaaggtggaatgccccacagaactcctcccccctttgttcctggaagtgttcgaggattagactgactggattccttcctataattcc

SEQ ID NO: 1970 - DNA, 600 bp, Homo sapiens
tgtatgcttgggattctcaatggatgctggattctaaaatttgaatgggtaaaagcatgtctacgaagaaaagtatgtgaacaggaagaaaagtatgaaattcctgaaggtccacgcagaagcaggctcaacagagaacagctgttgccaaagctgtttgatggatgctacttctatttgtggggaaccttcaaacaccatccaaaggacaaccttattaagctcgtcactgcaggtgggggccagatcctcagtagaaagcccaagccagacagtgacgtgactcagaccatcaatacagtcgcataccatgcgagacccgattctgatcagcgcttctgcacacagtatatcatctatgaagatttgtgtaattatcacccagagagggttcggcagggcaaagtctggaaggctccttcgagctggtttatagactgtgtgatgtcctttgagttgcttcctcttgacagctgaatattataccagatgaacatttcaaattgaatttgcacggtttgtgagagcccagtcattgtactgtttttaatgttcacatttttacaaataggtagagtcattcatatttgtctttgaatc

SEQ ID NO: 1971 - DNA, 600 bp, Homo sapiens; identical to SEQ ID NO: 1970

SEQ ID NO: 1972 - DNA, 600 bp, Homo sapiens
tccgcctcccaggtccaagccatcaagtgctttctttccaaatgctggagtctgaacatcagtaccaaggagtacgcctacctcaaggggaccgtgctctttaacccggacgtgccgggcctgcagtgcgtgaagtacattcagggactccagtggggaactcagcaaatactcagtgaacacaccaggatgacgcaccaagggccccatgacagattcatcgaacttaatagtacccttttcctgctgagattcatcaatgccaatgtcattgctgaactgttcttcaggcccatcatcggcacagtcagcatggatgatatgatgctggaaatgctctgtacaaagatataaagtcatgtgggccacacaagtgcagtagtgcagttcaccatgagggaagaataaagagctgtgggcaaaagagtgtaaaatattttaaaataaactttcttaatatttttacatgcagagtattttgatcttcaattaaagaaataattttattcccagcacagtcacaaatttctctgttccatagttaaagaagacatttgccaacaggtagcatagctctgtacatcttttaaaaaaaaaaaa

SEQ ID NO: 1973 - DNA, 600 bp, Homo sapiens; identical to SEQ ID NO: 1972

SEQ ID NO: 1974 - DNA, 600 bp, Homo sapiens
cggagcaggaggagggcggtgaggcggtgcacgaggtggaggtggtcatcaagcacaaccggttcacaaaggagacctatgacttcgacatcgccgtgctccggctcaagacccccatcaccttccgcatgaacgtggcgcctgcctgcctccccgagcgtgactgggccgagtccacgctgatgacgcagaagacggggattgtgagcggcttcgggcgcacccacgagaagggccggcagtccaccaggctcaagatgctggaggtgccctacgtggaccgcaacagctgcaagctgtccagcagcttcatcatcacccagaacatgttctgtgccggctacgacaccaagcaggaggatgcctgccagggggacagcgggggcccgcacgtcacccgcttcaaggacacctacttcgtgacaggcatcgtcagctggggagagggctgtgcccgtaaggggaagtacgggatctacaccaaggtcaccgccttcctcaagtggatcgacaggtccatgaaaaccaggggcttgcccaaggccaagagccatgccccggaggtcataacgtcctctccattaaagtgagatcccactc

SEQ ID NO: 1975 - DNA, 1400 bp, Homo sapiens
cccggtgggctacaccggacccttctgcgacgtggacaccaaggcaagctgctatgatggccgcgggctcagctaccgcggcctggccaggaccacgctctcgggtgcgccctgtcagccgtgggcctcggaggccacctaccggaacgtgactgccgagcaagcgcggaactggggactgggcggccacgccttctgccggaacccggacaacgacatccgcccgtggtgcttcgtgctgaaccgcgaccggctgagctgggagtactgcgacctggcacagtgccagaccccaacccaggcggcgcctccgaccccggtgtcccctaggcttcatgtcccactcatgcccgcgcagccggcaccgccgaagcctcagcccacgacccggaccccgcctcagtcccagaccccgggagccttgccggcgaagcgggagcagccgccttccctgaccaggaacggcccactgagctgcgggcagcggctccgcaagagtctgtcttcgatgacccgcgtcgttggcgggctggtggcgctacgcggggcgcacccctacatcgccgcgctgtactggggccacagtttctgcgccggcagcctcatcgccccctgctgggtgctgacggccgctcactgcctgcaggaccggcccgcacccgaggatctgacggtggtgctcggccaggaacgccgtaaccacagctgtgagccgtgccagacgttggccgtgcgctcctaccgcttgcacgaggccttctcgcccgtcagctaccagcacgacctggctctgttgcgccttcaggaggatgcggacggcagctgcgcgctcctgtcgccttacgttcagccggtgtgcctgccaagcggcgccgcgcgaccctccgagaccacgctctgccaggtggccggctggggccaccagttcgagggggcggaggaatatgccagcttcctgcaggaggcgcaggtaccgttcctctccctggagcgctgctcagccccggacgtgcacggatcctccatcctccccggcatgctctgcgcagggttcctcgagggcggcaccgatgcgtgccagggtgattccggaggcccgctggtgtgtgaggaccaagctgcagagcgccggctcaccctgcaaggcatcatcagctggggatcgggctgtggtgaccgcaacaagccaggcgtctacaccgatgtggcctactacctggcctggatccgggagcacaccgtttcctgattgctcagggactcatctttccctccttggtgattccgcagtgagagagtggctggggcatggaaggcaagattgtgtcccattcccccagtgcggccagctccgcgccaggatggcgaggaactcaataaagtgctttgaaaatgctgag

SEQ ID NO: 1976 - DNA, 1400 bp, Homo sapiens
tcaagtcactgtagcgatgactccacgctccgaaggctccagtgtgaatctgtcacctccattggagcagtgtgtccctgatcgggggcagcagtaccaggggcgcctggcggtgaccacacatgggctcccctgcctggcctgggccagcgcacaggccaaggccctgagcaagcaccaggacttcaactcagctgtgcagctggtggagaacttctgccgcaacccagacggggatgaggagggcgtgtggtgctatgtggccgggaagcctggcgactttgggtactgcgacctcaactattgtgaggaggccgtggaggaggagacaggagatgggctggatgaggactcagacagggccatcgaagggcgtaccgccaccagtgagtaccagactttcttcaatccgaggacctttggctcgggagaggcagactgtgggctgcgacctctgttcgagaagaagtcgctggaggacaaaaccgaaagagagctcctggaatcctacatcgacgggcgcattgtggagggctcggatgcagagatcggcatgtcaccttggcaggtgatgcttttccggaagagtccccaggagctgctgtgtggggccagcctcatcagtgaccgctgggtcctcaccgccgcccactgcctcctgtacccgccctgggacaagaacttcaccgagaatgaccttctggtgcgcattggcaagcactcccgcacaaggtacgagcgaaacattgaaaagatatccatgttggaaaagatctacatccaccccaggtacaactggcgggagaacctggaccgggacattgccctgatgaagctgaagaagcctgttgccttcagtgactacattcaccctgtgtgtctgcccgacagggagacggcagccagcttgctccaggctggatacaaggggcgggtgacaggctggggcaacctgaaggagacgtggacagccaacgttggtaaggggcagcccagtgtcctgcaggtggtgaacctgcccattgtggagcggccggtctgcaaggactccacccggatccgcatcactgacaacatgttctgtgctggttacaagcctgatgaagggaaacgaggggatgcctgtgaaggtgacagtgggggaccctttgtcatgaagagcccctttaacaaccgctggtatcaaatgggcatcgtctcatggggtgaaggctgtgaccgggatgggaaatatggcttctacacacatgtgttccgcctgaagaagtggatacagaaggtcattgatcagtttggagagtaggggccactcatattctgggctcctggaaccaatcccgtgaaagaattatttttgtgtttctaaaactatggttcccaataaaagtgactctcagcgg

SEQ ID NO: 1977 - DNA, 600 bp, Homo sapiens
cgccacggccgcctctgcttcatgctacgtgtgggtgacctccgcaagagcatgatcatcagcgccaccatccacatgcaggtggtacgcaagaccaccagccccgagggcgaggtggtgcccctccaccaggtggacatccccatggagaacggcgtgggtggcaacagcatcttcctggtggccccgctgatcatctaccatgtcattgatgccaacagcccactctacgacctggcacccagcgacctgcaccaccaccaggacctcgagatcatcgtcatcctggaaggcgtggtggaaaccacgggcatcaccacccaggcccgcacctcctacctggccgatgagatcctgtggggccagcgctttgtgcccattgtagctgaggaggacggacgttactctgtggactactccaagtttggcaacaccatcaaagtgcccacaccactctgcacggcccgccagcttgatgaggaccacagcctactggaagctctgaccctcgcctcagcccgcgggcccctgcgcaagcgcagcgtgcccatggccaaggccaagcccaagttcagcatctctccagattccctgtcctga

SEQ ID NO: 1978 - DNA, 600 bp, Homo sapiens; identical to SEQ ID NO: 1977

SEQ ID NO: 1979 - DNA, 600 bp, Homo sapiens
gaaaccacagccgatgacatcatcgactccctgtttgtcctctccctgcttggctccatcttcagcctgtctgtgattgctgcggaccgctacatcaccatcttccacgcactgcggtaccacagcatcgtgaccatgcgccgcactgtggtggtgcttacggtcatctggacgttctgcacggggactggcatcaccatggtgatcttctcccatcatgtgcccacagtgatcaccttcacgtcgctgttcccgctgatgctggtcttcatcctgtgcctctatgtgcacatgttcctgctggctcgatcccacaccaggaagatctccaccctccccagagccaacatgaaaggggccatcacactgaccatcctgctcggggtcttcatcttctgctgggccccctttgtgcttcatgtcctcttgatgacattctgcccaagtaacccctactgcgcctgctacatgtctctcttccaggtgaacggcatgttgatcatgtgcaatgccgtcattgaccccttcatatatgccttccggagcccagagctcagggacgcattcaaaaagatgatcttctgcagcaggtactggtag

SEQ ID NO: 1980 - DNA, 600 bp, Homo sapiens; identical to SEQ ID NO: 1979

SEQ ID NO: 1981 - DNA, 1400 bp, Homo sapiens
gatgcctcgctggggactgctgctgctgctctggggctcctgtacctttggtctcccgacagacaccaccacctttaaacggatcttcctcaagagaatgccctcaatccgagaaagcctgaaggaacgaggtgtggacatggccaggcttggtcccgagtggagccaacccatgaagaggctgacacttggcaacaccacctcctccgtgatcctcaccaactacatggacacccagtactatggcgagattgggatcgggaccccaccccaaaccttcaaagtcgtctttgacactggttcgtccaatgtttgggtgccctcctccaagtgcagccgtctctacactgcctgtgtgtatcacaagctcttcgatgcttcggattcctccagctacaagcacaatggaacagaactcaccctccgctattcaacagggacagtcagtggctttctcagccaggacatcatcaccgtgggtggaatcacggtgacacagatgtttggagaggtcacggagatgcccgccttacccttcatgctggccgagtttgatggggttgtgggcatgggcttcattgaacaggccattggcagggtcacccctatcttcgacaacatcatctcccaaggggtgctaaaagaggacgtcttctctttctactacaacagagattccgagaattcccaatcgctgggaggacagattgtgctgggaggcagcgacccccagcattacgaagggaatttccactatatcaacctcatcaagactggtgtctggcagattcaaatgaagggggtgtctgtggggtcatccaccttgctctgtgaagacggctgcctggcattggtagacaccggtgcatcctacatctcaggttctaccagctccatagagaagctcatggaggccttgggagccaagaagaggctgtttgattatgtcgtgaagtgtaacgagggccctacactccccgacatctctttccacctgggaggcaaagaatacacgctcaccagcgcggactatgtatttcaggaatcctacagtagtaaaaagctgtgcacactggccatccacgccatggatatcccgccacccactggacccacctgggccctgggggccaccttcatccgaaagttctacacagagtttgatcggcgtaacaaccgcattggcttcgccttggcccgctgaggccctctgccacccaggcaggccctgccttcagccctggcccagagctggaacactctctgagatgcccctctgcctgggcttatgccctcagatggagacattggatgtggagctcctgctggatgcgtgccctgacccctgcaccagcccttccctgctttgaggacaaagagaataaagacttcatgttcac

SEQ ID NO: 1982 - DNA, 600 bp, Homo sapiens
ccacctgctcttttgctctagcacctgggtcccagcatctagagcatggagcctctagaagccatgctcacccgcccacatttaattaacagctgagtccctgatgtcatccttactcgaagagcttagaaacaaagagtgggaaattccactgggcctaccttccttggggatgttcatgggccccagtttccagtttcccttgccagacaagcccatcttcagcagttgctagtccattctccattctggagaatctgctccaaaaagctggccacatctctgaggtgtcagaattaagctgcctcagtaactgctcccccttctccatataagcaaagccagaagctctagctttacccagctctgcctggagactaaggcaaattgggccattaaaagctcagctcctatgttggtattaacggtggtgggttttgttgctttcacactctatccacaggatagattgaaactgccagcttccacctgatccctgaccctgggatggctggattgagcaatgagcagagccaagcagcacagagtcccctggggctagaggtggaggaggcagtcctgggaatgggaaaaacccca

SEQ ID NO: 1983 - DNA, 600 bp, Homo sapiens
gtgatgacatgatgacgtgttacctgtttcacatgtacgtgggtgtccgggctggcggaggcattggggacgagatcgaggaccccgcgggtgacgaatacgagctctacagggtggtcttcgacatcaccttcttcttcttcgtcatcgtcatcctgttggccatcatccagggtctgatcatcgacgcttttggtgagctccgagaccaacaagagcaagtgaaggaggatatggagaccaagtgcttcatctgtggaatcggcagtgactactttgatacgacaccgcatggcttcgagactcacacgctggaggagcacaacctggccaattacatgtttttcctgatgtatttgataaacaaggatgagacagaacacacgggtcaggagtcttatgtctggaagatgtaccaagagagatgttgggatttcttcccagctggtgattgtttccgtaagcagtatgaggaccagcttagctgacacacccccagctggccctccacccccacctcaagtgccttattctcacagcaagccccttagtccccaagcccctccccctaaggcagctgggggagaggtgacctagtac

SEQ ID NO: 1984 - DNA, 1400 bp, Homo sapiens
aggatgagcatttagggcaaggagaccaccaacagccctcaggtcagggtgaggatggcctctgctaagctcaaggcgtgaggatgggaaggagggaggtattcgtaaggatgggaaggagggaggtattcgtgcagcatatgaggatgcagagtcagcagaactggggtggatttggtttggaagtgagggtcagagaggagtcagagagaatccctagtcttcaagcagattggagaaacccttgaaaagacatcaagcacagaaggaggaggaggaggtttaggtcaagaagaagatggattggtgtaaaaggatgggtctggtttgcagagcttgaacacagtctcacccagactccaggctgtctttcactgaatgcttctgacttcatagatttccttcccatcccagctgaaatactgaggggtctccaggaggagactagatttatgaatacacgaggtatgaggtctaggaacatacttcagctcacacatgagatctaggtgaggattgattacctagtagtcatttcatgggttgttgggaggattctatgaggcaaccacaggcagcatttagcacatactacacattcaataagcatcaaactcttagttactcattcagggatagcactgagcaaagcattgagcaaaggggtcccatataggtgagggaagcctgaaaaactaagatgctgcctgcccagtgcacacaagtgtaggtatcattttctgcatttaaccgtcaataggcaaaggggggaagggacatattcatttggaaataagctgccttgagccttaaaacccacaaaagtacaatttaccagcctccgtatttcagactgaatgggggtggggggggcgccttaggtacttattccagatgccttctccagacaaaccagaagcaacagaaaaaatcgtctctccctccctttgaaatgaatataccccttagtgtttgggtatattcatttcaaagggagagagagaggtttttttctgttctttctcatatgattgtgcacatacttgagactgttttgaatttgggggatggctaaaaccatcatagtacaggtaaggtgagggaatagtaagtggtgagaactactcagggaatgaaggtgtcagaataataagaggtgctactgactttctcagcctctgaatatgaacggtgagcattgtggctgtcagcaggaagcaacgaagggaaatgtctttccttttgctcttaagttgtggagagtgcaacagtagcataggaccctaccctctgggccaagtcaaagacattctgacatcttagtatttgcatattcttatgtatgtgaaagttacaaattgcttgaaagaaaatatgcatctaataaaaaacaccttcta

SEQ ID NO: 1985 - DNA, 600 bp, Homo sapiens
actcttttgagcagtaaatgtatattgatgtaactgtgtcaggattgaggatgaactcaggtttccggctactgacagtggtagagtcctaggacatctctgtaaaaagcaggtgactttcctatgacactcatcaggtaaactgatgctttcagatccatcggtttatactatttattaaaaccattctgcttggttccacaatcatctattgagtgtacatttatgtgtgaagcaaatttctagatatgagaaatataaaaataattaaaacaaaatccttgccttcaaacgaaatggctcggccaggcacggaggctcgtgcatgtaatcctagcactttgggaggctgagatgggaggatcacttgaggccaagagtttgagaccaacctgggtaacaaagtgagacctccctgtctctacaaaaaaaatcaaaaaattatctgatccttgtggcacacaactgtggtcccagctacaggggaggctgagacgcaaggatcacttgagcccagaagctcaaggctgcagtgagccaagttcacaccactgccatttcctcctgggcaacagagtgagaccctatcaccccgaattc

SEQ ID NO: 1986 - DNA, 600 bp, Homo sapiens; identical to SEQ ID NO: 1985

SEQ ID NO: 1987 - DNA, 1400 bp, Homo sapiens
tgtcttcaaagtctgatttgtgatgaggcagaggaagatatttctaatcggtcttgcccagaggatcacagtgctgagaccccccaccaccagccggtacctgggaagggggagagtgcaggcctgctcagggactgttcctgtctcagcaaccaagggattgttcctgtcaatcaatggtttattggaaggtggcccagtatgagccctagaagagtgtgaaaaggaatggcaatggtgttcaccatcggcagtgccagggcagcactcattcacttgataaatgaatatttattagctggttggagagctagaacctggagagctagaacctggagaactagaacctggagggctagaacctggagaggctagaaccaagaagggctagaacctggaggggctagaacctagagaagctaaaacctgagctagaagctggaggactagaacctggagggctggaatctgaagggctagaacctggagggctggaatctggagagctagaacctggagggctagaacctggagggctagaacctagaagggctagaacctggagggctggaatctggagagctagaacctggagggctagaacctggagggctagaacctagaagggctagaacctggagggctagaacctggcaggttagaacctagaagggctagaacctggagagccagaacctggagggctagaacctggaagggctagaacctgtagagctagaacatggagagctagaacccggcaggctagaacctggcaagctagaacctggagggaatgaacctggagggctagaacctggagaatgagaaaaatttacatggcaaagagcccataaatcctgaccaatccaactctgaattttaaagcaaaagcgtgaaaaaaaagattccctccttacccccaacccactcttttttcccaccacccactctcctctgcctcagtaagtatctggaggaagaaaacaggtgaaagaagaagtaaaaaccatttagtattagtattagaatgaagtcaaactgtgccacacatggtgaatgaaaaaaaaaaaaaagaggctgtgttttgtcacacagggcagtcattcagcaccagagcacgtgatggtctgagactctcttaggagcagagctctgccgcaatggccatgtggggatccacacctggtctgaggggcaactgagtctgcgggagaagagcggccctatgcatggtgtagatgccctgataaagaacatctgtcctgtgaaagactcaatgagctgttatgttgtaaacaggaagcatttcacatccaaacgagaaaatcatgtaaacatgtgtcttttctgtagagcataataaatggatgaggtttttgcaaaaaaaaaaaaaaaaa

SEQ ID NO: 1988 - DNA, 1400 bp, Homo sapiens
cgtcatcgtgttacctcctacacttcttcgtctgtcaatgtctcttccaacctctgaaaaccatcgatgaaggaatatctcttctcagaaggaaagaataaccaacaccctgaggttgtgtgtggaaggtgatctggctctggacaggcactatctgggttttggggggacgctataggatgtggggaagttaggaactggtgtcttcaggggccacaccaaccttctgaggagctgttgaggtacctccaaggaccggcctttgcacctccatggaaacgaagcaccatcattcccgttgaacgtcacatctttaacccactaactggctaattagcatggccacatctgagccccgaatctgacattagatgagagaacagggctgaagctgtgtcctcatgagggctggatgctctcgttgaccctcacaggagcatctcctcaactctgagtgttaagcgttgagccaccaagctggtggctctgtgtgctctgatccgagctcaggggggtggttttcccatctcaggtgtgttgcagtgtctgctggagacattgaggcaggcactgccaaaacatcaacctgccagctggccttgtgaggagctggaaacacatgttccccttgggggtggtggatgaacaaagagaaagagggtttggaagccagatctatgccacaagaaccccctttacccccatgaccaacatcgcagacacatgtgctggccacctgctgagccccaagtggaacgagacaagcagcccttagcccttcccctctgcagcttccaggctggcgtgcagcatcagcatccctagaaagccatgtgcagccaccagtccattgggcaggcagatgttcctaataaagcttctgttccgtgcttgtccctgtggaagtatcttggttgtgacagagtcaagggtgtgtgcagcattgttggctgttcctgcagtagaatgggggcagcacctcctaagaaggcacctctctgggttgaagggcagtgttccctggggctttaactcctgctagaacagtctcttgaggcacagaaactcctgttcatgcccatacccctggccaaggaagatccctttgtccacaagtaaaaggaaatcctcctccagggagtctcagcttcaccctgaggtgagcatcatcttctgggttaggccttgcctaggcatagcctgcctcaagctatgtgagctcaccagtccctccccaaatgctttccatgagttgcagttttttcctagtctgttttccctccttggagaacagggccctgtcggtttgttcactgtatgtccttggtgcctggagcctactaaatgctcaataaataatgatcacaggaatgaatgcatgctgaaaagaccactctttt

SEQ ID NO: 1989 - DNA, 1400 bp, Homo sapiens; identical to SEQ ID NO: 1988

SEQ ID NO: 1990 - DNA, 600 bp, Homo sapiens
gaaagctcatctcagctcctgaaaaatgcctcattaccttgtgctaatcctctttttctagtcttcataatttcttcactcaatctctgattctgtcaatgtcttgaaatcaagggccagctggaggtgaagaagagaatgtgacaggcacagatgaatgggagtgagggatagtggggtcagggctgagaggagaaggagggagacatgagcatggctgagcctggacaaagacaaaggtgagcaaagggctcacgcattcagccaggagatgatactggtccttagccccatctgccacgtgtatttaaccttgaagggttcaccaggtcagggagagtttgggaactgcaataacctgggagttttggtggagtccgatgattctcttttgcataagtgcatgacatatttttgctttattacagtttatctatggcacccatgcaccttacatttgaaatctatgaaatatcatgctccattgttcagatgcttcttaggccacatccccctgtctaaaaattcagaaaatttttgtttataaaagatgcattatctatgatatgctaatatatgtatatgcaatataaaatttag

SEQ ID NO: 1991 - DNA, 1400 bp, Homo sapiens
tgggggcatgggggaggctctgaagagatacccacagagtgtggtccctccactaggagttaactaccctacacctctgggccctgcaggaggcctgggagggcaagggtcctacggagggaccaggtgtctagaggcaacagtgttctgagcccccacctgcctgaccatcccatgagcagtccagcgcttcagggctgggcaggtcctggggaggctgagactgcagaggagccacctgggctgggagaaggtgcttgggcttctgcggtgaggcaggggagtctgcttgtcttagatgttggtggtgcagccccaggaccaagcttaaggagaggagagcatctgctctgagacggatggaaggagagaggttgaggatgcactggcctgttctgtaggagagactggccagaggcagctaaggggcaggaatcaaggagcctccgttcccacctctgaggactctggaccccaggccataccaggtgctagggtgcctgctctccttgccctgggccagcccaggattgtacgtgggagaggcagaaagggtaggttcagtaatcatttctgatgatttgctggagtgctggctccacgccctggggagtgagcttggtgcggtaggtgctggcctcaaacagccacgaggtggtagctctgagccctccttcttgccctgagctttccggggaggagcctggagtgtaattacctgtcatctgggccaccagctccactggcccccgttgccgggcctggactgtcctaggtgaccccatctctgctgcttctgggcctgatggagaggagaacactagacatgccaactcgggagcattctgcctgcctgggaacggggtggacgagggagtgtctgtaaggactcagtgttgactgtaggcgcccctggggtgggtttagcaggctgcagcaggcagaggaggagtacccccctgagagcatgtgggggaaggccttgctgtcatgtgaatccctcaatacccctagtatctggctgggttttcaggggctttggaagctctgttgcaggtgtccgggggtctaggactttagggatctgggatctggggaaggaccaacccatgccctgccaagcctggagcccctgtgttggggggcaaggtgggggagcctggagcccctgtgtgggagggcgaggcgggggagcctggagcccctgtgtgggagggcgaggcgggggatcctggagcccctgtgtcggggggcgagggaggggaggtggccgtcggttgaccttctgaacatgagtgtcaactccaggacttgcttccaagcccttccctctgttggaaattgggtgtgccctggctcccaagggaggcccatgtgactaataaaaaactgtgaaccct

SEQ ID NO: 1992 - DNA, 1400 bp, Homo sapiens; identical to SEQ ID NO: 1991

SEQ ID NO: 1993 - DNA, 1400 bp, Homo sapiens
gaggtccatgctgccaagtcactggccatcattgtggggctctttgccctctgctggctgcccctacacatcatcaactgcttcactttcttctgccccgactgcagccacgcccctctctggctcatgtacctggccatcgtcctctcccacaccaattcggttgtgaatcccttcatctacgcctaccgtatccgcgagttccgccagaccttccgcaagatcattcgcagccacgtcctgaggcagcaagaacctttcaaggcagctggcaccagtgcccgggtcttggcagctcatggcagtgacggagagcaggtcagcctccgtctcaacggccacccgccaggagtgtgggccaacggcagtgctccccaccctgagcggaggcccaatggctatgccctggggctggtgagtggagggagtgcccaagagtcccaggggaacacgggcctcccagacgtggagctccttagccatgagctcaagggagtgtgcccagagccccctggcctagatgaccccctggcccaggatggagcaggagtgtcctgatgattcatggagtttgccccttcctaagggaaggagatctttatctttctggttggcttgaccagtcacgttgggagaagagagagagtgccaggagaccctgagggcagccggttcctactttggactgagagaagggagccccaggctggagcagcatgaggcccagcaagaagggcttgggttctgaggaagcagatgtttcatgctgtgaggccttgcaccaggtgggggccacagcaccagcagcatctttgctgggcaggcccagccctccactgcagaagcatctggaagcaccaccttgtctccacagagcagcttgggcacagcagactggcctggccctgagactggggagtggctccaatagcctcctgccacccacacaccactctccctagactctcctagggttcaggagctgctgggcccagaggtgacatttgacttttttccaggaaaaatgtaagtgtgaggaaaccctttttattttattacctttcactctctggctgctgggtctgccgtcggtcctgctgctaacctggcaccagagcctctgcccggggagcctcaggcagtcctctcctgctgtcacagctgccatccacttctcagtcccagggccatctcttggagtgacaaagctgggatcaaggatagggagttgtaacagagcagtgccagagcatgggcccaggtcccaggggagaggttggggctggcaggccactggcatgtgctgagtagcgcagagctacccagtgagaggccttgtctaactgcctttccttctaaagggaatgtttttttctgagataaaataaaaacgagccaca

SEQ ID NO: 1994 - DNA, 1400 bp, Homo sapiens
tgctgctggagacacaggacgcgctgtacgtggcgctggagctggtcatcgccgcgctttcggtggcgggcaacgtgctggtgtgcgccgcggtgggcacggcgaacactctgcagacgcccaccaactacttcctggtgtccctggctgcggccgacgtggccgtggggctcttcgccatcccctttgccatcaccatcagcctgggcttctgcactgacttctacggctgcctcttcctcgcctgcttcgtgctggtgctcacgcagagctccatcttcagccttctggccgtggcagtcgacagatacctggccatctgtgtcccgctcaggtataaaagtttggtcacggggacccgagcaagaggggtcattgctgtcctctgggtccttgcctttggcatcggattgactccattcctggggtggaacagtaaagacagtgccaccaacaactgcacagaaccctgggatggaaccacgaatgaaagctgctgccttgtgaagtgtctctttgagaatgtggtccccatgagctacatggtatatttcaatttctttgggtgtgttctgcccccactgcttataatgctggtgatctacattaagatcttcctggtggcctgcaggcagcttcagcgcactgagctgatggaccactcgaggaccaccctccagcgggagatccatgcagccaagtcactggccatgattgtggggatttttgccctgtgctggttacctgtgcatgctgttaactgtgtcactcttttccagccagctcagggtaaaaataagcccaagtgggcaatgaatatggccattcttctgtcacatgccaattcagttgtcaatcccattgtctatgcttaccggaaccgagacttccgctacacttttcacaaaattatctccaggtatcttctctgccaagcagatgtcaagagtgggaatggtcaggctggggtacagcctgctctcggtgtgggcctatgatctaggctctcgcctcttccaggagaagatacaaatccacaagaaacaaagaggacacggctggttttcattgtgaaagatagctacacctcacaaggaaatggactgcctctcttgagcacttccctggagctaccacgtatctagctaatatgtatgtgtcagtagtaggctccaaggattgacaaatatatttatgatctattcagctgcttttactgtgtggattatgccaacagcttgaatggattctaacagactcttttgtttttaaaagtctgccttgtttatggtggaaaattactgaaactattttactgtgaaacagtgtgaactattataatgcaaatactttttaacttagaggcaatggaaaaataaaagttgactgtactaaaaatg

SEQ ID NO: 1995 - DNA, 1400 bp, Homo sapiens
cgccatagtgggcaacgtgctggtcatctgcgtggtcaagctgaaccccagcctgcagaccaccaccttctatttcattgtctctctagccctggctgacattgctgttggggtgctggtcatgcctttggccattgttgtcagcctgggcatcacaatccacttctacagctgcctttttatgacttgcctactgcttatctttacccacgcctccatcatgtccttgctggccatcgctgtggaccgatacttgcgggtcaagcttaccgtcagatacaagagggtcaccactcacagaagaatatggctggccctgggcctttgctggctggtgtcattcctggtgggattgacccccatgtttggctggaacatgaaactgacctcagagtaccacagaaatgtcaccttcctttcatgccaatttgtttccgtcatgagaatggactacatggtatacttcagcttcctcacctggattttcatccccctggttgtcatgtgcgccatctatcttgacatcttttacatcattcggaacaaactcagtctgaacttatctaactccaaagagacaggtgcattttatggacgggagttcaagacggctaagtccttgtttctggttcttttcttgtttgctctgtcatggctgcctttatctatcatcaactgcatcatctactttaatggtgaggtaccacagcttgtgctgtacatgggcatcctgctgtcccatgccaactccatgatgaaccctatcgtctatgcctataaaataaagaagttcaaggaaacctaccttttgatcctcaaagcctgtgtggtctgccatccctctgattctttggacacaagcattgagaagaattctgagtagttatccatcagagatgactctgtctcattgaccttcagattccccatcaacaaacacttgagggcctgtatgcctgggccaagggatttttacatccttgattacttccactgaggtgggagcatctccagtgctccccaattatatctcccccactccactactctcttcctccacttcatttttcctttgtcctttctctctaattcagtgttttggaggcctgacttggggacaacgtattattgatattattgtctgttttccttcttcccaatagaagaataagtcatggagcctgaagggtgcctagttgacttactgacaaaaggctctagttgggctgaacatgtgtgtggtggtgactcatttccatgccattgtggaattgagcagagaacctgctctcggaggatgcctagaagatgttgggaacagaagaaataaactgagtttaagggggacttaaactgctgaattcacctgtggatgtttttgagtaaataaaagctaatag

SEQ ID NO: 1996 - DNA, 600 bp, Homo sapiens
agcgccttccgcgagtggaggctgctggggccgttccggagacccacgacccagctgcgcgccaaagtctccagcctgtcgcacaagatccgcgccgggggcgcgcagcgcgcagaggcagcgtgcgcccagcgctcagaggtggaggctgtgtccctaggcgtcccacacgaggtggccgagggcgccacctgccaggcctacgaattggccgactacagcaacctacgggagaccgatatttaaggaccccagagctaggccgcggagtgtgctgggcttgggggtaagggggaccagagaggcgggctggtgttctaagagcccccgtgcaaatcggagacccggaaactgatcagggcagctgctctgtgacatccctgaggaactgggcagagcttgaggctggagcccttgaaaggtgaaaagtagtggggccccctgctggactcaggtgcccagaactcttttcttagaagggagaggctgcgggctccgtggggccttttgctcccaatccctatttgagaaacactgccccatcctccatgccctgaaccctgagtagacagccccaagcatggccaggaaggcctgccc

SEQ ID NO: 1997 - DNA, 600 bp, Homo sapiens; identical to SEQ ID NO: 1996

SEQ ID NO: 1998 - DNA, 600 bp, Homo sapiens
gaaggccttccaccgcgagctggtgcccgaccgcctcttcgtcttcttcaactggctgggctacgccaactcggccttcaaccccatcatctactgccgcagccccgacttccgcaaggccttccagggactgctctgctgcgcgcgcagggctgcccgccggcgccacgcgacccacggagaccggccgcgcgcctcgggctgtctggcccggcccggacccccgccatcgcccggggccgcctcggacgacgacgacgacgatgtcgtcggggccacgccgcccgcgcgcctgctggagccctgggccggctgcaacggcggggcggcggcggacagcgactcgagcctggacgagccgtgccgccccggcttcgcctcggaatccaaggtgtagggcccggcgcggggcgcggactccgggcacggcttcccaggggaacgaggagatctgtgtttacttaagaccgatagcaggtgaactcgaagcccacaatcctcgtctgaatcatccgaggcaaagagaaaagccacggaccgttgcacaaaaaggaaagtttgggaagggatgggagagtggcttgctgatgttccttgttg

SEQ ID NO: 1999 - DNA, 1400 bp, Homo sapiens
cgatagggctgggcctgaccaaaaatatactgggtttcctgtttccttttctgatcattcttacaagttatactcttatttggaaggccctaaagaaggcttatgaaattcagaagaacaaaccaagaaatgatgatatttttaagataattatggcaattgtgcttttctttttcttttcctggattccccaccaaatattcacttttctggatgtattgattcaactaggcatcatacgtgactgtagaattgcagatattgtggacacggccatgcctatcaccatttgtatagcttattttaacaattgcctgaatcctcttttttatggctttctggggaaaaaatttaaaagatattttctccagcttctaaaatatattcccccaaaagccaaatcccactcaaacctttcaacaaaaatgagcacgctttcctaccgcccctcagataatgtaagctcatccaccaagaagcctgcaccatgttttgaggttgagtgacatgttcgaaacctgtccataaagtaattttgtgaaagaaggagcaagagaacattcctctgcagcacttcactaccaaatgagcattagctacttttcagaattgaaggagaaaatgcattatgtggactgaaccgacttttctaaagctctgaacaaaagcttttctttccttttgcaacaagacaaagcaaagccacattttgcattagacagatgacggctgctcgaagaacaatgtcagaaactcgatgaatgtgttgatttgagaaattttactgacagaaatgcaatctccctagcctgcttttgtcctgttattttttatttccacataaaggtatttagaatatattaaatcgttagaggagcaacaggagatgagagttccagattgttctgtccagtttccaaagggcagtaaagttttcgtgccggttttcagctattagcaactgtgctacacttgcacctggtactgcacattttgtacaaagatatgctaagcagtagtcgtcaagttgcagatctttttgtgaaattcaacctgtgtcttataggtttacactgccaaaacaatgcccgtaagatggcttatttgtataatggtgttactaaagtcacatataaaagttaaactacttgtaaaggtgctgcactggtcccaagtagtagtgtcctcctagtatattagtttgatttaatatctgagaagtgtatatagtttgtggtaaaaagattatatatcataaagtatgccttcctgtttaaaaaaagtatatattctacacatatatatatatgtatatctatatctctaaactgctgttaattgattaaaatctggcaaagttatatttactttaaaataaaataattttattgcgggaattc

SEQ ID NO: 2000 - DNA, 1400 bp, Homo sapiens; identical to SEQ ID NO: 1999

SEQ ID NO: 2001 - DNA, 600 bp, Homo sapiens
tcatactcctatgctttagcttatttttacagttatagaaagcaagatgtactataacatagaattgcaatctataatatttgtgtgttcactaaactctgaataagcactttttaaaaaactttctactcattttaatgattgtttaaaggtttctattttctctgatacttttttgaaatcagtaaacactgtgtattgttgtaaaatgtaaaggtcacttttcacatccttgactttttagatgtgctgctttgatatataggacattgatttgatttttattattaatgctttggttctgggttgtttcctaaaatatctgggtggcttaaaaaaaactctttaacttgtaataaacccttaactggcataggaaatggtatccagaatggaattttgctacatggggtctgggtgggggcaaagagacccagtcaattacatgtttggtaccaagaaaggaacctgtcagggcagtacaatgtgactttgaaaatatataccgtgggggtagttttaccctatatctataaacactgtttgttccagaatctgtatgattctatggagctattttaaaccaattgcaggtctaga

SEQ ID NO: 2002 - DNA, 600 bp, Homo sapiens
cataagtaagacttgattggtttaaaagtcacataaaatgcggcactatttctgaacaaagagagctcatcatcagtcttaatattcagagaaaacttcagagaaattatgttttcatccattaaaattaatttgtgcatcagaaaatgcagccttaaacagtgtccaggagatgggatggtacctcctaggagtacaagtgcctggggtgtaatgagctcctgctcattgtggccagtttagagttctattagaagctatcaatcaccttgcatttcaaaatggtaactttacaactggcagtggcctccttttggttcctcacatattattggtcaagaaaagcatgaaaactgagatgctgaaggtgagaggaaatgttgactggccaaaaatatcttttttcccccactgcaaggttgttttaaagtcagatttgtataaggaaagccaaattttattaaaagagtagaaaaggattgcttaaggtactctggactttctcttggacattgtaaacgtattttgatcagtattacaagggtatcctgtgctatgctggacattaacaagatcattatcttcatgtttggggaattc

SEQ ID NO: 2003 - DNA, 600 bp, Homo sapiens; identical to SEQ ID NO: 2002

SEQ ID NO: 2004 - DNA, 600 bp, Homo sapiens
ctcagcctaaccctcagtgggaggcccaggcctgaagagtcaccaagggacttggagctggcagatggggaaggcaccgctgagaccatcatcttttaggaaagactcgctggggtctggtactgcccccaggactagtggaggttctctgcccacctcaggcactggaaatgagagctgggagggtaagggttggagttagaggaggccctgtctgaagcagagccaaaaggccagaatgggtcccctaccctggtgtcacagctgcccctagtgtgagggctgcctcataagctcccaatctcagacactggcagtcagggagaatcaaactgcctgtctccctggtcctgccatattcatagggtgtccatgcacacatggtgtcccagatctaggcaggcctaggatggtgctgtctaggggtccacgggtggcaggaattcagaggctggccttgtgccctggctacctgtctccattctaacctgactggcacatctcagcctaaccaggagaggggagaagtgaaaaaccgtgaggaggactctatttggatcctggatttgttgttgttgttgttgttgttgttagagagaa

SEQ ID NO: 2005 - DNA, 600 bp, Homo sapiens
gctcatctgggttgtggggggcctcttgagcatccccacattcctgctgcgatccatccaagccgtcccagatctgaacatcaccgcctgcatcctgctcctcccccatgaggcctggcactttgcaaggattgtggagttaaatattctgggtttcctcctaccactggctgcgatcgtcttcttcaactaccacatcctggcctccctgcgaacgcgggaggaggtcagcaggacaagagtgcgggggccgaaggatagcaagaccacagcgctgatcctcacgctcgtggttgccttcctggtctgctgggccccttaccacttctttgccttcctggaattcttattccaggtgcaagcagtccgaggctgcttttgggaggacttcattgacctgggcctgcaattggccaacttctttgccttcactaacagctccctgaatccagtaatttatgtctttgtgggccggctcttcaggaccaaggtctgggaactttataaacaatgcacccctaaaagtcttgctccaatatcttcatcccataggaaagaaatcttccaacttttctggcggaattaaaacagcattgaacc

SEQ ID NO: 2006 - DNA, 600 bp, Homo sapiens; identical to SEQ ID NO: 2005

SEQ ID NO: 2007 - DNA, 600 bp, Homo sapiens
gcggcttgagggggtcgagtccagtgagaaactcaacagcagcttcccatccatccactgcggctcctgggctgagaccacccccggtggcgggggcagcagcgccgcccggagagtccggcccgtctccctcatggtgcccagccaggctggggccccagggaggcagttccacggcagtgccagcagcctggtggaagcggtcttgatttcagaaggactggggcagtttgctcaagatcccaagttcatcgaggtcaccacccaggagctggccgacgcctgcgacatgaccatagaggagatggagagcgcggccgacaacatcctcagcgggggcgccccacagagccccaatggcgccctcttaccctttgtgaactgcagggacgcggggcaggaccgagccgggggcgaggaggacgcgggctgtgtgcgcgcgcggggtgcaccgagtgaggaggagctccaggacagcagggtctacgtcagcagcctgtagtgggcgctgccagatgcgggcttttttttttttatttgtttcaatgttcctaatgggttcgtttcagaagtgcctcactgttctcgtgacctggagtt

SEQ ID NO: 2008 - DNA, 600 bp, Homo sapiens
acgaagagccagaccctgggagggatgaggaggacctggcggatgaaatgatatgcatcaccaccttgtagcccccagcgaggggcagactggctctggcctcaggtggggcgcaggagagccaggggaaaagtgcctcatagttaggaaagtttaggcactagttgggagtaatattcaattaattagacttttgtataagagatgtcatgcctcaagaaagccataaacctggtaggaacaggtcccaagcggttgagcctggcagagtaccatgcgctcggccccagctgcaggaaacagcaggccccgccctctcacagaggatgggtgaggaggccagacctgccctgccccattgtccagatgggcactgctgtggagtctgcttctcccatgtaccagggcaccaggcccacccaactgaaggcatggcggcggggtgcaggggaaagttaaaggtgatgacgatcatcacacctcgtgtcgttacctcagccatcggtctagcatatcagtcactgggcccaacatatccatttttaaaccctttcccccaaatacactgcgtcctggttcctgtttagctgttctgaaata

SEQ ID NO: 2009 - DNA, 600 bp, Homo sapiens; identical to SEQ ID NO: 2008

SEQ ID NO: 2010 - DNA, 600 bp, Homo sapiens
ccaagaagaagtcgtcggcagctcccacccgtcccgccaaagccccggcccctcctttcctacagctccctgattcgacacgcgggcagcatctctccacctgctgatggaagcgaggagggctccccgctgacctcccaagctctggagagcaacaatgcttggctgaccgagtcttccaactctccgcacccccagcagaggcaacatgcctccccacagcgctacatctccgagccctacttggccctgcacgaagactcccacgcctcagactgtgttgaggaggagacgctcactttcgaagcagccgtggctactagcctgggccgttccaacaccatcggctcagccccacccctgcggcatagctggcagatgcccaacgggcactatcggcggcggaggcgcggggggcctgggccaggcatgatgtgtggggctgtcaacaacctgctaagtgacacggaagaagatgacaaatgctagaggctgctcccccctccgatgcatgctcttctctcacatggagaaaaccaagacagaattgggaagccagtgcggccccgcggggaggaagagggaaaaggaagatggaag

SEQ ID NO: 2011 - DNA, 600 bp, Homo sapiens; identical to SEQ ID NO: 2010

SEQ ID NO: 2012 - DNA, 600 bp, Homo sapiens
ggatgctgacaccatcaatcacccagcccagctgtccaagacctcgctggcccccatcattgtttacatcaagatcacctctcccaaggtacttcaaaggctcatcaagtcccgaggaaagtctcagtccaaacacctcaatgtccaaatagcggcctcggaaaagctggcacagtgcccccctgaaatgtttgacatcatcctggatgagaaccaattggaggatgcctgcgagcatctggcggagtacttggaagcctattggaaggccacacacccgcccagcagcacgccacccaatccgctgctgaaccgcaccatggctaccgcagccctgcgccgtagccctgcccctgtctccaacctccaggtacaggtgctcacctcgctcaggagaaacctcggcttctggggcgggctggagtcctcacagcggggcagtgtggtgccccaggagcaggaacatgccatgtagtgggcgccctgcccgtcttccctcctgctctggggtcggaactggagtgcagggaacatggaggaggaagggaagagctttattttgtaaaaaaataagatgagcggcaaaaaaaaaaaaaaaaa

SEQ ID NO: 2013 - DNA, 600 bp, Homo sapiens; identical to SEQ ID NO: 2012

SEQ ID NO: 2014 - DNA, 600 bp, Homo sapiens
aacagcatccccaaaacaaaaagtctttggggtctacactgcaatcatatgtgatctgtcttgtaatattttgtattattgctgttgcttgaatagcaatagcatggatagagtattgagatactttttcttttgtaagtgctacataaattggcctggtatggctgcagtcctccggttgcatactggactcttcaaaaactgttttgggtagctgccacttgaacaaaatctgttgccacccaggtgatgttagtgttttaagaaatgtagttgatgtatccaacaagccagaatcagcacagataaaaagtggaatttcttgtttctccagatttttaatacgttaatacgcaggcatctgatttgcatattcattcatggaccactgtttcttgcttgtacctctggctgactaaatttggggacagattcagtcttgccttacacaaaggggatcataaagttagaatctattttctatgtactagtactgtgtactgtatagacagtttgtaaatgttatttctgcaaacaaacacctccttattatatataatatatatatatatatcagtttgatcacactattttagagtc

SEQ ID NO: 2015 - DNA, 600 bp, Homo sapiens; identical to SEQ ID NO: 2014

SEQ ID NO: 2016 - DNA, 600 bp, Homo sapiens
gatgcatgtgaacatctaggggagtacctggaggcgtactggcgtgccacccacacaaccagtagcacacccatgaccccgctgctgggaaggaatttgggctccacggcactctcaccatatcccacagcaatttctgggttacagagtcagcgaatgaggcacagcaaccactccacagagaactctccaattgaaagacgaagtctaatgacctctgatgaaaattatcacaatgaaagggctcggaagagtaggaaccgcttgtcttccagttctcagcatagccgagatcattaccctcttgtggaagaagattaccctgactcataccaggacacttacaaaccccataggaaccgaggatcacctgggggatatagccatgactcccgacataggctttgagtctaatgaaacaaaaaatattcatctgttgacaatttgccatagcagtgctaggataaaccaatcatcttaacttggctaacatagcacagtatttactgtgctaatgggctgctgtcattttatgctaagtaaggggcaaaaaaaaaaattacattatgcccttgagtctagatggatattagatgcccg

SEQ ID NO: 2017 - DNA, 600 bp, Homo sapiens
atccgcatgctcatcgtcatcgtggtcctcttcttcctgtgctggatgcccatcttcagcgccaacgcctggcgggcctacgacaccgcctccgcagagcgccgcctctcaggaacccccatttccttcatcctcctcctgtcctacacctcctcctgcgtcaaccccatcatctactgcttcatgaacaaacgcttccgcctcggcttcatggccaccttcccctgctgccccaatcctggtcccccaggggcgaggggagaggtgggggaggaggaggaaggcgggaccacaggagcctctctgtccaggttctcgtacagccatatgagtgcctcggtgccaccccagtgagatgtcccctgaccctccaccgcagaaggaaggcagggaggaggcagagaagaaagaacggaagaagagatcaggaagagaaggagcagagcagagctgatggagaaggaaggctccatctccagtgggaactcttcaaggtctcttttcatccttcatctgattccagagcactgctccagtggggccatgattggtttctaggcagttcaaagcaggatatgttaagtaacactcaaccatcag

SEQ ID NO: 2018 - DNA, 600 bp, Homo sapiens; identical to SEQ ID NO: 2017

SEQ ID NO: 2019 - DNA, 1400 bp, Homo sapiens
cgtgtacactgtcgtgcaaccagtggggcctcgtgtgctgcagtgcgtgcatcgctggcccagtgcgcgggtccgccagacctggtccgtactgctgcttctgctcttgttcttcatcccgggtgtggttatggccgtggcctacgggcttatctctcgcgagctctacttagggcttcgctttgacggcgacagtgacagcgacagccaaagcagggtccgaaaccaaggcgggctgccaggggctgttcaccagaacgggcgttgccggcctgagactggcgcggttggcgaagacagcgatggctgctacgtgcaacttccacgttcccggcctgccctggagctgacggcgctgacggctccagggccgggatccggctcccggcccacccaggccaagctgctggctaagaagcgcgtggtgcgaatgttgctggtgatcgttgtgcttttttttctgtgttggttgccagtttatagtgccaacacgtggcgcgcctttgatggcccgggtgcacaccgagcactctcgggtgctcctatctccttcattcacttgctgagctacgcctcggcctgtgtcaaccccctggtctactgcttcatgcaccgtcgctttcgccaggcctgcctggaaacttgcgctcgctgctgcccccggcctccacgagctcgccccagggctcttcccgatgaggaccctcccactccctccattgcttcgctgtccaggcttagctacaccaccatcagcacactgggccctggctgaggagtagaggggccgtgggggttgaggcagggcaaatgacatgcactgacccttccagacatagaaaacacaaaccacaactgacacaggaaaccaacacccaaagcatggactaaccccaacgacaggaaaaggtagcttacctgacacaagaggaataagaatggagcagtacatgggaaaggaggcatgcctctgatatgggactgagcctggcccatagaaacatgacactgaccttggagagacacagcgtccctagcagtgaactatttctacacagtgggaactctgacaagggctgacctgcctctcacacacatagattaatggcactgattgttttagagactatggagcctggcacaggactgactctgggatgctcctagtttgacctcacagtgacccttcccaatcagcactgaaaataccatcaggcctaatctcatacctctgaccaacaggctgttctgcactgaaaaggttcttcatccctttccagttaaggaccgtggccctgccctctccttccttcccaaactgttcaagaaataataaattgtttggcttcctcctgaaaaaaaaaaaaaaaaaaaaaaaaaaaaaaaaaaaaaggaattcc

SEQ ID NO: 2020 - DNA, 600 bp, Homo sapiens
gatcctgtgactgaaaactgtgttcagggagaggagaaggagagctccaatgactccacctcagtcagtgctgttgcctctaatatgagagatgatgaaataacccaggatgaaaacacagtttccacttccctgggccattccaaagatgagaactctaagcaaacatgcatcagaattggcaccaagaccccaaaaagtgactcatgtaccccaactaataccaccgtggaggtagtggggtcttcaggtcagaatggagatgaaaagcagaatattgtagcccgcaagattgtgaagatgactaagcagcctgcaaaaaagaagcctcctccttcccgggaaaagaaagtcaccaggacaatcttggctattctgttggctttcatcatcacttgggccccatacaatgtcatggtgctcattaacaccttttgtgcaccttgcatccccaacactgtgtggacaattggttactggctttgttacatcaacagcactatcaaccctgcctgctatgcactttgcaatgccaccttcaagaagacctttaaacaccttctcatgtgtcattataagaacataggcgctacaaggtaa

SEQ ID NO: 2021 - DNA, 600 bp, Homo sapiens
cctgaggaggagctggggatggtggacttggagaggaaagccgacaagctgcaggcccagaagagcgtggacgatggaggcagttttccaaaaagcttctccaagcttcccatccagctagagtcagccgtggacacagctaagacttctgacgtcaactcctcagtgggtaagagcacggccactctacctctgtccttcaaggaagccactctggccaagaggtttgctctgaagaccagaagtcagatcactaagcggaaaaggatgtccctggtcaaggagaagaaagcggcccagaccctcagtgcgatcttgcttgccttcatcatcacttggaccccatacaacatcatggttctggtgaacaccttttgtgacagctgcatacccaaaaccttttggaatctgggctactggctgtgctacatcaacagcaccgtgaaccccgtgtgctatgctctgtgcaacaaaacattcagaaccactttcaagatgctgctgctgtgccagtgtgacaaaaaaaagaggcgcaagcagcagtaccagcagagacagtcggtcatttttcacaagcgcgcacccgagcaggccttgtag

SEQ ID NO: 2022 - DNA, 600 bp, Homo sapiens
ccaccgccaccgcgccccgtggctgataaggacacttccaatgagtccagctcaggcagtgccacccagaacaccaaggaacgcccagccacagagctgtccaccacagaggccaccactcccgccatgcccgcccctcccctgcagccgcgggccctcaacccagcctccagatggtccaagatccagattgtgacgaagcagacaggcaatgagtgtgtgacagccattgagattgtgcctgccacgccggctggcatgcgccctgcggccaacgtggcccgcaagttcgccagcatcgctcgcaaccaggtgcgcaagaagcggcagatggcggcccgggagcgcaaagtgacacgaacgatctttgccattctgctagccttcatcctcacctggacgccctacaacgtcatggtcctggtgaacaccttctgccagagctgcatccctgacacggtgtggtccattggctactggctctgctacgtcaacagcaccatcaaccctgcctgctatgctctgtgcaacgccacctttaaaaagaccttccggcacctgctgctgtgccagtatcggaacatcggcactgccaggtag

SEQ ID NO: 2023 - DNA, 600 bp, Homo sapiens
tcctctggctgtttatcatcgtctgcttcctggggaccatcggcctctttctgcctccgttcctagctggaatgatctgactgcacctccctcgagctggctcccagggcaaaggggagggttcttggatgtggaagggctttgaacaatgtttagatttggagatgagcccaaagtgccagggagaacagccaggtgaggtgggaggttggagagccaggtgaggtctctctaagtcaggctggggttgaagtttggagtctgtccgagtttgcagggtgctgagctgtatggtccagcaggggagtaataagggctcttccggaaggggaggaagcgggaggcaggcctgcacctgatgtggaggtacaggcagatcttccctaccggggagggatggatggttggatacaggtggctgggctattccatccatctggaagcacatttgagcctccaggcttctccttgacgtcattcctctccttccttgctgcaaaatggctctgcaccagccggcccccaggaggtctggcagagctgagagccatggcctgcaggggctccatatgtccctacgcgtgcagcaggcaaacaaga

SEQ ID NO: 2024 - DNA, 600 bp, Homo sapiens; identical to SEQ ID NO: 2023

SEQ ID NO: 2025 - DNA, 600 bp, Homo sapiens
ctccacctgggagatgctgggaccctcggggcaggaagtccctgagaagcctcatgggagtcagggagccctggggtttccacacaggcccatgccctccgtcctggcagggcaggcagagctcagcacagcctcacccctgcaggcggtatccagaggtgagggaggcctgaaatgtttccaggcatgaccctggagcccggcagtgcaccccctaaagatggcgcacccggcagccccccattgtccccaggggcacacttcccccttgggatgggcacagcctgccccacccctccatgattccaagggccaagaggggcggggccaggatggcttttcccctgcctgtgagtgacatcggttcaggaggagacagtcaggaagcctcctgctgagtggtccacattctgctgcccccagaccccatccagccaggggtggggatggggttgggctctgcgtcccactgagtctcattcctctgtccccgagccgagctctcctgggccagggtctcgtcaggaggtgcctgagagcagaatgaataattgaggttaggaacccggcatgccgagtgccccagaaatgccgctgtgt

SEQ ID NO: 2026 - DNA, 600 bp, Homo sapiens
ggtccgtcagatcttcattcacaaacttccgctgtacctgcgtctaaaaaggcccaaacccgagagagacctgatgccggagccccctcactgttcttctccaggaagtggctggggtcggggaacagatgaatatttcatccggaagccgccaagtgattttctcttccccaaacccaataggttccagcctgaactgtctgcccctgatctgcggcgatttatcgatggtccaaaccgggctgtggccctgcttccggagctacgggaggtcgtctcctctatcagctacatcgctcgacagctgcaggaacaggaggaccacgatgcgctgaaggaggactggcagtttgtggccatggtagtggaccgcctcttcctgtggactttcatcatcttcaccagcgttgggaccctagtcatcttcctggacgccacgtaccacttgccccctccagacccctttccttgaagactggagggttgagaccaggccccctgccagttgaagtgagagagtttggtgatactgtcaagccctatccttctctgcctcttaactccttcacgaggaatctgggcctcttatttcgttctggg

SEQ ID NO: 2027 - DNA, 600 bp, Homo sapiens
gtgagctaccaggaagaggggcgctgcccccacagatccatccttttgcttcatctggagtccctcctcccccacgcctccatccacacacagcagctccaacctggaggctggaccaactgctttgttttggctgctctccatctcttgtaccagcccaggcaatagtgttgaggaggggagcaaggctgctaagtggaagacagagatggcagagccatccaccctgaggagtgacgggcaaggggccaggaaggggacaggattgtctgctgcctccaagtcatgggagaagaggggtataggacaaggggtggaagggcaggagctcacaccgcaccgggctggcctgacacaatggtagctctgaagggaggggaagagagaggcctgggtgtgacctgacacctgccgctgcttgagtggacagcagctggactgggtgggccccacagtggtcagcgattcctgccaagtagggtttagccgggccccatggtcacagacccctgggggaggcttccagctcagtcccacagccccttgcttctaagggatccagagacctgctccagatcctctttccccactgaagaattc

SEQ ID NO: 2028 - DNA, 600 bp, Homo sapiens
tccaaagtcattcctctcattggagagtacctgctgttcatcatgatttttgtgaccctgtccatcattgttaccgtgtttgtcattaacgttcaccacagatcttcttccacgtaccaccccatggccccctgggttaagaggctctttctgcagaaacttccaaaattactttgcatgaaagatcatgtggatcgctactcatccccagagaaagaggagagtcaaccagtagtgaaaggcaaagtcctcgaaaaaaagaaacagaaacagcttagtgatggagaaaaagttctagttgcttttttggaaaaagctgctgattccattagatacatttcgagacatgtgaagaaagaacattttatcagccaggtagtacaagactggaaatttgtagctcaagttcttgaccgaatcttcctgtggctctttctgatagtgtcagtaacaggctcggttctgatttttacccctgctttgaagatgtggctacatagttaccattaggaatttaaaagacataagactaaattacaccttagacctgacatctggctatcacacagacagaatccaaatgcatgtgcttgttctacg

SEQ ID NO: 2029 - DNA, 600 bp, Homo sapiens
tccctgggatacatctccaaggccgaggagtacttcctgctcaagtcccgcagtgacctcatgttcgagaagcagtcagagcggcatgggctggccaggcgcctcaccactgcacgccggcccccagcaagctctgagcaggcccagcaggaactcttcaatgagctgaagccagctgtggatggggcaaacttcattgttaaccacatgagggaccagaacaattacaatgaggagaaagacagctggaaccgagtggcccgcacagtggaccgcctctgcctgtttgtggtgacgcctgtcatggtggtgggcacagcctggatcttcctgcagggcgtttacaaccagccaccaccccagccttttcctggggacccctactcctacaacgtgcaggacaagcgcttcatctagggtgggcctgttggggagccaggagacagcagggtctgagagaggagccacagtccctaatgacacccactcctagccctgaggctcgtgcccctcagactggggaagagtccaaggaagggagggagcagccactcctcaatgctcaatggctcccctgaaatcaagacaggggccacccga

SEQ ID NO: 2030 - DNA, 600 bp, Homo sapiens; identical to SEQ ID NO: 2029

SEQ ID NO: 2031 - DNA, 600 bp, Homo sapiens
ccttcgccgccttctggctgccctaccacgtggtgaacctggctgaggcgggccgcgcgctggccggccaggccgccgggttagggctcgtggggaagcggctgagcctggcccgcaacgtgctcatcgcactcgccttcctgagcagcagcgtgaaccccgtgctgtacgcgtgcgccggcggcggcctgctgcgctcggcgggcgtgggcttcgtcgccaagctgctggagggcacgggttccgaggcgtccagcacgcgccgcgggggcagcctgggccagaccgctaggagcggccccgccgctctggagcccggcccttccgagagcctcactgcctccagccctctcaagttaaacgaactgaactaggcctggtggaaggaggcgcactttcctcctggcagaatgctagctctgagccagttcagtacctggaggaggagcaggggcgtggagggcgtggagggcgtgggagcgtgggaggcgggagtggagtggaagaagagggagagatggagcaaagtgagggccgagtgagagcgtgctccagcctggctcccacaggcagctttaaccattaaaactgaagtctgaa

SEQ ID NO: 2032 - DNA, 600 bp, Homo sapiens; identical to SEQ ID NO: 2031

SEQ ID NO: 2033 - DNA, 600 bp, Homo sapiens
catccagttccagttccacgaggcactgtgccaggcagctggccacacgggccccctgcacaagtgtgacatctaccagtccaaggaggccgggcagcgcctggcgaccgccatgaagctgggcttcagtaggccgtggccggaagccatgcagctgatcacgggccagcccaacatgagcgcctcggccatgttgagctacttcaagccgctgctggactggctccgcacggagaacgagctgcatggggagaagctgggctggccgcagtacaactggacgccgaactccgctcgctcagaagggcccctcccagacagcggccgcgtcagcttcctgggcctggacctggatgcgcagcaggcccgcgtgggccagtggctgctgctcttcctgggcatcgccctgctggtagccaccctgggcctcagccagcggctcttcagcatccgccaccgcagcctccaccggcactcccacgggccccagttcggctccgaggtggagctgagacactcctgaggtgacccggctgggtcggccctgcccaagggcctcccaccagagactgggatgggaacactggtgggcagctgagg

SEQ ID NO: 2034 - DNA, 1400 bp, Homo sapiens
aacccggacctccctcaagaccatgagccgtaggaagctctcccagcagaaggagaagaaagccactcagatgctcgccattgttctcggcgtgttcatcatctgctggctgcccttcttcatcacacacatcctgaacatacactgtgactgcaacatcccgcctgtcctgtacagcgccttcacgtggctgggctatgtcaacagcgccgtgaaccccatcatctacaccaccttcaacattgagttccgcaaggccttcctgaagatcctccactgctgactctgctgcctgcccgcacagcagcctgcttcccacctccctgcccaggccggccagcctcacccttgcgaaccgtgagcaggaaggcctgggtggatcggcctcctcttcttagccccggcaggccctgcagtgttcgcttggctccatgctcctcactgcccgcacaccctcactctgccagggcagtgctagtgagctgggcatggtaccagccctggggctggccccagctcaggggcagctcatagagtcccccctcccacctccagtccccctatccttggcaccaaagatgcagccgccttccttgaccttcctctggggctctagggttgctggagcctgagtcagggcccagaggctgagttttctctttgtggggcttggcgtggagcaggcggtggggagagatggacagttcacaccctgcaaggcccacaggaggcaagcaagctctcttgccgaggagccaggcaacttcagtcctgggagacccatgtaaataccagactgcaggttggacccgagagattcccaagccaaaaaccttagctccctcccgcaccccgatgtggacctctactttccaggctagtccggacccacctcaccccgttacagctccccaagtggtttccacatgctctgagaagaggagccctcatcttgaagggcccaggagggtctatggggagaggaactccttggcctagcccaccctgctgccttctgacggccctgcaatgtatcccttctcacagcacatgctggccagcctggggcctggcagggaggtcaggccctggaactctatctgggcctgggctagggacatcagaggttctttgagggactgcctctgccacactctgacgcaaaaccactttccttttctattccttctggcctttcctctctcctgtttcccttcccttccactgcctctgccttagaggagcccacggctaagaggctgctgaaaaccatctggcctggcctggccctgccctgaggaaggaggggaagctgcagcttgggagagcccctggggcctagactctgtaacatcactatccgatgcaccaaactaataaaactttgacgagtcaccttc

SEQ ID NO: 2035 - DNA, 1400 bp, Homo sapiens; identical to SEQ ID NO: 2034

SEQ ID NO: 2036 - DNA, 600 bp, Homo sapiens
ggagtgactgtccttgtctatgccagaatctatgtggtgctgaaacaaaggagacggaaaaggatcctcactcgacagaacagtcagtgcaacagtgtcaggcctggcttcccccaacaaaccctctctcctgacccggcacatctggagctgaagcgttactacagcatctgccaggacactgccttgggtggaccaggcttccaagaaagaggaggagagttgaaaagagaggagaagactcggaattccctgagtcccaccatagcgcccaagctcagcttagaagttcgaaaactcagcaatggcagattatcgacatctttgaagctggggcccctgcaacctcggggagtgccacttcgggagaagaaggcaacccaaatggtggccattgtgcttggggccttcattgtctgctggctgcccttcttcttgacccatgttctcaatacccactgccagacatgccacgtgtccccagagctttacagtgccacgacatggctgggctacgtgaatagcgccctcaaccctgtgatctataccaccttcaatatcgagttccggaaagccttcctcaagatcctgtcttgctga

SEQ ID NO: 2037 - DNA, 600 bp, Homo sapiens; identical to SEQ ID NO: 2036

SEQ ID NO: 2038 - DNA, 600 bp, Homo sapiens
caacagctatggattggtttattgccgtgtgctatgcctttgtgttctcagctctgattgagtttgccacagtaaactatttcactaagagaggttatgcatgggatggcaaaagtgtggttccagaaaagccaaagaaagtaaaggatcctcttattaagaaaaacaacacttacgctccaacagcaaccagctacacccctaatttggccaggggcgacccgggcttagccaccattgctaaaagtgcaaccatagaacctaaagaggtcaagcccgaaacaaaaccaccagaacccaagaaaacctttaacagtgtcagcaaaattgaccgactgtcaagaatagccttcccgctgctatttggaatctttaacttagtctactgggctacgtatttaaacagagagcctcagctaaaagcccccacaccacatcaatagatcttttactcacattctgttgttcagttcctctgcactgggaatttatttatgttctcaacgcagtaattcccatctgcctttattgcctctgtcttaaagaatttgaaagtttccttattttcataattcatttaagacaagagacccctgtctg

SEQ ID NO: 2039 - DNA, 600 bp, Homo sapiens; identical to SEQ ID NO: 2038

SEQ ID NO: 2040 - DNA, 600 bp, Homo sapiens
tgaccaccttgagtatcagtgccagaaattccttacctaaagtggcatatgcgacggccatggactggttcatagccgtctgttatgcctttgtattttctgcactgattgaatttgccactgtcaactatttcaccaagcggagttgggcttgggaaggcaagaaggtgccagaggccctggagatgaagaagaaaacaccagcagccccagcaaagaaaaccagcactaccttcaacatcgtggggaccacctatcccatcaacctggccaaggacactgaattttccaccatctccaagggcgctgctcccagtgcctcctcaaccccaacaatcattgcttcacccaaggccacctacgtgcaggacagcccgactgagaccaagacctacaacagtgtcagcaaggttgacaaaatttcccgcatcatctttcctgtgctctttgccatattcaatctggtctattgggccacatatgtcaaccgggagtcagctatcaagggcatgatccgcaaacagtagatagtggcagtgcagcaaccagagcactgtataccccgtgaagcatccaggcacccaaaccccggggctcccc

SEQ ID NO: 2041 - DNA, 600 bp, Homo sapiens
tcaaagccccctcaggaagttcccgctgctccagtgcagagagagaagcatcctgaagcccctctgcaggatacaaatgccaatttgaacatgagaaaaagaacaaatgctttggttcactctgaatctgatgttggcaacagaactgaggtgggaaaccattcaagcaaatcttccacagttgttcaagaatcttctaaaggcacacctcggtcttacttagcttccagtccaaacccattcagccgtgcaaatgcagctgaaaccatatctgcagcaagagcacttccatctgcttctcctacttctatccgaactggacatatgcctcgaaaggcttcagttggatctgcttctactcgtcacgtgtttggatcaagactgcagaggataaagaccacagttaataccataggggctactgggaagttgtcagctactcctcctccatcggctccaccaccttctggatctggcacaagtaaaatagacaaatatgcccgtattctctttccagtcacatttggggcatttaacatggtttattgggttgtttatttatctaaggacactatggagaaatcagaaagtctaatgtaa

SEQ ID NO: 2042 - DNA, 600 bp, Homo sapiens; identical to SEQ ID NO: 2041

SEQ ID NO: 2043 - DNA, 600 bp, Homo sapiens
acagccatacttccagcgaaatggtaccaaggagaggttttgctcacagggactctccatatgtgagcactatctttcaggaaatttttgcatgtttaataatatgtacaaataatattgccttgatgtttctatatgtaacttcagatgtttccaagatgtcccattgataattcgagcaaacaactttctggaaaaacaggatacgatgactgacactcagatgcccagtatcatacgttgatagtttacaaacaagatacgtatatttttaactgcttcaagtgttacctaacaatgttttttatacttcaaatgtcatttcatacaaattttcccagtgaataaatattttaggaaactctccatgattattagaagaccaactatattgcgagaaacagagatcataaagagcacgttttccattatgaggaaacttggacatttatgtacaaaatgaattgcctttgataattcttactgttctgaaattaggaaagtacttgcatgatcttacacgaagaaatagaataggcaaacttttatgtaggcagattaataacagaaatacatcatatgttagatacacaaaatatt

SEQ ID NO: 2044 - DNA, 600 bp, Homo sapiens; identical to SEQ ID NO: 2043

SEQ ID NO: 2045 - DNA, 600 bp, Homo sapiens
ggcctacgggcgcgccctggaccggcacggggtacccagcaaggggcgcatccgcaggcgtgcctcccagctcaaagtcaagatccccgacttgactgatgtgaattccatagacaagtggtcccgaatgtttttccccatcaccttttctctttttaatgtcgtctattggctttactatgtacactgaggtctgttctaatggttccatttagactactttcctcttctattgttttttaaccttacaggtccccaacagcgatactgctgtttctcgaggtaagagattcagccatccaattggttttaggtcttgcatatcagttttattactgcaccatgtttacttcaaaaagacaaaacaaaaaaaaaattatttttccagtctaccgtggtccaggttatcagctctttaagagctctattaattgccatgtttacaaacaaacacaaagagagaagttagacaggtagatctttagcagtcttttctagtttccctggatttcactgatttattttttagggaaaatgaaaagaggaccttgctgtccgcctgcactgcttcctggtaaactataacaaacttatgctgcc

SEQ ID NO: 2046 - DNA, 600 bp, Homo sapiens
ccaacaatgagaagatgcgcctggatgtcaacaagatggacccccatgagaacatcttactgagcactctcgagataaaaaatgaaatggccacatctgaggctgtgatgggacttggagaccccagaagcacaatgctagcctatgatgcctccagcatccagtatcggaaagctgggttgcccaggcatagttttggccgaaatgctctggaacgacatgtggcgcaaaagaaaagtcgcctgaggagacgcgcctcccaactgaaaatcaccatccctgacttgactgatgtgaatgccatagatcggtggtcccgcatattcttcccagtggttttttccttcttcaacatcgtctattggctttattatgtgaactaaaacatggcctcccactggaagcaaggactagattcctcctcaaaccagttgtacagcctgatgtaggacttggaaaacacatcaatccaggacaaaagtgacgctaaaataccttagttgctggcctatcctgtggtccatttcataccatttgggttgcttctgctaagtaatgaatacactaaggtccttgtggttttccagttaaaacgcaagt

SEQ ID NO: 2047 - DNA, 600 bp, Homo sapiens
tcctacatgccctccgtcctgctggtcgccatgtcctgggtctccttctggatcagccaggcggcggtgcccgccagggtgtctctaggcatcaccacggtgctgacgatgaccacgctcatggtcagtgcccgctcctccctgccacgggcatcagccatcaaggcactggacgtctacttctggatctgctatgtcttcgtgtttgccgccctggtggagtacgcctttgctcatttcaacgccgactacaggaagaagcagaaggccaaggtcaaggtctccaggccgagggcagagatggacgtgaggaacgccattgtcctcttctccctctctgctgccggcgtcacgcaggagctggccatctcccgccggcagcgccgcgtcccggggaacctgatgggctcctacaggtcggtgggggtggagacaggggagacgaagaaggagggggcagcccgctcaggaggccaggggggcatccgtgcccggctcaggcccatcgacgcagacaccattgacatttacgcccgcgctgtgttccctgcggcgtttgcggccgtcaatgtcatctactgggcggcatacgccatgtga

SEQ ID NO: 2048 - DNA, 600 bp, Homo sapiens
taggtatcaccactgtcctgacaatgaccaccctcagcaccattgcccggaaatcgctccccaaggtctcctatgtcacagcgatggatctctttgtatctgtttgtttcatctttgtcttctctgctctggtggagtatggcaccttgcattattttgtcagcaaccggaaaccaagcaaggacaaagataaaaagaagaaaaaccctgcccctaccattgatatccgcccaagatcagcaaccattcaaatgaataatgctacacaccttcaagagagagatgaagagtacggctatgagtgtctggacggcaaggactgtgccagttttttctgctgttttgaagattgtcgaacaggagcttggagacatgggaggatacatatccgcattgccaaaatggactcctatgctcggatcttcttccccactgccttctgcctgtttaatctggtctattgggtctcctacctctacctgtgaggaggtatgggttttactgatatggttcttattcactgagtctcatggagagatgtctgttctaagtccacttaaataatcctctatgtggttgataagtatctgaatctgtttc

SEQ ID NO: 2049 - DNA, 1400 bp, Homo sapiens
ctgcgacctgggatgggctgctgtgctggccaacggcaggctctggcgagtgggtcaccctcccctgcccggatttcttctctcacttcagctcagagtcaggggctgtgaaacgggattgtactatcactggctggtctgagccctttccaccttaccctgtggcctgccctgtgcctctggagctgctggctgaggaggaatcttacttctccacagtgaagattatctacaccgtgggccatagcatctctattgtagccctcttcgtggccatcaccatcctggttgctctcaggaggctccactgcccccggaactacgtccacacccagctgttcaccacttttatcctcaaggcgggacgtgtgttcctgaaggatgctgcccttttccacagcgacgacactgaccactgcagcttctccactgttctatgcaaggtctctgtggccgcctcccatttcgccaccatgaccaacttcagctggctgttggcagaagccgtctacctgaactgcctcctggcctccacctcccccagctcaaggagagccttctggtggctggttctcgctggctgggggctgcccgtgctcttcactggcacgtgggtgagctgcaaactggccttcgaggacatcgcgtgctgggacctggacgacacctccccctactggtggatcatcaaagggcccattgtcctctcggtcggggtgaactttgggctttttctcaatattatccgcatcctggtgaggaaactggagccagctcagggcagcctccatacccagtctcagtattggcgtctctccaagtcgacacttttcctgatcccactctttggaattcactacatcatcttcaacttcctgccagacaatgctggcctgggcatccgcctccccctggagctgggactgggttccttccagggcttcattgttgccatcctctactgcttcctcaaccaagaggtgaggactgagatctcacggaagtggcatggccatgaccctgagcttctgccagcctggaggacccgtgctaagtggaccacgccttcccgctcggcggcaaaggtgctgacatctatgtgctaggctgcctcatcacgccactggagtccacacttgaatttgggcagctaccacgggtctgccatgctctggaggagcaagggggccacatccccaccccagctgttacccagcccggggcaggtgcagcccttcctccctgtctctgcatctgactctcttttgaggtccctgtatgtctacctctgacttctgtggtccctctgtgtctgctctcatccattcctcttactggggcctggggctctagcccaaggctcagaggagccaataaacctgtaaatgaaaaaaaaaaaa

SEQ ID NO: 2050 - DNA, 1400 bp, Homo sapiens; identical to SEQ ID NO: 2049

SEQ ID NO: 2051 - DNA, 1400 bp, Homo sapiens
ttacgatttatctggcagtcaggagatcctgtgcaattagaaaaaattgccttgcctcaatttgatatcaaaaaggaagatattgaatatggtaactgtacaaaatactataaaggcacgggctactacacatgcgtggaagtcatcttcaccctgaggaggcaggtcggcttttacatgatgggggtctacgccccaaccctgctcattgttgttctctcctggctttccttctggatcaacccggacgcgagtgctgccagagtgcccctgggtatcttctcagtcctcagcttggcctctgagtgcacaacccttgccgctgagcttcccaaagtttcctatgtgaaggctcttgatgtttggcttattgcttgccttctctttgggtttgcttccctggtggagtatgcagttgtccaggtgatgctgaacaaccccaaaagggttgaagctgaaaaagccagaattgctaaggctgagcaagcagatggaaaaggtggaaatgtggctaaaaagaatactgtgaatggaacagggactcctgttcatattagcactttgcaggttggtgagaccagatgcaaaaaagtttgtacttctaagtctgatctgagatctaatgacttcagcattgttggaagcttaccaagagattttgaactatccaattatgactgctatggaaaacccattgaagttaacaacggacttgggaaatctcaggctaagaacaacaagaagcctccccctgcgaaacctgttattccaacagcagcaaagcgaattgatctttatgcaagagcattgtttcctttctgcttcttgttcttcaatgttatatattggtctatatatttatgataaatcttttccatttgtacaaaataaaattccatttcattgtgacctactcctttcataaatgccaatctgtgagaacttttgaattttcatagcaacattgcattttggatgccatttgattgtaataaaactgtggcaccttaattttgaatggcagcatgatcatgtaatatctgtgctctaataacgatgtatatatgtatagtgaacatattgcttagtaacaaatgaaggacaagcatactacataatataatccatacaattctcttcagttagtgtaaactgcaaatactacagataattctgataataaaatgatatgcacgctgaatcctgctatggtaccattctaatgtatgtagtatttcaaatttccttccttgtaactttcaaagaaagccatcttattcttgtaaaattttagatggtattatcacagatttaaaaaggttgtattacatattgtttaaactttgtaagtagaaatatatctgttataattatacaggctctgtggagaaataaagttc

SEQ ID NO: 2052 - DNA, 1400 bp, Homo sapiens; identical to SEQ ID NO: 2051

SEQ ID NO: 2053 - DNA, 600 bp, Homo sapiens
tcttcctcgcagaattcacagaattttgcaacttataaggaaggttacaacgtatatggcatcgaaagtgttaaaatttaggggatgaccttgaatgatgccatgaggaacaaggcaaggctgtcaattacaggaagtactggagaaaatggacgtgttatgactccagaatttcccaaagcagtgcatgctgtcccttacgtgagtcctggcatgggaatgaatgtcagtgtgactgatctctcgtgattgataagaaccttttgagtgccttacacaatggttttcttgtgtgtttattgtcaaagtggtgagaggcatccagtatcttgaagacttttctttcagccaagaattcttaaatatgtggagttcatcttgaattgtaaggaatgattaattaaaacacaacatctttttctactcgagttacagacaaagcgtggtggacatgcacagctaacatggaagtactataatttacctgaagtctttgtacagacaacaaacctgtttctgcagccactattgttagtctcttgattcataatgacttaagcacacttgacatcaactgcatcaagatgtgacatgttttat

SEQ ID NO: 2054 - DNA, 600 bp, Homo sapiens; identical to SEQ ID NO: 2053

SEQ ID NO: 2055 - DNA, 600 bp, Homo sapiens
agtgaatccaagcggatgaagggtttttgtttgatcccacagcaatccatcaacgaagccatacggacatcgaccctcccccgcaacagcggggcaggagccagcagcggcggcagtggagagaatggtcgggtggtcagccatgacttccccaagtccatgcaatcgattccttgcatgagccacagttcagggatgcccttgggagccacgggattgtaactggagcagatggagaccccttggggagcaggctcggctccccagccccatcccaaacccttcagtgccaaaaacaacaacaaaatgaaacgcaaccaccaccaaccactgcgaccacaagaaggatgattcaacaggttttcctgaagaattgaaaaaccattttgctgtcccttttccttttttgatgttctttcacccttttctgtttgctaagtgaggatgaaaaaataacactgtactgcaataaggggagagtaaccctgtctaatgaaacctgtgtctctgagagtagagtcactggaacactaatgaggaaactgcactgttttattttaattcagttgttagtgtgtcttagtgtgtgcaatttttccc

SEQ ID NO: 2056 - DNA, 600 bp, Homo sapiens; identical to SEQ ID NO: 2055

SEQ ID NO: 2057 - DNA, 600 bp, Homo sapiens
tacgatgaaagttggtggaaatctggattccaaaggctatggtgtggcaacccctaaaggctcagcattaggaaatgctgttaacctggcagtattaaaactgaatgagcaaggcctcttggacaaattgaaaaacaaatggtggtacgacaaaggagagtgcggcagcgggggcggtgactccaaggacaagaccagcgctctgagcctgagcaatgtggcaggcgttttctatatacttgtcggaggtctggggctggccatgatggtggctttgatagaattctgttacaaatcacgggcagagtccaaacgcatgaaactcacaaagaacacccaaaactttaagcctgctcctgccaccaacactcagaattatgctacatacagagaaggctacaacgtgtatggaacagagagtgttaagatctaggatcccttcccactggaggcatgtgatgagaggaaatcaccgaaaacggcgtgcatggcatgcacgttcagacagctgcattgtaagagttctgtcatgcagtctgaaaagggaagaaacaggatggctttctgtagccacacctgtgaggcgtgatgattgttggg

SEQ ID NO: 2058 - DNA, 600 bp, Homo sapiens; identical to SEQ ID NO: 2057

SEQ ID NO: 2059 - DNA, 600 bp, Homo sapiens
tcatgagcagcaggcagcagaccgccctggtaagaaacagtgatgaggggatccagagagtgctcaccacagactacgcgctgctgatggagtccaccagcattgagtatgtgacgcagagaaactgcaacctcactcagatcgggggcctcattgactccaaaggttacggagtgggaacacctattggttctccttaccgggataaaattactattgctattcttcaactccaagaagaagggaagctgcatatgatgaaagagaagtggtggcgtgggaatggctgccccgaggaagacaacaaagaagccagtgccctgggagtggaaaatattggaggcatcttcattgttctggctgccggactggtcctttctgtatttgtagctattggagaattcatatacaaatcacggaagaataatgatattgaacaggctttttgtttcttttatggactgcaatgtaagcaaacccatccaaccaactccacttctggaactactttatctacggatttagaatgtggtaaattaattcgagaggagagagggattcgaaaacagtcctcagttcatactgtgtaatcagtttaaa

SEQ ID NO: 2060 - DNA, 600 bp, Homo sapiens; identical to SEQ ID NO: 2059

SEQ ID NO: 2061 - DNA, 600 bp, Homo sapiens
ccaattagctgtgtatcgctcttcccagagttgttaatgtggtgacatgcaccaacagccgtatgtgtactgtgatctgtaagaagtacaatgccatctgtctgccgaaggctagcatggttttaggtttatcttccttcacatccagaaattctgttggacactcacttccaccccaaactcctcaaatcaaaagccttcaaaacacgaggcactcttggatctaccctgagtatcctccaaactgtggatacagtttagtgagacaagcaatttctcccttctgagttattctctctgttggtggcaaaccacttcatagcaccaacagagatgtaggaaaaattcctcaaagtatttgtcatttctgagtcgcctgcattatcccattcttattctcctcaaacctgtgcatatatgacatgaaatgatatccattttttttttaagttagaaacagagaggggaatacttatgcatggggagcctgttagcacagtgcctgccacaaaaacaagtgcccccgacaagatagttgctatgttatgacactttctcagatcaggattttctagtttaaaaattaaatatcataaaacg

SEQ ID NO: 2062 - DNA, 600 bp, Homo sapiens
ctgggggcctctggggcacaggggcaggactctggggctgggcacaggctacagagacagtgggggactggacgagatcagcagtgtagcccgtgggacgcaaggcttcccgggaccctgcacctggagacggatctccagtctggagtcagaagtgtgagttatcagccactcaggctccgagccagctggattctctgcctgccactgtcagggttaagcggcaggcaggattgggcttttctggcttctaccatgaaatcctggccatgggaccccagtgacagatgatgtcttccatggtcatcagtgacctcagtagcctcaaatcatggtgagggctgggcttttgctgtcctcttctcacgcagagttctgccaggagggtgtgctgtgggggtcagactcctgaggctctcccttccctggggctagccagttactggtcatgcctgctgtgggcatggaggctggaacttgtggttgaggcagggccatcccgatccttgctctacctggctagagtttcttctcatcagagcactgggacattaaacccaccttttcccagaaaaaaaaaaaaaaaaaaaaaaaaaaaaa

SEQ ID NO: 2063 - DNA, 600 bp, Homo sapiens; identical to SEQ ID NO: 2062

SEQ ID NO: 2064 - DNA, 600 bp, Homo sapiens
aacacctttattgaaaagatctcatgactgagatgtggactttggttccatgttttcattgtaagaaagcagagagcggaaaatcaatggctccagtgattaatagatgggtttttagtaattgacaaattcatgagggaaagcatatgatctctttattagtgaatcatgcttattttttactcttaacgccactaatatacatccctaatatcacagggcttgtgcattcagatttttaaaaaattaggatagataaggaaacaacttatattcaagtgtaagatgatatcaggttggtctaagacttttggtgaacacgttcattcaactgtgatcactttattactctgaatgcctactattatcctgattatggggtctcctgaataaatagagtattagtctttatgtcatcattgttcaaaattggagatgtacacatacataccctataccaagagggccgaaactcttcaccttgatgtatgttctgatacaagttgttcagcttcttgtaaatgtgttttccttcggcttgttactgccttttgtcaaataatcttgacaatgctgtataataaatattttctatttatt

SEQ ID NO: 2065 - DNA, 600 bp, Homo sapiens; identical to SEQ ID NO: 2064

SEQ ID NO: 2066 - DNA, 600 bp, Homo sapiens
atcagtcctgcctcacaggtggccatctgcctggcacttatctcgggccagctgctcatcgtggtcgcctggctggtggtggaggcaccgggcacaggcaaggagacagcccccgaacggcgggaggtggtgacactgcgctgcaaccaccgcgatgcaagtatgttgggctcgctggcctacaatgtgctcctcatcgcgctctgcacgctttatgccttcaatactcgcaagtgccccgaaaacttcaacgaggccaagttcattggcttcaccatgtacaccacctgcatcatctggctggcattgttgcccatcttctatgtcacctccagtgactaccgggtacagaccaccaccatgtgcgtgtcagtcagcctcagcggctccgtggtgcttggctgcctctttgcgcccaagctgcacatcatcctcttccagccgcagaagaacgtggttagccaccgggcacccaccagccgctttggcagtgctgctgccagggccagctccagccttggccaagggtctggctcccagtttgtccccactgtttgcaatggccgtgaggtggtggactcgacaacgtcatcgctttga

SEQ ID NO: 2067 - DNA, 600 bp, Homo sapiens
gaaacacggtgatatctttgagggtgacaaggcgtctcttcaaacagttccataccaactgctttgctctagggaagcagtgcgtgtgaaacagcgtaacggagggtgaagagcatagttaataagcaactgtaaaaagttttatttgtttactttaattcttttcccctgtaaaaagttttatttgtttactttaattcttttcccagaaaagagtctttgattcaccaaacatgaatgtacattttctaacaaactcaaaatctgggaccaaaacatcaacttttttctttcttttttctttctttttgttttttctttcctgtaaagaccttgaaaagaccttgaaaagcagtaacttgggtccagtatttacggaggcgttgtgaatgtgtcccatgcataacacactactggatagtgagtcgtgcgctaatgtactacgtagggcttctaccagagattttcctctccaattgggttgtgaaatactcttccaaaagcctgcatcggggattccacctacttatttcagattcacctccattaaccaagaaaaccagtggaagatttcttgactatttcaccatgttgccaatc

SEQ ID NO: 2068 - DNA, 1400 bp, Homo sapiens
ctagctgaaaacttttccacagttttacattcatgtggttttctccactgtgaactctgtgattcagaatcagaagcagttcttagtagaggcatttctacactgattgcactgaggatatctccccagtgtgaagtttctggcatagagtcctggcttcccgcagacgactttcacactctgccatgttcatgcctgtgggcctctctggcaggaactctgatgcaccgcgaggcccatgtactcctgtggctttctcacattcggtctacttgcagggtatctccacagcatgcaccattctgggtacagggggacatcctctgttactgaagatgttgtcatatttagtaccttcacaaggtttctctccttccagaattttctgatgtacacaaataactgacttccacaagagggcttttccacactcggtgtgtgcatacagtttctgcctgtgatcatttctttatgttattattttattttttcgagatagggtcttgctcaatttcttaggctggagtgcagtggcacgatcatagctcactgaagtttcgacctgggctcaagcaatcctcccgcttcagcctcctgagtagctggtgcgcacgaccatacccagctaatgttttattttttgtagagacgaggtctcactatgttgcccaggctggtctcgaacttctgagctcgagcgatcctcctgcctccacctcccaaagtgttcggattacaaacgtgagccatcgcacctagcctctttgatcatttctgtggtgttcagtgggggttgacagctccctaaagattttcctgtttttttgcatgcatgggtttgaattctttgaggtccaatttatttggacccctgaataaagttttgtgggttttcttctatgtgtggaattatataggcattcttccagtgtggtttctcttatgtcgagtgagagctgacctgcaccgaagtttgtcccatttgttgcccttgaattatctgtatgaattatatgttccagtgaaaatggagttctgggttggaggcttattccatgtttacacaattaaaattgcagtgttcctctctgggatgagagctctaaagcagagtaagattacgttctgatgtaagctttaaccacctatttataaggtctcacctgtggtccactgtgttgagacttctacagaagagcttctgtatagtaaccattttcttaggctgtctcacttgtgtgaatcttctgacacatttattatagctttgtcccatttcttatcctttttgctctttagaaatttccctttaatttattacattcattgcttactgtaaagagtccaggtaactgactttaattcaagttacttcctgttcaataaatttaacttttccc

SEQ ID NO: 2069 - DNA, 600 bp, Homo sapiens
aaattttaaagcaatcttggcagactaaaacaagtacatctgtacatgactgtataattacgattatagtaccactgcacatcatgttttttttttttaagacaaaaaagatgtttaaagaccaaaaactgtgctgagaaagtatgccccacctatctttggtatatgataggttacataaaaggaaggtattggctgaactgaatagaggtcttgatctttggaatgcatgccagtaatgtattttacagtacatgtttattatgttcaatatttgtatttgtgttctcttttgttatttttaattagggtatatgaatattttgcaataattttaataattattaagctgtttgaaggaaagaatatggatttttcatgtcttgaggttttgttcatgccccctttgactgatcagtgtgataaggactttaggaaaaaaagcatgtatgttttttactgtttgtaataagtactttcgttaatcttgctgcttatgtgccaatttagtggaaaaaaacaacccttgctgaaaaattccctctttccattctctttcaattctgtgatattgtccaagaatgtatcaataaggaattc

SEQ ID NO: 2070 - DNA, 600 bp, Homo sapiens
gcaatctggttgtgatttatattttaaagcttggtgctaaaccacaatatgtatagcacatggagtgcctgtacaagctgatgttttgtattttgtgttcctctttgcatgatctgtcaaagtgagatatttttacctgcctaaaatatgatgtttaaaagcatactctatgtgatttatttatttctacctttctgagtctcttggactaagaagatgttttgaaatgtaccatcaaatgttaacagagtttgatatgggctttctctttggtttctcatcacatttgtaaatgtcttttcaaaaggatttactttttgtaaaaagcttcattctcactctgctttgcatcccccaaacttcttgttcaaaacggggggagtttaggagactttaatcccggtttcagaagctgcagctggtctgtttccaggtcagaaaccattgttcagaagacctccctgtgagagagttgctcctcagggtccctcaggaccaaagaacactcgaaaagagcacttcacacagacaagtggctaagtgtccattatttaccttgaacaatcaaggcaactagtggagagaactgattgtgagctc

SEQ ID NO: 2071 - DNA, 600 bp, Homo sapiens; identical to SEQ ID NO: 2070

SEQ ID NO: 2072 - DNA, 600 bp, Homo sapiens
agagatgatgaatgcatcatcaagcacgaccacattgtttccaccatttactcaacatttggagctttctacatcccactggcattgattttgatcctttactacaaaatatatagagcagcaaagacattataccacaagagacaagcaagtaggattgcaaaggaggaggtgaatggccaagtccttttggagagtggtgagaaaagcactaaatcagtttccacatcctatgtactagaaaagtctttatctgacccatcaacagactttgataaaattcatagcacagtgagaagtctcaggtctgaattcaagcatgagaaatcttggagaaggcaaaagatctcaggtacaagagaacggaaagcagccactaccctgggattaatcttgggtgcatttgtaatatgttggcttcctttttttgtaaaagaattagttgttaatgtctgtgacaaatgtaaaatttctgaagaaatgtccaattttttggcatggcttgggtatctcaattcccttataaatccactgatttacacaatctttaatgaagacttcaagaaagcattccaaaagcttgtgcgatgtcgatgttag

SEQ ID NO: 2073 - DNA, 600 bp, Homo sapiens; identical to SEQ ID NO: 2072

SEQ ID NO: 2074 - DNA, 600 bp, Homo sapiens
tgagtgttagaaaaaactggaaacatctgatttctgaactatcagggcaagctcatagcacatgttttacaaagaaacaaaatataaatcacagatttccaaaagtactagcaataagttgaatgataatagctcacagcacatttgttaatgattcttgtgtcatcaagtagtagtacttaatagtacccaacctggtaattatcctcaagttgtgtgctattcgtaagttctgtgcagtttggtatgaaacaaatatactcatttggatataaatcttacccttcaatgttaaatctacaaacttttataaatgttttaaagaagtccatgtgataattgtaaaggtgatgaatttaccatcaaacaaatcattttgatgtattattatatatgtatatctgtgtaagacacgtgcaacagactgccttatattattttctgtaattcttctcctttgtcaaatggtattttttgtgaatggttgcaaagtgttgtcttattcctaattcctgtatgttatccactacaggttttatgagacttcctattaatttattaaatttattaaatgttgaaaaaaaaaaaaaaaaaaaaaaa

SEQ ID NO: 2075 - DNA, 600 bp, Homo sapiens; identical to SEQ ID NO: 2074

SEQ ID NO: 2076 - DNA, 1400 bp, Homo sapiens
aggtgaaatccgacaggagtgtcttcatgaaccagggagagtgggagttgctgggggtgctgccctactttcgggagttcagcatggaaagcagtaactactatgcagaaatgaagttctatgtggtcatccgccggcggcccctcttctatgtggtcagcctgctactgcccagcatcttcctcatggtcatggacatcgtgggcttctacctgccccccaacagtggcgagagggtctctttcaagattacactcctcctgggctactcggtcttcctgatcatcgtttctgacacgctgccggccactgccatcggcactcctctcattggtgtctactttgtggtgtgcatggctctgctggtgataagtttggccgagaccatcttcattgtgcggctggtgcacaagcaagacctgcagcagcccgtgcctgcttggctgcgtcacctggttctggagagaatcgcctggctactttgcctgagggagcagtcaacttcccagaggcccccagccacctcccaagccaccaagactgatgactgctcagccatgggaaaccactgcagccacatgggaggaccccaggacttcgagaagagcccgagggacagatgtagccctcccccaccacctcgggaggcctcgctggcggtgtgtgggctgctgcaggagctgtcctccatccggcaattcctggaaaagcgggatgagatccgagaggtggcccgagactggctgcgcgtgggctccgtgctggacaagctgctattccacatttacctgctagcggtgctggcctacagcatcaccctggttatgctctggtccatctggcagtacgcttgagtgggtacagcccagtggaggagggggtacagtcctggttaggtggggacagaggatttctgcttaggcccctcaggacccagggaatgccagggacattttcaagacacagacaaagtcccgtgccctgtttccaatgccaattcatctcagcaatcacaagccaaggtctgaacccttccaccaaaaactgggtgttcaaggcccttacacccttgtcccacccccagcagctcaccatggctttaaaacatgctctcttagatcaggagaaactcgggcactccctaagtccactctagttgtggacttttccccattgaccctcacctgaataagggactttggaattctgcttctctttcacaactttgcttttaggttgaaggcaaaaccaactctctactacacaggcctgataactctgtacgaggcttctctaacccctagtgtcttttttttcttcacctcacttgtggcagcttccctgaacactcatcccccatcagatgatgggagtgggaagaataaaatgcagtgaaaccc

SEQ ID NO: 2077 - DNA, 1400 bp, Homo sapiens; identical to SEQ ID NO: 2076

SEQ ID NO: 2078 - DNA, 600 bp, Homo sapiens
gagcaggcctcagtcggcagaccagcatagcactcatcgcatgaggacagagaccaaagcagccaagaccctgtgcatcatcatgggttgcttctgcctctgctgggcaccattctttgtcaccaatattgtggatcctttcatagactacactgtccctgggcaggtgtggactgctttcctctggctcggctatatcaattccgggttgaacccttttctctacgccttcttgaataagtcttttagacgtgccttcctcatcatcctctgctgtgatgatgagcgctaccgaagaccttccattctgggccagactgtcccttgttcaaccacaaccattaatggatccacacatgtactaagggatgcagtggagtgtggtggccagtgggagagtcagtgtcacccgccagcaacttctcctttggtggctgctcagcccagtgacacttaggcccctgggacaatgacccagaagacagccatgcctccgaaagagggccaggtcctaagctgctgcttgtgcgcgactgcacccggcattctcttcacctgaggctttccgtccgccagtgcaggaacccggtgctcgctggg

SEQ ID NO: 2079 - DNA, 600 bp, Homo sapiens; identical to SEQ ID NO: 2078

SEQ ID NO: 2080 - DNA, 600 bp, Homo sapiens
cttcctggcctactcccaatcacactgtgccctgcacctcccaccaagggggaaccccagcagctggggcttttctagtgctttttggcccaagaatctcagagtgcttctaatcatcacagtagtttttgtgttttgttttgttttgttttgttttgttttgtttttttcacaatctcagccagcctgtggtgtgacctggggagaaagttgagtgtcaggggacatgatgagccagttggccctgaaacaggaatggggcaaagagcaaggagagccaggagcatttaaaaatcagcatctgggccaggcaagatggctcacacctgtgatcccagcattttgggaggccgaggcgggtggatcatgaggtcaggagatcgagaccatcctggctaacacggtgaaaccccgtctctactgaaaatagaaaaaattagccaggcatggtggcaggtgcctgtagtcccagctactcgggaagctgaggcagaagaatggcatgaacctgggaggtggaggttgcagtgagccaagatcatgccactgcactccagcctgggcgacagagcgagactccatctcaaaaaaaaaaaaaaa

SEQ ID NO: 2081 - DNA, 600 bp, Homo sapiens; identical to SEQ ID NO: 2080

SEQ ID NO: 2082 - DNA, 600 bp, Homo sapiens
ccctctggatcaaatagacatcaatgttgggtttgacagtggaatcgatcgtatatttctggtgtccccaatcactatagtccatgaaatagatgaagacagtcctttatatgatttgagtaaacaggacattgacaacgcagactttgaaatcgtggtcatactggaaggcatggtggaagccactgccatgacgacacagtgccgtagctcttatctagcaaatgaaatcctgtggggccaccgctatgagcctgtgctctttgaagagaagcactactacaaagtggactattccaggttccacaaaacttacgaagtccccaacactcccctttgtagtgccagagacttagcagaaaagaaatatatcctctcaaatgcaaattcattttgctatgaaaatgaagttgccctcacaagcaaagaggaagacgacagtgaaaatggagttccagaaagcactagtacggacacgccccctgacatagaccttcacaaccaggcaagtgtacctctagagcccaggcccttacggcgagagtcggagatatgactgactgattccttctctggaatagttactttacaacacggtct

SEQ ID NO: 2083 - DNA, 600 bp, Homo sapiens; identical to SEQ ID NO: 2082

SEQ ID NO: 2084 - DNA, 1400 bp, Homo sapiens
aaaacatctgaaagtggcacaccaagttcctctactcctcaagaaaacaccatatctggatatagccttttaacctgcaaaagaactttacctgaaccctgccattctaaaatttacccgggagttgactttggaggagaagaattgaatgtgacttttgttaaaggagtgaatgtttgccaagagacttgcacaaagatgattcgctgtcagtttttcacttattctttactcccagaagactgtaaggaagagaagtgtaagtgtttcttaagattatctatggatggttctccaactaggattgcgtatgggacacaagggagctctggttactctttgagattgtgtaacactggggacaactctgtctgcacaacaaaaacaagcacacgcattgttggaggaacaaactcttcttggggagagtggccctggcaggtgagcctgcaggtgaagctgacagctcagaggcacctgtgtggagggtcactcataggacaccagtgggtcctcactgctgcccactgctttgatgggcttcccctgcaggatgtttggcgcatctatagtggcattttaaatctgtcagacattacaaaagatacacctttctcacaaataaaagagattattattcaccaaaactataaagtctcagaagggaatcatgatatcgccttgataaaactccaggctcctttgaattacactgaattccaaaaaccaatatgcctaccttccaaaggtgacacaagcacaatttataccaactgttgggtaaccggatggggcttctcgaaggagaaaggtgaaatccaaaatattctacaaaaggtaaatattcctttggtaacaaatgaagaatgccagaaaagatatcaagattataaaataacccaacggatggtctgtgctggctataaagaagggggaaaagatgcttgtaagggagattcaggtggtcccttagtttgcaaacacaacggaatgtggcgtttggtgggcatcacaagctggggtgaaggctgtgcccgcagggagcaacctggtgtctacaccaaagtcgctgagtacatggactggattttagagaaaacacagagcagtgatggaaaagctcagatgcagtcaccagcatgagaagcagtccagagtctaggcaatttttacaacctgagttcaagtcaaattctgagcctggggggtcctcatctgcaaagcatggagagtggcatcttctttgcatcctaaggacgaaagacacagtgcactcagagctgctgaggacaatgtctgctgaagcccgctttcagcacgccgtaaccaggggctgacaatgcgaggtcgcaactgagatctccatgactgtgtgttgtgaaataaaatggtgaaagatc

SEQ ID NO: 2085 - DNA, 600 bp, Homo sapiens
gtgcaaggggaaacctgtgaaagctgcactcagagggaggagtctttcttacataatttgcaatttcaggaatttaatttataggcagatctttaaatacagtcaacttacggtgcacagtaatatgaaagccacactttgaaggtaataaatacacagcatgcagactgggagttgctagcaaacaaatggcttacttacaaaagcagcttttagttcagacttagtttttataaaatgagaattctgacttacttaaccaggtttgggatggagatggtctgcatcagctttttgtattaacaaagttactggctctttgtgtgtctccaggtaactttgcttgattaaacagcaaagccatattctaaattcactgttgaatgcctgtcccagtccaaattgtctgtctgctcttatttttgtaccatattgctcttaaaaatcttggtttggtacagttcataattcaccaaaaagttcatataatttaaagaaacactaaattagtttaaaatgaagcaatttatatctttatgcaaaaacatatgtctgtctttgcaaaggactgtaagcagattacaataaatcctttacttt

SEQ ID NO: 2086 - DNA, 600 bp, Homo sapiens; identical to SEQ ID NO: 2085

SEQ ID NO: 2087 - DNA, 600 bp, Homo sapiens
agagggggagtagcacccgaggctgacctgcctcctctcctatccctccacacctcccctaccctgtgccagaagcaacagaggtgccaggcctcagcctcacccacagcagccccatcgccaaaggatggaagtaatttgaatagctcaggtgtgctgaccccagtgaagacaccagataggacctctgagaggggactggcatggggggatctcagagcttacaggctgagccaagcccacggccatgcacagggacactcacacaggcacacgcacctgctctccacctggactcaggccgggctgggctgtggatccttgatcccctcccctccccatgctctcctccctcagccttgctaccctgtgacttactgggaggagagtcacctgaaggggaacatgaaaagagactaggtgaagagagggcaggggagcccacatctggggctggcccacaatacctgctcccccgaccccctccacccagcagtagacacagtgcacaggggagaagaggggtggcgcagaagggttgggggcctgtatgccttgcttctaccatgagcagagacaattaaaatctttattccagtg

SEQ ID NO: 2088 - DNA, 600 bp, Homo sapiens
agctaaattatatttatttgaattgatggtcaagagattttccattttttttacagactgttcagtgtttgtcaagcttctggtctaatatgtactcgaaagactttccgcttacaatttgtagaaacacaaatatcgttttccatacagcagtgcctatatagtgactgattttaactttcaatgtccatctttcaaaggaagtaacaccaaggtacaatgttaaaggaatattcactttacctagcagggaaaaatacacaaaaactgcagatacttcatatagcccattttaacttgtataaactgtgtgacttgtggcgtcttataaataatgcactgtaaagattactgaatagttgtgtcatgttaatgtgcctaatttcatgtatcttgtaatcatgattgagcctcagaatcatttggagaaactatattttaaagaacaagacatacttcaatgtattatacagataaagtattacatgtgtttgattttaaaagggcggacattttattaaaatcaatattgtttttgctttttctgaggagtctctttcagtttcattttttctcatcccatgacttccctccgatggt

SEQ ID NO: 2089 - DNA, 600 bp, Homo sapiens; identical to SEQ ID NO: 2088

SEQ ID NO: 2090 - DNA, 600 bp, Homo sapiens
gattgtgttttattcgtgtcccatagctttcctatcctatccctatcctagcttttaacctgagccagagctcactacacaggttcctggctatcgagtctgaatctgcactactcaacttataaactgtctgcagacacctgttagggaaattgctgatcatgggcggcaggatctgaactcgctttaccttcttgtttggagcacagggaccgcccagctagaggagcaccagcgcactgcgccccagccctgggcgagggtgcggaggatttgttctcggtgcaatcctgctggcgcttttccggggttctgcgcggatccagctccccatctctgctcctacacacacaaaagaaaacaactctcgattggaagttgtggaattttctcagcccctacgaggcgcggggattctccagccccggccctcctcccgccagcctgaggtctccttcgctcgcctgccttgctagggaccgcagtccctcagccgcagctgggtctgtccgccccgcctttgccctcgccttttcccggggcggatttggtgaagtcggcctcaagtccaggaggtctgtcttcgccgggccagctctc

SEQ ID NO: 2091 - DNA, 600 bp, Homo sapiens
cgcacctctgaaggttttctgtgtgctgcacggtgcaggcctcatccctgactgcagcttgactctgggcccaacccccatttcccttcaggagaccagcgagaggccctggccatccctccagcggtgcaatgaactatatgctgtggaccgtcaacccagccctgcttctcagtgtggggcaggtgtctcaggacgaaggcgccgcgtgaccacatgggcagctctgttcacaaagtggaggcctcgttttcctggtcttgactgctctgtttgggtgggagaagattctctgggggtccccacatcctcccaaggctcccctcacagcctctcctttgcttgaagccagaggtcagtggccgtgctgtgttgcggggaagctgtgtggaaggagaagctggtggccacagcagagtcctgctctggggacgcctgcttcatttacaagcctcaagatggctctgtgtagggcctgagcttgctgcccaacgggaggatggcttcacagcagagccagcatgaggggtggggcctggcagggcttgcttgagccaaactgcaaaggctgtggtggctgtgaggacactgcgggggttg

SEQ ID NO: 2092 - DNA, 600 bp, Homo sapiens
  misc_feature (501)..(501): n is a, c, g, or t
  misc_feature (529)..(529): n is a, c, g, or t
ctgctctgcacattagagggacagccaaaagtaagtggagcatttggaaggaaaggaatataccacaccgaggagtccagtttgtgcaagacacccagtggaaccaaaacccatcgtggtatgtgaattgaagtcatcataaaaggtgacccttctgtctgtaagattttattttcaagcaaatatttatgacctcaacaaagaagaaccatcttttgttaagttcaccgtagtaacacataaagtaaatgctacctctgatcaaagcaccttgaatggaaggtccgagtctttttagtgtttttgcaagggaatgaatccattattctattttagacttttaacttcaacttaaaattagcatctggctaaggcatcattttcacctccatttcttggttttgtattgtttaaaaaaaataacatctctttcatctagctccataattgcaagggaagagattagcatgaaaggtaatctgaaacacagtcatgtgtcanctgtagaaaggttgattctcatgcactncaaatacttccaaagagtcatcatgggggatttttcattcttaggctttcagtggtttgttcctggaattc

SEQ ID NO: 2093 - DNA, 600 bp, Homo sapiens; identical to SEQ ID NO: 2092
  misc_feature (501)..(501): n is a, c, g, or t
  misc_feature (529)..(529): n is a, c, g, or t

SEQ ID NO: 2094 - DNA, 1400 bp, Homo sapiens
tggtggattcacacttcctgatttcataatttacgataaaggtaatcagctcagtgtgttactggtttaaggatagacatacggagcagaataaagagtacagatatgaacacttatacttacggtcaattgatttttgacaaggttcccaagacaattcaatagagaaaggagagtcttttcaacaaatggcaccgagacaatgatatgcaagtgcaaaagaatgaggttggacctttactcacactatgtgcaaaaatcaactcaaaacgcatccaagatctaaatataagagctgaaactataaaatcttagaaagaaacataggcatagatctttgtaaccttgaattaggcagtggtttcttagatatgataccaaagacacaagcaaccaatggaaaaataggtaaattggacttaatcaagatttgaagcttttgtgattgaaaagaccctatcaagaaggtgaaaagataacctgcagaatgggagaaaatatttgcgagtcatatatatgataaggggcttgtatctggaatatataaataactcttataacacaacaataaggagaaaaataaatcaatttaaaaaatgggctaacggtttgaatagacatttctccaaagaagatatgcaaatggctactaagcacatgaaaaatactcaacattattattcattagggaaatgcaagtcaaaatcacaatgagattccagtttacaatcactaggatggctacaataaaaagatggacaagaacgagtgtcggtgaggatgtagagaaactggtagaaatttaaattgttggtgggaatgtaaatggtgcacctgctttgaaaaacagtttggcagtacctcaaaaagttaaacgtagagtgaccatatgacccaggaatgccactcctaggtatttacccaagagaaatgaaaacgtacatacacacaaaaacttgtacaccaatgttcatagcaacattatttgtaatagccaaaaagtggaaacaacccaaatgtctaccaactgatgaatgggaaataaaatgtggtctgtccacgcaatggaacattattagactctaaaaagaaatgaagtactcacacatgccacaacatggatgagccttgaaaacttgctaagtgaaagaagccaggtgcaaaagcccacatattgtctgactgcattgaaatgcaatgtctaaaatggacgaatctatatagagtgaatatagattagcgtttgccagggcctggaggctgtgagagatgaggcatgactactaagggtttggggtttctttttcgggtgatgaaaatgttcgaaattagtggtgattgtgcacgattttgagaatgtactaaaaaccaatgaactttaaaaaataaaaataaacaaa

SEQ ID NO: 2095 - DNA, 600 bp, Homo sapiens
agataactctcattcagtattcttggatgagcttaatggtgtttggtctaggatggagatcctacaaacacgtcagtgggcagatgctgtattttgcacctgatctaatactaaatgaacagcggatgaaagaatcatcattctattcattatgccttaccatgtggcagatcccacaggagtttgtcaagcttcaagttagccaagaagagttcctctgtatgaaagtattgttacttcttaatacaattcctttggaagggctacgaagtcaaacccagtttgaggagatgaggtcaagctacattagagagctcatcaaggcaattggtttgaggcaaaaaggagttgtgtcgagctcacagcgtttctatcaacttacaaaacttcttgataacttgcatgatcttgtcaaacaacttcatctgtactgcttgaatacatttatccagtcccgggcactgagtgttgaatttccagaaatgatgtctgaagttattgctgcacaattacccaagatattggcagggatggtgaaaccccttctctttcataaaaagtgaatgtcatctttttcttttaaagaattaaattttgtgg

SEQ ID NO: 2096 - DNA, 600 bp, Homo sapiens; identical to SEQ ID NO: 2095

SEQ ID NO: 2097 - DNA, 1400 bp, Homo sapiens
cctgctggattctctctgccgcccactgcttccaggagaggtttccgccccaccacctgacggtgatcttgggcagaacataccgggtggtccctggcgaggaggagcagaaatttgaagtcgaaaaatacattgtccataaggaattcgatgatgacacttacgacaatgacattgcgctgctgcagctgaaatcggattcgtcccgctgtgcccaggagagcagcgtggtccgcactgtgtgccttcccccggcggacctgcagctgccggactggacggagtgtgagctctccggctacggcaagcatgaggccttgtctcctttctattcggagcggctgaaggaggctcatgtcagactgtacccatccagccgctgcacatcacaacatttacttaacagaacagtcaccgacaacatgctgtgtgctggagacactcggagcggcgggccccaggcaaacttgcacgacgcctgccagggcgattcgggaggccccctggtgtgtctgaacgatggccgcatgactttggtgggcatcatcagctggggcctgggctgtggacagaaggatgtcccgggtgtgtacaccaaggttaccaactacctagactggattcgtgacaacatgcgaccgtgaccaggaacacccgactcctcaaaagcaaatgagatcccgcctcttcttcttcagaagacactgcaaaggcgcagtgcttctctacagacttctccagacccaccacaccgcagaagcgggacgagaccctacaggagagggaagagtgcattttcccagatacttcccattttggaagttttcaggacttggtctgatttcaggatactctgtcagatgggaagacatgaatgcacactagcctctccaggaatgcctcctccctgggcagaaagtggccatgccaccctgttttcagctaaagcccaacctcctgacctgtcaccgtgagcagctttggaaacaggaccacaaaaatgaaagcatgtctcaatagtaaaagataacaagatctttcaggaaagacggattgcattagaaatagacagtatatttatagtcacaagagcccagcagggcctcaaagttggggcaggctggctggcccgtcatgttcctcaaaagcacccttgacgtcaagtctccttcccctttccccactccctggctctcagaaggtattccttttgtgtacagtgtgtaaagtgtaaatcctttttctttataaactttagagtagcatgagagaattgtatcatttgaacaactaggcttcagcatatttatagcaatccatgttagtttttactttctgttgccacaaccctgttttatactgtacttaataaattcagatatatttttcacagtttttcc

SEQ ID NO: 2098 - DNA, 1400 bp, Homo sapiens; identical to SEQ ID NO: 2097

SEQ ID NO: 2099 - DNA, 1400 bp, Homo sapiens
gactcaaagccctggtgctacgtctttaaggcggggaagtacagctcagagttctgcagcacccctgcctgctctgagggaaacagtgactgctactttgggaatgggtcagcctaccgtggcacgcacagcctcaccgagtcgggtgcctcctgcctcccgtggaattccatgatcctgataggcaaggtttacacagcacagaaccccagtgcccaggcactgggcctgggcaaacataattactgccggactggacggagtgtgagctctccggctacggcaagcatgaggccttgtctcctttctattcggagcggctgaaggaggctcatgtcagactgtacccatccagccgctgcacatcacaacatttacttaacagaacagtcaccgacaacatgctgtgtgctggagacactcggagcggcgggccccaggcaaacttgcacgacgcctgccagggcgattcgggaggccccctggtgtgtctgaacgatggccgcatgactttggtgggcatcatcagctggggcctgggctgtggacagaaggatgtcccgggtgtgtacaccaaggttaccaactacctagactggattcgtgacaacatgcgaccgtgaccaggaacacccgactcctcaaaagcaaatgagatcccgcctcttcttcttcagaagacactgcaaaggcgcagtgcttctctacagacttctccagacccaccacaccgcagaagcgggacgagaccctacaggagagggaagagtgcattttcccagatacttcccattttggaagttttcaggacttggtctgatttcaggatactctgtcagatgggaagacatgaatgcacactagcctctccaggaatgcctcctccctgggcagaaagtggccatgccaccctgttttcagctaaagcccaacctcctgacctgtcaccgtgagcagctttggaaacaggaccacaaaaatgaaagcatgtctcaatagtaaaagataacaagatctttcaggaaagacggattgcattagaaatagacagtatatttatagtcacaagagcccagcagggcctcaaagttggggcaggctggctggcccgtcatgttcctcaaaagcacccttgacgtcaagtctccttcccctttccccactccctggctctcagaaggtattccttttgtgtacagtgtgtaaagtgtaaatcctttttctttataaactttagagtagcatgagagaattgtatcatttgaacaactaggcttcagcatatttatagcaatccatgttagtttttactttctgttgccacaaccctgttttatactgtacttaataaattcagatatatttttcacagtttttccaaaaaaaaaaaaaaaaaaaaa

SEQ ID NO: 2100 - DNA, 1400 bp, Homo sapiens; identical to SEQ ID NO: 2099

SEQ ID NO: 2101 - DNA, 600 bp, Homo sapiens
gagctgcatcctacttcctcatcctggactctaccaacacagtgcccgacagtgctggctcaggcaacgtcactcgctgctttgagcattacgagaagggcagcgtgccagtcctcatcatccacatcttcatcgtgttcagcttcttcctggtcttcctcatcatcctcttctgcaacctggtcatcatccgtaccttgctcatgcagccggtgcagcagcagcgcaacgctgaagtcaagcgccgggcgctgtggatggtgtgcacggtcttggcggtgttcatcatctgcttcgtgccccaccacgtggtgcagctgccctggacccttgctgagctgggcttccaggacagcaaattccaccaggccattaatgatgcacatcaggtcaccctctgcctccttagcaccaactgtgtcttagaccctgttatctactgtttcctcaccaagaagttccgcaagcacctcaccgaaaagttctacagcatgcgcagtagccggaaatgctcccgggccaccacggatacggtcactgaagtggttgtgccattcaaccagatccctggcaattccctcaaaaattagtccttgcttc

SEQ ID NO: 2102 - DNA, 600 bp, Homo sapiens; identical to SEQ ID NO: 2101

SEQ ID NO: 2103 - DNA, 1376 bp, Homo sapiens
gggggcggcagggctgagcggccggtgatggggaccccacatcccaggcagtgccggcacccctggcgcctgacatgagcccttgcgggcccctcaacctgagcctggcgggcgaggcgaccacatgcgcggcgccctgggtccccaacacgtcggccgtgccgccgtcgggcgcttcgcccgcgctgcccatcttctccatgacgctgggcgccgtgtccaacctgctggcgctggcgctgctggcgcaggccgcgggccgcctgcgacgccgccgctcggccaccaccttcctgctgttcgtggccagcctgctggccaccgacctggcgggccacgtgatcccgggcgcgctggtgctgcgtctgtacactgcggggcgcgctccggccggcggggcctgccacttcctgggcggctgcatggtcttcttcggcctgtgcccgctgctgctgggctgtggcatggccgtggagcgctgcgtgggcgtcacgcggccgctgctccacgccgcgcgggtctcggtcgcccgcgcgcgcctggcgctggccgcggtggccgcggtggccttggccgtggcgctgctgccgctggcgcgcgtgggccgctatgagctgcagtacccgggcacgtggtgcttcatcggcctgggtcccccgggcggctggcgccaggcactgcttgctggcctcttcgccagcctcggcctggtcgcgctcctcgccgcgctggtgtgcaacacgctcagcggcctggccctgcatcgcgcccgctggcgacgccgctcccgacggcctcccccggcctcaggccccgacagccggcgtcgctggggggcgcacggaccccgctcggcctccgcctcgtccgcctcgtccatcgcttcggcctccaccttctttggcggctctcggagcagcggctcggcacgcagagctcgcgcccacgacgtggagatggtgggccagcttgtcggtatcatggtggtgtcgtgcatctgctggagcccaatgctggtgttggtggcgctggccgtcggcggctggagctctacctccctgcagcggccactgttcctggccgtgcgccttgcctcctggaaccagatcctggacccttgggtgtacatcctactgcgccaggccgtgctgcgccaactgcttcgcctcttgcccccgagggccggagccaagggcggccccgcggggctgggcctaacaccgagcgcctgggaggccagctcgctgcgcagctcccggcacagcggcctcagccacttctaagcacaaccagaggcccaacgactaagccagcccaccctgggctgggcccaggtgcgcggcgcagagcctttgggaataaaaagccattctgcg

SEQ ID NO: 2104 - DNA, 1400 bp, Homo sapiens
ttcgccgtctgctccttgcctttcacgatttttgcatatatgaatgaaacctcttcccgaaaggaaaaatgggacctccaagctcttaggtttttatcaattaattcaataattgacccttgggtctttgccatccttaggcctcctgttctgagactaatgcgttcagtcctctgttgtcggatttcattaagaacacaagatgcaacacaaacttcctgttctacacagtcagatgccagtaaacaggctgacctttgaggtcagtagtttaaaagttcttagttatatagcatctggaagatcattttgaaattgttccctggagaaatgaaaacagtgtgtaaacaaaatgaagctgccctaataaaaaggagtatacaaacatttaagctgtggtcaaggctacagatgtgctgacaaggcacttcatgtaaagtgtcagaaggagctacaaaacctaccctcaatgagcatggtacttggcctttggaggaacaatcggctgcattgaagatccagctgcctattgatttaagctttcctgttgaatgacaaagtatgtggttttgtaatttgtttgaaaccccaaacagtgactgtactttctattttaatcttgctactaccgttatacacatatagtgtacagccagaccagattaaacttcatatgtaatctctaggaagtcaatatgtggaagcaaccaagcctgctgtcttgtgatcacttagcgaaccctttatttgaacaatgaagttgaaaatcataggcaccttttactgtgatgtttgtgtatgtgggagtactctcatcactacagtattactcttacaagagtggactcagtgggttaacatcagttttgtttactcatcctccaggaactgcaggtcaagttgtcaggttatttattttataatgtccatatgctaatagtgatcaagaagactttaggaatggttctctcaacaagaaataatagaaatgtctcaaggcagttaattctcattaatactcttattatcctatttctgggggaggatgtacgtggccatgtatgaagccaaatattaggcttaaaaactgaaaaatctggttcattcttcagatatactggaacccttttaaagttgatattggggccatgagtaaaatagattttataagatgactgtgttgtaccaaaattcatctgtctatattttatttaggggaacatggtttgactcatcttatatgggaaaccatgtagcagtgagtcatatcttaatatatttctaaatgtttggcatgtaaatgtaaactcagcatcaaaatatttcagtgaatttgcactgtttaatcatagttactgtgtaaactcatctgaaatgttacaaaaataaactataaaaca

SEQ ID NO: 2105 - DNA, 1400 bp, Homo sapiens
accgacctggtcgggcagcttctcaccaccccggtcgtcatcgtcgtgtacctgtccaagcagcgttgggagcacatcgacccgtcggggcggctctgcacctttttcgggctgaccatgactgttttcgggctctcctcgttgttcatcgccagcgccatggccgtcgagcgggcgctggccatcagggcgccgcactggtatgcgagccacatgaagacgcgtgccacccgcgctgtgctgctcggcgtgtggctggccgtgctcgccttcgccctgctgccggtgctgggcgtgggccagtacaccgtccagtggcccgggacgtggtgcttcatcagcaccgggcgagggggcaacgggactagctcttcgcataactggggcaaccttttcttcgcctctgcctttgccttcctggggctcttggcgctgacagtcaccttttcctgcaacctggccaccattaaggccctggtgtcccgctgccgggccaaggccacggcatctcagtccagtgcccagtggggccgcatcacgaccgagacggccattcagcttatggggatcatgtgcgtgctgtcggtctgctggtctccgctcctgataatgatgttgaaaatgatcttcaatcagacatcagttgagcactgcaagacacacacggagaagcagaaagaatgcaacttcttcttaatagctgttcgcctggcttcactgaaccagatcttggatccttgggtttacctgctgttaagaaagatccttcttcgaaagttttgccagatgagaaaaagaagactcagagagcaagagatggggcctgatggaaggtgtttttgtcatgcatggaggcaggtccccaggacttggtgcagttctcatgatagagaaccctgcagtgtccagctaagctgatgacttgaagataaatctgcctaaccctgggatgaagtatctgtgaactattttgacagcagatgaggaattttggggaaattaaaacctgcctttctgccaggatcacatcactggaagctccatgactctctttttgtaaaagaaaaaaaaatcacagaaacacccacctcccaaactattctcttttacttcttcccccaagcccacccccaaatataactgttatccagaagctgttatgtcctgtttccatacatgtttttgtacttttactatatctacatacatcaattaaacttatgtcctattgttttgtgaatttatatttgcgtatacattatcatatgtaaaatttgcatttttttattgaaaattatgtttcttgagatttatccacattgaaacatggagctctaaatcgttaattttaaccgctatagagtattccataatttgaataaagcataatttgtttgtac

SEQ ID NO: 2106 - DNA, 1400 bp, Homo sapiens; identical to SEQ ID NO: 2105

SEQ ID NO: 2107 - DNA, 600 bp, Homo sapiens
tagacccctggatatatatcctcctgagaaagacagtgctcagtaaagcaatagagaagatcaaatgcctcttctgccgcattggcgggtcccgcagggagcgctccggacagcactgctcagacagtcaaaggacatcttctgccatgtcaggccactctcgctccttcatctcccgggagctgaaggagatcagcagtacatctcagaccctcctgccagacctctcactgccagacctcagtgaaaatggccttggaggcaggaatttgcttccaggtgtgcctggcatgggcctggcccaggaagacaccacctcactgaggactttgcgaatatcagagacctcagactcttcacagggtcaggactcagagagtgtcttactggtggatgaggctggtgggagcggcagggctgggcctgcccctaaggggagctccctgcaagtcacatttcccagtgaaacactgaacttatcagaaaaatgtatataataggcaaggaaagaaatacagtactgtttctggacccttataaaatcctgtgcaatagacacatacatgtcacatttagctgtgctcagaagggctatcatca

SEQ ID NO: 2108 - DNA, 600 bp, Homo sapiens
gtagtcctgctttataataggaaaatgtatttctgtataagatttctttgctttcattaaaaatgggattcatttaaaaattaatctttccctgttaggctgatttcagattctctaggaaatctggtgaagtaaccagaagactttcagatggtttatttgctttcagcagagaatttatttcatacagttacttaagagtgttgatgtcttgtgaacagagatataaggaaccattctccatccttccttatcatgctgggtacaatgcttctatgaatatttccatgtattttgactggggagaggcatggagaagaaactctcattcaggggctccaggatccttctccttgaggcttctaaataaatggcagaattcttgctgtattgccatgatgtcaccctggccatgtgtactgacttgaggagatcttgcaacatggccatgtgcaaggctttaaggagtgagagagatgtgtacatatcttaggagggttatctatgttatctgagtatatgtttgggtaaccaaattggtcttaaaaatgatgttaacccaagaagtagacatcaaaaattaaaaaaaaaaaaaaaaaa

SEQ ID NO: 2109 - DNA, 600 bp, Homo sapiens
tcgggcgacaggagccagaaaatcagggacatggctgatggctgcggatgctggaaccttggcccccaaactctggggccgatcagctgctgtttctcctgcggcagggcagtcgctgctggctctgggaagagagtgagggacagaggaaacgtttatcctggagtgcagaaagaatggttctctcaaaataaccagtggcctggccgacctgctctggccctggattccccatccatctcattgtctaaatatttagaaggcggagaagttcccagaggcttctgtacagtcaggtctgctctggtctgggtgctggctccaatctgcgtccacttaggaggcccaactgcccaccccaagtccccaggggatggccctccccctctaccaagccactccaagagccagccccctttctgctccacaaaaaccacagttattggaaaagctccctgccttcccttgccgctggtcccccaccaggcttgggagccctggcatcccaaaggggcaacgggaggaaggggaggctgctgcattgtgggtgatgacgtaggacatgtgcttggtacaaaaagggcctgagacattccacct

SEQ ID NO: 2110 - DNA, 1400 bp, Homo sapiens
gacacagccctcgccctccgccccggcttttctctgcctttctaccgaccatgtgaccccgcaccagccctgcccccacctgccctcccgggcagtactggggaccttccctgggggacggggagggaggaggcagcgactccttggacagaggcctgggccctcagtggactgcctgctcccacagcctgggctgacgtcagaggccgaggccaggaactgagtgaggcccctggtcctgggtctcaggatgggtcctgggggcctcgtgttcatcaagacacccctctgcccagctcaccacatcttcatcaccagcaaacgccaggacttggctcccccatcctcagaactcacaagccattgctccccagctggggaacctcaacctcccccctgcctcggttggtgacagagggggtgggacaggggcggggggttccccctgtacataccctgccataccaaccccaggtattaattctcgctggttttgtttttattttaatttttttgttttgatttttttaataagaattttcattttaagcacatttatactgaaggaatttgtgctgtgtattggggggagctggatccagagctggagggggtgggtccgggggagggagtggctcggaaggggcccccactctcctttcatgtccctgtgccccccagttctcctcctcagccttttcctcctcagttttctctttaaaactgtgaagtactaactttccaaggcctgccttcccctccctcccactggagaagccgccagcccctttctccctctgcctgaccactgggtgtggacggtgtggggcagccctgaaaggacaggctcctggccttggcacttgcctgcacccaccatgaggcatggagcagggcagagcaagggccccgggacagagttttcccagacctggctcctcggcagagctgcctcccgtcagggcccacatcatctaggctccccagcccccactgtgaaggggctggccaggggcccgagctgcccccacccccggcctcagccaccagcacccccatagggcccccagacaccacacacatgcgcgtgcgcacacacacaaacacacacacactggacagtagatgggccgacacacacttggcccgagttcctccatttccctggcctgccccccacccccaacctgtcccacccccgtgccccctccttaccccgcaggacgggcctacaggggggtctcccctcacccctgcacccccagctgggggagctggctctgccccgacctccttcaccaggggttggggccccttcccctggagcccgtgggtgcacctgttactgttgggctttccactgagatctactggataaagaataaagttctatttattct

SEQ ID NO: 2111 - DNA, 1400 bp, Homo sapiens; identical to SEQ ID NO: 2110

SEQ ID NO: 2112 - DNA, 1400 bp, Homo sapiens
ccaagttcaagtgggaacacagcagagcacagtcctagcatctcacccagctcagtggaaaacagtggggtcagtcagtcaccactcgtgcaataagacattttctagctacttcaaacattccccagtaccttcagttccaggatttaaaatgcaagaaaaaacatttttactgctgcttagtttttggactgaaaagatattaaaactcaagaaggaccaagaagttttcatatgtatcaatatatatactcctcactgtgtaacttacctagaaatacaaacttttccaattttaaaaaatcagccatttcatgcaaccagaaactagttaaaagcttctattttcctctttgaacactcaagatgcatggcaaagacccagtcaaaatgatttacccctggttaagtttctgaagactttgtacatacagaagtatggctctgttctttctatactgtatgtttggtgctttccttttgtcttgcatactcaaaataaccatgacaccaaggttatgaaatagactactgtacacgtctacctaggttcaaaaagataactgtcttgctttcatggaatagtcaagacatcaaggtaaggaaacaggactattgacaggactattgtacagtatgacaagataaggctgaagatattctactttagttagtatggaagcttgtctttgctctttctgatgctctcaaactgcatcttttatttcatgttgcccagtaaaagtatacaaattccctgcactagcagaagagaattctgtatcagtgtaactgccagttcagttaatcaaatgtcatttgttcaattgttaatgtcactttaaattaaaagtggtttattacttgtttaatgacataactacacagttagttaaaaaaaatttttttacagtaatgatagcctccaaggcagaaacacttttcagtgttaagtttttgtttacttgttcacaagccattagggaaatttcatgggataattagcaggctggtctaccactggaccatgtaactctagtgtccttcctgattcatgcctgatattgggatttttttccagcccttcttgatgccaagggctaattatattacatcccaaagaaacaggcatagaatctgcctcctttgaccttgttcaatcactatgaagcagagtgaaagctgtggtagagtggttaacagatacaagtgtcagtttcttagttctcatttaagcactactggaatttttttttttgatatattagcaagtctgtgatgtactttcactggctctgtttgtacattgagattgtttgtttaacaatgctttctatgttcatatactgtttacctttttccatggactctcctggcaaagaataaaatatatttatttt

SEQ ID NO: 2113 - DNA, 600 bp, Homo sapiens
ctgcagggtgtgtgctagcctctgtgccccgtccttgtgccaggtcaaggtgggggcaagctgggccctgcatttctggggcaggaacagagggtgaaagggacagatagatgcaggtccattctgcacctcttggctcgggtgcagagttcaccctgtgccctccgttataagtccctcccccagccctgtcatgtgccttgggctcctcctgccctccatctcagccattggggcagggaccctcctacactacagaggggccaggggatccctctctccctagtgccttccaccctttactcccccagagcagcttggcccagggaggggggatgctgcttagctgatcccgccctgacccagaggaagcctctatttatttattagcttttgtttacaccgtggaattgacccttcctccaggggtcttgggtgggggagcccagggcccctgtgacccctcctttcttcctccaatccccagtttgtatttagctgccaaataagattccccattggctccctgtgttctcttggggggtcagggtgctgtcccctcccctctgtttacatctcccctctaccccgctgtatcgc

SEQ ID NO: 2114 - DNA, 600 bp, Homo sapiens; identical to SEQ ID NO: 2113

SEQ ID NO: 2115 - DNA, 1400 bp, Homo sapiens
gggcagccagtggagcctgtggttcggctcctcggtgttgtctgtggtggagatggctgagctcgtctttgacctgctggtcatcatgttcctcatgctgctccgaaggttccgaagccgatactggtctccaggccgagggggcaggggtgctcaggaggtagcctccaccctggcatcctcccctccttcccacttctgcccccaccccatgtctctgtccttgtcccagccaggccctgctccctctccagccttgacagcccctccccctgcctatgccaccctgggcccccgcccatctccagggggctctgcaggggccagttcctccacctgtcctctgggggggccctgagagggaaggagaggtttctcacaccaaggcagatgctcctctggtgggagggtgctggccctggcaagattgaaggatgtgcagggcttcctctcagagccgcccaaactgccgttgatgtgtggaggggaagcaagatgggtaagggctcaggaagttgctccaagaacagtagctgatgaagctgcccagaagtgccttggctccagccctgtaccccttggtactgcctctgaacactctggtttccccacccaactgcggctaagtctctttttcccttggatcagccaagcgaaacttggagctttgacaaggaactttcctaagaaaccgctgataaccaggacaaaacacaaccaagggtacacgcaggcatgcacgggtttcctgcccagcgacggcttaagccagcccccgactggcctggccacactgctctccagtagcacagatgtctgctcctcctcttgaacttgggtgggaaaccccacccaaaagccccctttgttacttaggcaattccccttccctgactcccgagggctagggctagagcagacccgggtaagtaaaggcagacccagggctcctctagcctcatacccgtgccctcacagagccatgccccggcacctctgccctgtgtctttcatacctctacatgtctgcttgagatatttcctcagcctgaaagtttccccaaccatctgccagagaactcctatgcatcccttagaaccctgctcagacaccattacttttgtgaacgcttctgccacatcttgtcttccccaaaattgatcactccgccttctcctgggctcccgtagcacactataacatctgctggagtgttgctgttgcaccatactttcttgtacatttgtgtctcccttcccaactagactgtaagtgccttgcggtcagggactgaatcttgcccgtttatgtatgctccatgtctagcccatcatcctgcttggagcaagtaggcaggagctcaataaatgtttgttgcatgaaaaaaaaaaaaaaaaaa

SEQ ID NO: 2116 - DNA, 1400 bp, Homo sapiens
ccagccatggtctaaggacatggatcgggtgcccccagacgtgtgcacaggggaccctctgccccactctgggcttttcagatactctgaccaaaaagcctgctttaaaccgcaagatggggcctgggcatgcgcaggaggagccatcgggtactacgcagcaacactcacaactgtccaggctgagataaatcccgggacctgaactattagcacgtcactagagactgggagccgaggcagtggtgctggcccaagtgaaggccagagtgaggactgatgcagctctttacgggtcttgagagggaaggactcttccaaagccccaaagccgagggtttcacccacactgccagcctgggttggggcccaaggatgtgaccttgagtgtcaaggctggacagctactgccagatgccaaagataggagaaagtgccagccctgaagctggagccgcttgtgaataaactgttcttcatcattgacactggagaaaggtgtcctccatgccctcaggcagcagagaactggcccagagcccttggagtgttggtggagatcagagtgccgtggtggaggtctgggactatgtcagagtgtcctcactttggggcatgggtggctccaggagatggatttagttattcaattttgtggatgaataaattgaggcacagaaagattaagttaccggcccaaggtgacacagtgaggaggtggcagagctaggatttgaccccagacaatctgacttcatgattgtggcatccaattcgtgtctgtgcctcaatttgtgcaaacgactgtgtcactttgcttggggagggggagcatcccacccacatgccctgggcaggtgacccaagacagagctgacccctccaccaccaaaggcctgtctctcaccaacaagccaactgctcacagatgacccacttcataccacattcacatctggccacctgactccagctatcaggtattaagtcccgggcagcgataagcccccccacaacagtgtgttagctctgtcttagcaacctgataggttagcataggggctgcaaatgttgttccgccacaccaaatccctgtttttgtccatgaactaagaattttattttattttattttttattttttgtagaaataggatctcactatgttgcccaggctgttcttgaactcctggcctcaaatgatcttcccacttcagcctcccaaagtgcagggattacaggcacaagccaccgtgcccagccaagaatttttatttttgcttttaaatacccaaagaagaagattctgtgactcatggaaatgatatgagattcgaattccagtgtctataaataaagttttattggtacacagccccaaaaaaaaaaaaaaaaaaaaa

SEQ ID NO: 2117 - DNA, 600 bp, Homo sapiens
gtggtcttctctcgcaccgcggccaacagcgacggcacggtggcttgcaacatgctcatgccagagcccgctcaacgctggctggtgggcttcgtgttgtacacatttctcatgggcttcctgctgcccgtgggggctatctgcctgtgctacgtgctcatcattgctaagatgcgcatggtggccctcaaggccggctggcagcagcgcaagcgctcggagcgcaagatcaccttaatggtgatgatggtggtgatggtgtttgtcatctgctggatgcctttctacgtggtgcagctggttaacgtgtttgctgagcaggacgacgccacggtgagtcagctgtcggtcatcctcggctatgccaacagctgcgccaaccccatcctctatggctttctctcagacaacttcaagcgctctttccaacgcatcctatgcctcagctggatggacaacgccgcggaggagccggttgactattacgccaccgcgctcaagagccgtgcctacagtgtggaagacttccaacctgagaacctggagtccggcggcgtcttccgtaatggcacctgcacgtcccggatcacgacgctctga

SEQ ID NO: 2118 - DNA, 600 bp, Homo sapiens
ctgctggtcatcttgcccatcatgatatatgctgggctccggagcaaccagtgggggagaagcagctgcaccatcaactggccaggtgaatctggggcttggtacacagggttcatcatctacactttcattctggggttcctggtacccctcaccatcatctgtctttgctacctgttcattatcatcaaggtgaagtcctctggaatccgagtgggctcctctaagaggaagaagtctgagaagaaggtcacccgaatggtgtccatcgtggtggctgtcttcatcttctgctggcttcccttctacatattcaacgtttcttccgtctccatggccatcagccccaccccagcccttaaaggcatgtttgactttgtggtggtcctcacctatgctaacagctgtgccaaccctatcctatatgccttcttgtctgacaacttcaagaagagcttccagaatgtcctctgcttggtcaaggtgagcggcacagatgatggggagcggagtgacagtaagcaggacaaatcccggctgaatgagaccacggagacccagaggaccctcctcaatggagacctccaaaccagtatctga

SEQ ID NO: 2119 - DNA, 600 bp, Homo sapiens; identical to SEQ ID NO: 2118

SEQ ID NO: 2120 - DNA, 600 bp, Homo sapiens
gtggtgatcgccctcatctacttcctgccgctcgcggtgatgtttgtagcctacagcgtcatcggcctcacgctctggaggcgcgcagtgcccggacatcaggcgcacggtgccaacctccgccatctgcaggccaagaagaagtttgtgaagaccatggtgctggtggtgctgacgtttgccatctgctggctgccctaccacctctacttcatcctgggcagcttccaggaggacatctactgccacaagttcatccagcaagtctacctggcactcttctggttggccatgagctctaccatgtacaatcccatcatctactgctgtctcaaccacaggtttcgctctgggttccggcttgccttccgctgctgcccatgggtcacacccaccaaggaagataagctcgagctgactcccacgacctccctctccacgagagtcaacaggtgtcacactaaggagactttgttcatggctggggacacagccccctccgaggctaccagtggggaggcggggcgtccccaggatggatcagggctatggtttgggtatggtttgcttgcccccaccaaaactcatgttgaaatttga

SEQ ID NO: 2121 - DNA, 600 bp, Homo sapiens; identical to SEQ ID NO: 2120

SEQ ID NO: 2122 - DNA, 1400 bp, Homo sapiens
gtgatgtggatcatcttagcccacaaaagaatgaggacagtgacgaactattttctggtgaacctggccttcgcggaggcctccatggctgcattcaatacagtggtgaacttcacctatgctgtccacaacgaatggtactacggcctgttctactgcaagttccacaacttctttcccatcgccgctgtcttcgccagtatctactccatgacggctgtggcctttgataggtacatggccatcatacatcccctccagccccggctgtcagccacagccaccaaagtggtcatctgtgtcatctgggtcctggctctcctgctggccttcccccagggctactactcaaccacagagaccatgcccagcagagtcgtgtgcatgatcgaatggccagagcatccgaacaagatttatgagaaagtgtaccacatctgtgtgactgtgctgatctacttcctccccctgctggtgattggctatgcatacaccgtagtgggaatcacactatgggccagtgagatccccggggactcctctgaccgctaccacgagcaagtctctgccaagcgcaaggtggtcaaaatgatgattgtcgtggtgtgcaccttcgccatctgctggctgcccttccacatcttcttcctcctgccctacatcaacccagatctctacctgaagaagtttatccagcaggtctacctggccatcatgtggctggccatgagctccaccatgtacaaccccatcatctactgctgcctcaatgacaggttccgtctgggcttcaagcatgccttccggtgctgccccttcatcagcgccggcgactatgaggggctggaaatgaaatccacccggtatctccagacccagggcagtgtgtacaaagtcagccgcctggagaccaccatctccacagtggtgggggcccacgaggaggagccagaggacggccccaaggccacaccctcgtccctggacctgacctccaactgctcttcacgaagtgactccaagaccatgacagagagcttcagcttctcctccaatgtgctctcctaggccacagggcctttggcaggtgcagcccccactgcctttgacctgcctcccttcatgcatggaaattcccttcatctggaaccatcagaaacaccctcacactgggacttgcaaaaagggtcagtatgggttagggaaaacattccatccttgagtcaaaaaatctcaattcttccctatctttgccaccctcatgctgtgtgactcaaaccaaatcactgaactttgctgagcctgtaaaataaaaggtcggaccagcttttcctcaagagcccaatgcattccatttctggaagtgactttggctgcatgcgagtgctcatttcaggatg

SEQ ID NO: 2123 - DNA, 1400 bp, Homo sapiens; identical to SEQ ID NO: 2122

SEQ ID NO: 2124 - DNA, 1400 bp, Homo sapiens
ggccaacctcaccaaccagttcgtgcagccgtcctggcgcatcgcgctctggtccctggcgtatggtgtggtggtggcagtggcagttttgggaaatctcatcgtcatctggatcatcctggcccacaagcgcatgaggactgtcaccaactacttccttgtgaacctggctttctccgacgcctccatggccgccttcaacacgttggtcaatttcatctacgcgcttcatagcgagtggtactttggcgccaactactgccgcttccagaacttctttcctatcacagctgtgttcgccagcatctactccatgacggccattgcggtggacaggtatatggctattattgatcccttgaaacccagactgtctgctacagcaaccaagattgtcattggaagtatttggattctagcatttctacttgccttccctcagtgtctttattccaaaaccaaagtcatgccaggccgtactctctgctttgtgcaatggccagaaggtcccaaacaacatttcacttaccatattatcgtcattatactggtgtactgtttcccattgctcatcatgggtattacatacaccattgttggaattactctctggggaggagaaatcccaggagatacctgtgacaagtatcatgagcagctaaaggccaaaagaaaggttgtcaaaatgatgattattgttgtcatgacatttgctatctgctggctgccctatcatatttacttcattctcactgcaatctatcaacaactaaatagatggaaatacatccagcaggtctacctggctagcttttggctggcaatgagctcaaccatgtacaatcccatcatctactgctgtctgaataaaagatttcgagctggcttcaagagagcatttcgctggtgtcctttcatcaaagtttccagctatgatgagctagagctcaagaccaccaggtttcatccaaaccggcaaagcagtatgtacaccgtgaccagaatggagtccatgacagtcgtgtttgaccccaacgatgcagacaccaccaggtccagtcggaagaaaagagcaacgccaagagacccaagtttcaatggctgctctcgcaggaattccaaatctgcctccgccacttcaagtttcataagctcaccctatacctctgtggatgaatattcttaattccatttcctgaggtaaaagattagtgtgagaccatcatggtgccagtctaggaccccattctcctatttatcagtcctgtcctatataccctctagaaacagaaagcaatttttaggcagctatggtcaaattgagaaaggtagtgtataaatgtgacaaagacactaataacatgttagcctccacccaaaataaaatgggctttaaattt

SEQ ID NO: 2125 - DNA, 600 bp, Homo sapiens
tagacggagtcttgctctgtcccccaggctggagtgcagtggcgcaatctcagctcactgcaacctccacctcccgggttcaagcgattctcctgcctcagcctcctgagtagctgggactataggcgcgcgccaccacgcccggctaatttttgtatttttagtagagacggggtttcaccgtgttggccaggctggtcttgaactcctgacctcaggtgattcaccagcctcagcctcccaaagtgctgggatcacaggcatgaaccaccacacctggccattttttttttttttttagacggagtctcactctgtggcccagcctggagtacagtggcacgatctcggctcactgcaacctccgcctcccgggttcaagcgattctcgtgcctcagcctcccgagcagctgggattacaggcgtaagccactgcgcccggccttgcatgctctttgaccctgaatttgacctacttgctggggtacagttgcttccttttgaacctccaacagggaaggctctgtccagaaaggattgaatgtgaaacgggggcacccccttttcttgccaaaatatatctctgcctttggttttat

SEQ ID NO: 2126 - DNA, 600 bp, Homo sapiens; identical to SEQ ID NO: 2125

SEQ ID NO: 2127 - DNA, 600 bp, Homo sapiens
ctcctccacgcggtttccagtgtccacactgctgcccgtgcagtgggaccagattccaggtccaaagtcaccatgaggccaccctggaatcagaactgcacaatcaagagggaacccatgggactctctgctacattcagttcttgtgtcgtttgtgaaagttcttaacctgcccaaaaacccccttttccccaagctgcccayggggcttcggcgccaaaggtgacccgcgccaacctccctccccccccagtgcctrtgacggcggcacagcagccagcgggtgggggacgcctgtgttcacccatggtgcccatgtcgttcttctctccctgtgacacagcttgtacagtctgattctttttatctggggtaggggggcttttatgtttgtccgatggagatttgttttgttttgcttcattttatgcttttttattttagttttgatgttctgaggtttgctttggtttttccattttctttggcatttatttattcgtgcttcaaatcacagtcatattaaaagctggtcttgtggaaaaaaaaaaaaaaaaaaaaaaaaaaaaaaaaaaaaaaaaaaaaaaaaaaaaaaaaaaa

SEQ ID NO: 2128 - DNA, 1400 bp, Homo sapiens
tgggggtcggggatccccttaagaagtggtaatggggacaagatgcggccctggtgctgtaggctacatcctgatacctataagttcacccccaccccacagctgctggagagaaatcccaagaggcagcccttcctcaccatcccattaaagacckggctggttagcgtccagctcagggagaagggcgctagtgcctaacctcactggtccctctcccggaggcccttgtagagggccacgtccataaattttcttatggaactctcccacatcctcttccccaacttcatttgcttctctcaacaacctcatctgcattttctatttctatatgatacagactctatattgctatatctctgtatatactttcccagccctgtctgtctccaccccatcccctcttgtctctgagaaccattctcccaccccaagttccaccttctatgtttctactccctccctggtctctgaatgccttygcctgtataaagagttggactctctcccctggtgtctgtactgtgtacacacatccctctgagaagcacaaggagacgacacgcgcattgtaacctttgcactgtctcagtggcgacaaaggaagctgtgaatcacaagctctgcctctttctggcctcaccctctcccccaacccgggcaccctcggccctccctgcagccttaacattctcttcccctgctcctcctatcccattgccctctgcccagctgacagtggcatccccagggaaggggttgctgtagagatagcccccacccaggggatggaggtctaccctggacactaagccaagtgtgtcagagacagaagggagctggggattggcgactcctgaagttggggcagtgggatgctgacaggcagaagctgaggtcctcagtcagtggcctttcctccttctgggtgcccagccccctttcctcacctgatacccaagcccaccacttttattttctggtgaggtgggtttgggaggaaagagaggcctagaggaggagttgaaagctctgctgttgtctcaccctatcttaatgagagacaagtgaggtggagggcctgccccccctccctccaccagacactccttccaggcctgagccccaacccctcttcaggccttccttccctagctgtgtcttggtcttcaatcccagaacaggacctgtgagcagctgcattggcctggagctggagagtaaggctgtaggatctttggaatctcttggttcctaagagtttcctcagagatcatacctccccagagggaagcaggaatgaggccaaaaagtgtgcattggataggggaacagcaggcagggctctgggtgacgcatgcctctggtctaataaactgggtttcaaccaaaaaaaa

SEQ ID NO: 2129 - DNA, 1388 bp, Homo sapiens
caggcagtgcaggagtatggttgagatgctaccaactgccattctgctggtcttggcagtgtccgtggttgctaaagataacgccacgtgtgatggcccctgtgggttacggttcaggcaaaacccacagggtggtgtccgcatcgtcggcgggaaggctgcacagcatggggcctggccctggatggtcagcctccagatcttcacgtacaacagccacaggtaccacacatgtggaggcagcttgctgaattcacgatgggtgctcactgctgctcactgcttcgtcggcaaaaataatgtgcatgactggagactggttttcggagcaaaggaaattacatatgggaacaataaaccagtaaaggcgcctgtgcaagagagatatgtggagaaaatcatcattcatgaaaaatacaactctgcgacagagggaaatgacattgccctcgtggagatcacccctcccatttcgtgtgggcgcttcattgggccgggctgcctgccccacttgaaggcaggcctccccagaggctcccagagctgctgggtggccggctggggatatatagaagagaaagcccccaggccatcatctatactgatggaggcacgtgtggatctcatcgacctggacttgtgtaactcgacccagtggtacaatgggcgcgttcagccaaccaatgtgtgcgcggggtatcctgtaggcaagatcgacacctgccagggagacagcggcgggcctctcatgtgcaaagacagcaaggaaagcgcctatgtggtcgtgggaatcacaagctggggggtaggctgtgcccgtgccaagcgccccggaatctacacggccacctggccttatctgaactggatcgcctccaagattggttctaacgctttgcgtatgattcaatcggccacccctccaccgcccaccactcgaccgcccccgattcgaccccccttctcccaccctatctctgctcaccttccttggtatttccaaccgccccctcgaccacttccaccccgaccaccggcagcccagccccgacccccaccttcacccccgcccccacccccacctccagcctcacctttacccccacccccacccccacccccacctacaccctcatctaccacaaaacttccccaaggactttcttttgccaagcgcctacagcagctcatagaggtcttgaaggggaagacctattccgacggaaagaaccattatgacatggagaccacagagctcccagaactgacctcgacctcctgatctgacctggttctcaacagacccagtgagcccttcactcctgagaaaaaggaaagatgaaataaataaataaacatatatatatagatataaaaaaaaaaaaaaa

SEQ ID NO: 2130 - DNA, 1400 bp, Homo sapiens
tccagcaactgctctgcccagtgccacaaccatggggtgtgcaaccacaagcaggagtgccactgccacgcgggctgggccccgccccactgcgcgaagctgctgactgaggtgcacgcagcgtccgggagcctccccgtcctcgtggtggtggttctggtgctcctggcagttgtgctggtcaccctggcaggcatcatcgtctaccgcaaagcccggagccgcatcctgagcaggaacgtggctcccaagaccacaatggggcgctccaaccccctgttccaccaggctgccagccgcgtgccggccaagggcggggctccagccccatccaggggcccccaagagctggtccccaccacccacccgggccagcccgcccgacacccggcctcctcggtggctctgaagaggccgccccctgctcctccggtcactgtgtccagcccacccttcccagttcctgtctacacccggcaggcaccaaagcaggtcatcaagccaacgttcgcacccccagtgcccccagtcaaacccggggctggtgcggccaaccctggtccagctgagggtgctgttggcccaaaggttgccctgaagccccccatccagaggaagcaaggagccggagctcccacagcaccctaggggggcacctgcgcctgtgtggaaatttggagaagttgcggcagagaagccatgcgttccagccttccacggtccagctagtgccgctcagccctagaccctgactttgcaggctcagctgctgttctaacctcagtaatgcatctacctgagaggctcctgctgtccacgccctcagccaattccttctccccgccttggccacgtgtagccccagctgtctgcaggcaccaggctgggatgagctgtgtgcttgcgggtgcgtgtgtgtgtacgtgtctccaggtggccgctggtctcccgctgtgttcaggaggccacatatacagcccctcccagccacacctgcccctgctctggggcctgctgagccggctgccctgggcacccggttccaggcagcacagacgtggggcatccccagaaagactccatcccaggaccaggttcccctccgtgctcttcgagagggtgtcagtgagcagactgcaccccaagctcccgactccaggtcccctgatcttgggcctgtttcccatgggattcaagagggacagccccagctttgtgtgtgtttaagcttaggaatgccctttatggaaagggctatgtgggagagtcagctatcttgtctggttttcttgagacctcagatgtgtgttcagcagggctgaaagcttttattctttaataatgagaaatgtatattttactaataaattattgaccgagttctgtagattcttgttaga

SEQ ID NO: 2131 - DNA, 600 bp, Homo sapiens
tcacaagtaacagttgaagaaaaaatggcaagagatcatatcctcagaccaggtggaattacttaaattttaaagcctgaaaattccaatttgggggtgggaggtggaaaaggaacccaattttcttatgaacagatatttttaacttaatggcacaaagtcttagaatattattatgtgccccgtgttccctgttcttcgttgctgcattttcttcacttgcaggcaaacttggctctcaataaacttttaccacaaattgaaataaatatatttttttcaactgccaatcaaggctaggaggctcgaccacctcaacattggagacatcacttgccaatgtacataccttgttatatgcagacatgtatttcttacgtacactgtacttctgtgtgcaattgtaaacagaaattgcaatatggatgtttctttgtattataaaatttttccgctcttaattaaaaattactgtttaattgacatactcaggataacagagaatggtggtattcagtggtccaggattctgtaatgctttacacaggcagttttgaaatgaaaatcaatttaccccatggtacccggatcctcgaattc

SEQ ID NO: 2132 - DNA, 600 bp, Homo sapiens; identical to SEQ ID NO: 2131

SEQ ID NO: 2133 - DNA, 1400 bp, Homo sapiens
ggtctccgaggcccaggagactccagaccacgccatcttccggtggcttgccatctccttcgcctccgcacacctcaccttgaccgagccctaccgcggaggctgccaagcccaggactacaccggcggcatgggcatcgtcaacggggccaagtggaacccccggaccgggactatcaatgacttcagttacctgcataccaactgcctggagctctccttctacctgggctgtgacaagttccctcatgagagtgagctgccccgcgagtgggagaacaacaaggaggcgctgctcaccttcatggagcaggtgcaccgcggcattaagggggtggtgacggacgagcaaggcatccccattgccaacgccaccatctctgtgagtggcattaatcacggcgtgaagacagccagtggtggtgattactggcgaatcttgaacccgggtgagtaccgcgtgacagcccacgcggagggctacaccccgagcgccaagacctgcaatgttgactatgacatcggggccactcagtgcaacttcatcctggctcgctccaactggaagcgcatccgggagatcatggccatgaacgggaaccggcctatcccacacatagacccatcgcgccctatgaccccccaacagcgacgcctgcagcagcgacgcctacaacaccgcctgcggcttcgggcacagatgcggctgcggcgcctcaacgccaccaccaccctaggcccccacactgtgcctcccacgctgccccctgcccctgccaccaccctgagcactaccatagagccctggggcctcataccgccaaccaccgctggctgggaggagtcggagactgagacctacacagaggtggtgacagagtttgggaccgaggtggagcccgagtttgggaccaaggtggagcccgagtttgagacccagttggagcctgagttcgagacccagctggaacccgagtttgaggaagaggaggaggaggagaaagaggaggagatagccactggccaggcattccccttcacaacagtagagacctacacagtgaactttggggacttctgagatcagcgtcctaccaagaccccagcccaactcaagctacagcagcagcacttcccaagcctgctgaccacagtcacatcacccatcagcacatggaaggcccctggtatggacactgaaaggaagggctggtcctgcccctttgagggggtgcaaacatgactgggacctaagagccagaggctgtgtagaggctcctgctccacctgccagtctcgtaagagatggggttgctgcagtgttggagtaggggcagagggagggagccaaggtcactccaataaaacaagctcatggcaaaaaaaaaaaaaaaaaaaaa

SEQ ID NO: 2134 - DNA, 1400 bp, Homo sapiens
gcacagatcattaatgacgccttcaacctggccagtgcccataaggtccctgtcactctggcgctgaacaacaccctcttcctgattgaagagagacagtacatgccctgggaggccgccctgagcagcctgagctacttcaagctcatgtttgaccgctccgaggtctatggccccatgaagaactacctgaagaagcaggtcacacccctcttcattcacttcagaaataataccaacaactggagggagatcccagaaaacctgatggaccagtacagcgaggttaatgccatcagcaccgcctgctccaacggagttccagagtgtgaggagatggtctctggccttttcaagcagtggatggagaaccccaataataacccgatccaccccaacctgcggtccaccgtctactgcaacgctatcgcccagggcggggaggaggagtgggacttcgcctgggagcagttccgaaatgccacactggtcaatgaggctgacaagctccgggcagccctggcctgcagcaaagagttgtggatcctgaacaggtacctgagctacaccctgaacccggacttaatccggaagcaggacgccacctctaccatcatcagcattaccaacaacgtcattgggcaaggtctggtctgggactttgtccagagcaactggaagaagctttttaacgattatggtggtggctcgttctccttctccaacctcatccaggcagtgacacgacgattctccaccgagtatgagctgcagcagctggagcagttcaagaaggacaacgaggaaacaggcttcggctcaggcacccgggccctggagcaagccctggagaagacgaaagccaacatcaagtgggtgaaggagaacaaggaggtggtgctccagtggttcacagaaaacagcaaatagtccccagcccttgaagtcacccggccccgatgcaaggtgcccacatgtgtccatcccagcggctggtgcagggcctccattcctggagcccgaggcaccagtgtcctcccctcaaggacaaagtctccagcccacgttctctctgcctgtgagccagtctagttcctgatgacccaggctgcctgagcacctcccagcccctgcccctcatgccaaccccgccctaggcctggcatggcacctgtcgcccagtgccctggggctgatctcagggaagcccagctccagggccagatgagcagaagctctcgatggacaatgaacggccttgctgggggccgccctgtaccctctttcacctttccctaaagaccctaaatctgaggaatcaacagggcagcagatctgtatatttttttctaagagaaaatgtaaataaaggatttctagatgaaaaaaaaaaaaaaaaa

SEQ ID NO: 2135 - DNA, 1400 bp, Homo sapiens; identical to SEQ ID NO: 2134

SEQ ID NO: 2136 - DNA, 1400 bp, Homo sapiens
catgatgcggcgcgccttcgagacggtggccatcgaccgcctggaccgcatcggcaagaagaattccatcctcctgcacaaggtgcagcatgacctcaactcgggcgtattcaacaaccaggagaacgccatcatccaggagatcgtcaagtacgaccgcgagatggtgcagcaggccgagctgggtcagcgcgtgggcctcttcccgccgccgccgccgccgccgcaggtcacctcggccatcgccacgctgcagcaggcggcggccatgagcttctgcccgcaggtggcgcggccgctcgtggggccgctggcgctcggctcgccgcgcctcgtgcgccgcccgcccccggggcccgcacctgccgccgcctcacccgggcccccgccccccgccagccccccgggcgcgcccgccagcccccgggcaccgcggacctcgccctacggcggcctgcccgccgccccccttgctgggcccgccctgcccgcgcgccgcctgagccgcgcgtcgcgcccactgtccgcctcgcagccctcgctgcctcacggcgcccccggccccgcggcctccacacgcccggccagcagctccacaccgcgcttggggcccacgcccgctgcccgggccgccgcgcccagcccggaccgcagggactcggcctcacccggcgccgccggcggcctggacccccaggactccgcgcgctcgcgcctctcgtccaacttgtgaccctcgccgaccgccccgcgggcccaggcgggccgggggcggggccgtcatccagaccaaagccatgccattgcgctgccccggccgccagtccgcccagaagccatagacgagacgtaggtagccgtagttggacggacgggcagggccggcggggcagccccctccgcgcccccggccgtcccccctcatcgccccgcgcccacccccatcgcccctgcccccggcggcggcctcgcgtgcgagggggctcccttcacctcggtgcctcagttcccccagctgtaagacagggacggggcggcccagtggctgagaggagccggctgtggagccccgcccgccccccaccctctaggtggcccccgtccgaggaggatcgttttctaagtgcaatacttggcccgccggcttcccgctgcccccatcgcgctcacgcaataaccggcccggcccccgtccgcgcgcgtcccccggtgacctcggggagcagcaccccgcctccctccagcactggcaccgagaggcaggcctggctgcgcagggcgcgggggggaggctggggtcccgccgccgtgatgaatgtactgacgagccgaggcagcagtgcccccaccgtggccccccacgccccattaacccccacacccccattccgcgcaataaa

SEQ ID NO: 2137 - DNA, 1400 bp, Homo sapiens; identical to SEQ ID NO: 2136

SEQ ID NO: 2138 - DNA, 600 bp, Homo sapiens
agctggtggcccccacccagtaccgcatctccctgcagtttgacttctttgagacagagggcaatgatgtgtgcaagtacgacttcgtggaggtgcgcagtggactcacagctgactccaagctgcatggcaagttctgtggttctgagaagcccgaggtcatcacctcccagtacaacaacatgcgcgtggagttcaagtccgacaacaccgtgtccaaaaagggcttcaaggcccacttcttctcagaaaagaggccagctctgcagccccctcggggacgcccccaccagctcaaattccgagtgcagaaaagaaaccggaccccccagtgaggcctgccaggcctcccggaccccttgttactcaggaacctcaccttggacggaatgggatgggggcttcggtgcccaccaaccccccacctccactctgccattccggcccacctccctctggccggacagaactggtgctctcttctccccactgtgcccgtccgcggaccggggacccttccccgtgccctaccccctcccattttgatggtgtctgtgacatttcctgttgtgaagtaaaagagggacccctgcgtcctgc

SEQ ID NO: 2139 - DNA, 600 bp, Homo sapiens; identical to SEQ ID NO: 2138

SEQ ID NO: 2140 - DNA, 1311 bp, Homo sapiens
gggaggagagaaaagccatggccgacaaggtcctgaaggagaagagaaagctgtttatccgttccatgggtgaaggtacaataaatggcttactggatgaattattacagacaagggtgctgaacaaggaagagatggagaaagtaaaacgtgaaaatgctacagttatggataagacccgagctttgattgactccgttattccgaaaggggcacaggcatgccaaatttgcatcacatacatttgtgaagaagacagttacctggcagggacgctgggactctcagcagctcctcaggcagtgcaggacaacccagctatgcccacatcctcaggctcagaagggaatgtcaagctttgctccctagaagaagctcaaaggatatggaaacaaaagtcggcagagatttatccaataatggacaagtcaagccgcacacgtcttgctctcattatctgcaatgaagaatttgacagtattcctagaagaactggagctgaggttgacatcacaggcatgacaatgctgctacaaaatctggggtacagcgtagatgtgaaaaaaaatctcactgcttcggacatgactacagagctggaggcatttgcacaccgcccagagcacaagacctctgacagcacgttcctggtgttcatgtctcatggtattcgggaaggcatttgtgggaagaaacactctgagcaagtcccagatatactacaactcaatgcaatctttaacatgttgaataccaagaactgcccaagtttgaaggacaaaccgaaggtgatcatcatccaggcctgccgtggtgacagccctggtgtggtgtggtttaaagattcagtaggagtttctggaaacctatctttaccaactacagaagagtttgaggatgatgctattaagaaagcccacatagagaaggattttatcgctttctgctcttccacaccagataatgtttcttggagacatcccacaatgggctctgtttttattggaagactcattgaacatatgcaagaatatgcctgttcctgtgatgtggaggaaattttccgcaaggttcgattttcatttgagcagccagatggtagagcgcagatgcccaccactgaaagagtgactttgacaagatgtttctacctcttcccaggacattaaaataaggaaactgtatgaatgtctgctgggcaggaagtgaagagatcgttctgtaaaaggtttttggaattatgtctgctgaataataaactttttttgaaataataaatctggtagaaaaatgaaaaaaaaaaaaaaaaaa

SEQ ID NO: 2141 - DNA, 1311 bp, Homo sapiens; identical to SEQ ID NO: 2140

SEQ ID NO: 2142 - DNA, 1400 bp, Homo sapiens
ccagaaaggcggggcacctgcgcagatagagacaatcttacccgcaggttttcagatctaggatttgaagtgaaatgctttaatgatcttaaagcagaagaactactgctcaaaattcatgaggtgtcaactgttagccacgcagatgccgattgctttgtgtgtgtcttcctgagccatggcgaaggcaatcacatttatgcatatgatgctaaaatcgaaattcagacattaactggcttgttcaaaggagacaagtgtcacagcctggttggaaaacccaagatatttatcattcaggcatgtcggggaaaccagcacgatgtgccagtcattcctttggatgtagtagataatcagacagagaagttggacaccaacataactgaggtggatgcagcctccgtttacacgctgcctgctggagctgacttcctcatgtgttactctgttgcagaaggatattattctcaccgggaaactgtgaacggctcatggtacattcaagatttgtgtgagatgttgggaaaatatggctcctccttagagttcacagaactcctcacactggtgaacaggaaagtttctcagcgccgagtggacttttgcaaagacccaagtgcaattggaaagaagcaggttccctgttttgcctcaatgctaactaaaaagctgcatttctttccaaaatctaattaattaatagaggctatctaattccacactctgtattgaaaatggctttctcagccaggcgtggttactcacacctgtaatcccagcactttgggagtccaaggtgggcggatcacctgaggtcgggagttcgagaccagcctgaccaacatggagaagccccgtctctactaaaaatgcaaaaaaaaatttagctaggcatggcggcgcatgcctgcaatcccagctacttggaaggctgaggcaggagaatcacttgaacccaggaggtggaggctgcggtgagccgagattgcgccattgcactccagcctgggcaacgagtgaaactccgtctcaaaaaaaagaaaatgtctttctcttccttttatataaatatcgttagggtgaagcattatggtctaatgattcaaatgttttaaagtttaatgcctagcagagaactgccttaaaaaaaaaaaaaaaaagttcatgttggccatggtgaaagggtttgatatggagaaacaaaatcctcaggaaattagataaataaaaatttataagcatttgtattattttttaataaactgcagggttacacaaaaatctagctgatttaacttgtattttgtcacttttttataaaagtttattgtttgatgtttttaaaggtttttgaaatccaggaattaaatcatcccttaataaaatattcgaaattc

SEQ ID NO: 2143 - DNA, 1400 bp, Homo sapiens; identical to SEQ ID NO: 2142

SEQ ID NO: 2144 - DNA, 600 bp, Homo sapiens
aggaccaccaatggattgtggaaaatggagccatgacaagaacaaagccactgactgagatggagtgagctgagacagataagagaataccttggtctcacctatcctgccctcacatcttccaccagcaccttactgcccaggcctatctggaagccacctcaccaaggaccttggaagagcaagggacagtgaggcaggagaagaacaagaaatggatgtaagcctggcccataatgtgaacataagtaatcactaatgctcaacaatttatccattcaatcatttattcattgggttgtcagatagtctatgtatgtgtaaaacaatctgttttggctttatgtgcaaaatctgttatagctttaaaatatatctggaactttttagattattccaagccttattttgagtaaatatttgttacttttagttctataagtgaggaagagtttatggcaaagatttttggcactttgttttcaagatggtgttatcttttgaattcttgataaatgactgtttttttctgcctaatagtaactggttaaaaaacaaatgttcatatttattgattaaaaatgtggttgcttaattcct

SEQ ID NO: 2145 - DNA, 600 bp, Homo sapiens; identical to SEQ ID NO: 2144

SEQ ID NO: 2146 - DNA, 1400 bp, Homo sapiens
tctgctggggatggccactgtgaataactgtgtttcctaccgaaaccctgcagagggaacctggtacatccagtcactttgccagagcctgagagagcgatgtcctcgaggcgatgatattctcaccatcctgactgaagtgaactatgaagtaagcaacaaggatgacaagaaaaacatggggaaacagatgcctcagcctactttcacactaagaaaaaaacttgtcttcccttctgattgatggtgctattttgtttgttttgttttgttttgtttttttgagacagaatctcgctctgtcgcccaggctggagtgcagtggcgtgatctcggctcaccgcaagctccgcctcccgggttcaggccattctcctgcctcagcctcccgagtagctgggactacaggggcccgccaccacacctggctaattttttaaaaatatttttagtagagacagggtttcactgtgttagccagggtggtcttgatctcctgacctcgtgatccacccacctcggcctcccaaagtgctgggattacaggcgtgagccaccgcgcctggccgatggtactatttagatataacactatgtttatttactaattttctagattttctactttattaattgttttgcacttttttataagagctaaagttaaataggatattaacaacaataacactgtctcctttctcttacgcttaaggctttgggaatgtttttagctggtggcaataaataccagacacgtacaaaatccagctatgaatatagagggcttatgattcagattgttatctatcaactataagcccactgttaatattctattaactttaattctctttcaaagctaaattccacactaccacattaaaaaaattagaaagtagccacgtatggtggctcatgtctataatcccagcactttgggaggttgaggtgggaggatttgcttgaacccaagaggtccaaggctgcagtgagccatgttcacaccgctgcactcaagcttgggtgacagagcaagaccccgtccccaaaaaaattttttttttaataaacccaaatttgtttgaaaacttttaaaaattcaaatgatttttacaagttttaaataagctctccccaaacttgctttatgccttcttattgcttttatgatatatatatgcttggctaactatatttgctttttgctaacaatgctctggggtctttttatgcatttgcatttgctctttcatctctgcttggattattttaaatcattaggaattaagttatctttaaaatttaagtatcttttttccaaaacattttttaatagaataaaatataatttgatcttaaaaaaaaaaaaaaaaaaaaaaaaaaaaaaaaaaaaaaaa

SEQ ID NO: 2147 - DNA, 1400 bp, Homo sapiens; identical to SEQ ID NO: 2146

SEQ ID NO: 2148 - DNA, 600 bp, Homo sapiens
actcaaggactttgcagccggcacagggtctgctctttctctgccagtgacagacaggctcttagcagcttccagattgacgacaagtgctgaacagtggaggaagagggacagatgaatgccgtggattgcacgtggcctcttgagcagtggctggtccagggctagtgacttgtgtcccatgatccctgtgttgtctctagagcagggattaacctctgcactactgacatgtggggccaggtcaccctttgctgtgaggctgtcctgtacattgtgggatgttcagcactgtcccttgcctcaatgccagtaacgcgtcttcctgagtggtgccaaacaaaaaggttctcaggtgttgccaaatatgtcctggggtataaaactttcctcgcctgacaaccactggtctgtagggatttttggctacacacaaaccagtatcgctcatagatcagcaaaccggggcctactagagtctgaacagctgtaatctatgaattctaagtgaaattttaaaaattgttaatttttcctatattgcattaattttaaaaaaaaaaaaaaaaaaaaaaaaaaaaaaaaaaaaaaaaaaaaaaa

SEQ ID NO: 2149 - DNA, 600 bp, Homo sapiens; identical to SEQ ID NO: 2148

SEQ ID NO: 2150 - DNA, 1400 bp, Homo sapiens
acctggacaacgcagcctccccaaatccttctctgggatcccagtggacagaagcaaggtggctttgtagtggacaaaaacaccaaaatggcctacctccaaatcccaggcattgctaaggttggcacttggaaatacagtctgcaagcaagctcacaaaccttgaccctgactgtcacgtcccgtgcgtccaatgctaccctgcctccaattacagtgacttccaaaacgaacaaggacaccagcaaattccccagccctctggtagtttatgcaaatattcgccaaggagcctccccaattctcagggccagtgtcacagccctgattgaatcagtgaatggaaaaacagttaccttggaactactggataatggagcaggtgctgatgctactaaggatgacggtgtctactcaaggtatttcacaacttatgacacgaatggtagatacagtgtaaaagtgcgggctctgggaggagttaacgcagccagacggagagtgataccccagcagagtggagcactgtacatacctggctggattgagaatgatgaaatacaatggaatccaccaagacctgaaattaataaggatgatgttcaacacaagcaagtgtgtttcagcagaacatcctcgggaggctcatttgtggcttctgatgtcccaaatgctcccatacctgatctcttcccacctggccaaatcaccgacctgaaggcggaaattcacgggggcagtctcattaatctgacttggacagctcctggggatgattatgaccatggaacagctcacaagtatatcattcgaataagtacaagtattcttgatctcagagacaagttcaatgaatctcttcaagtgaatactactgctctcatcccaaaggaagccaactctgaggaagtctttttgtttaaaccagaaaacattacttttgaaaatggcacagatcttttcattgctattcaggctgttgataaggtcgatctgaaatcagaaatatccaacattgcacgagtatctttgtttattcctccacagactccgccagagacacctagtcctgatgaaacgtctgctccttgtcctaatattcatatcaacagcaccattcctggcattcacattttaaaaattatgtggaagtggataggagaactgcagctgtcaatagcctagggctgaatttttgtcagataaataaaataaatcattcatcctttttttgattataaaattttctaaaatgtattttagacttcctgtagggggcgatatactaaatgtatatagtacatttatactaaatgtattcctgtagggggcgatatactaaatgtattttagacttcctgtagggggcgataaaataaaatgctaaacaactgggtaaa

SEQ ID NO: 2151 - DNA, 1400 bp, Homo sapiens
ggctctgctggtccagatcttgcgctcagcacactctagggaataattccactccagagatggggctgcttcaaggtcttttctagctgattgtggcccctccattttccccattttcttatctccctgaccaaaattgctttgacttctaaatgtttctgcttcccagaatgcacctgacttatgaaatggggataatactcccaggaaatagcgcaggacatcacaaggaccaaaaaggcaattcttatttaaatgttactatttggccagctgctgctgtgttttatggcagtgttcagagcttgatcacgttatttcttccttttattaagaaggaagccaattgtccaagtcaggagaatggtgtgatcacctgtcacagacactttgtcccctctccccgccccttcctggagctggcagagctaacgccctgcaggaggaccccggcctctcgagggctggatcagcagccgcctgccctgaggctgccccggtgaatgttattggaattcatccctcgtgcacatcctgttgtgtttaagtcaccagatattttgttcccatcagtttagcccagagatagacagtagaatgcaaatacctccctcccctaaactgactggacggctgccaaggaggccccaaacccaggccccatgcaaaggcacgtggtttccttttctcctctctctgcatctgcgctttccagataagcccaaagacagcaacttctccactcatgacaaatcaactgtgaccctcgctccttccatttctgtccattagaaaccagccttttcagcatctcacccattagcagccccatcacccagtgatcagtcgcctcagtaaagcagatctgtggatggggagcctacgggtggtaagaagtggtgttttgtgtttcatctccagcttggtgttccatggcccctaggcgaggtgatcagggagtggggccaatgggcccccggccctggctttgggaccttgtgctgagggatgatttgctcctgaccttgattaacttaacagttcccagctggaagggacactttcaggacccagtccactgtatggcatttgtgatgcagaattatgcactgacatgaccctgggtgacaggaaagcctttcgagaggcccaaggtggcctcgccagccctgcagtattgatgtgcagtattgcaccacagctctgcggaccttggccattgccgcagtcgcagcttccttttttctgtttgcactgtttgtttgtatgatgttagctaattccactgtgtatataaattgtattttttttaatttgtaaaatgctatttttatttgaacctttggaacttgggagttctcattgtaaccctaacatgtgagaataaaatgtcttctgtc

SEQ ID NO: 2152 - DNA, 600 bp, Homo sapiens
cccagcctccactctcctcgtctaggtttctttacctccagggatcagctgtgtgtgtgtgacctccctaccgggctatcggcctcttgggagccagcggcagggccggcacctgcgtgcctgtgcccgtgtgcgtgagacagagcccttgcccctgctgctgccccgagggctgccctgccctggaagggcccctctgcctccacaccagtggagtcttcgagacttgggagctgcttggcctcattttcagccatgagcagacggcctgtggtccctgggcctgaggcacggactcgtagcaccagggtttggaggctgcgaccgccccggagagcagcttcacactggcgccacagaggagccccacgtgcactccccggcctgcatccggcttgggtacacaggcccagaggactggggtgactcacgggccctgtgctgtgatgttgagagctgagaaaaacctccaaggccctgagccccatgcccagccctgccttggtcccccaatccccagagcttggagtctgggccccacacccagccctgccttggtccctgagcctcaaagcgtggaattgctgccctgtggacact

SEQ ID NO: 2153 - DNA, 600 bp, Homo sapiens
gttaaatttaatgtgacaactgttgacatgaccagaaagcctgaagaactaaaggacttagccccaggtaccaatcctccgttcctggtgtataacaaggagttgaaaacagacttcattaaaattgaggagtttttagaacaaaccctggctcctccaaggtaccctcacctgagtcccaagtacaaggagtgttttgatgtgggctgtaacctctttgccaagttttctgcatacattaagaatacacaaaaggaggcaaataagaattttgaaaaatctctgctcaaagaattcaagcgtctggatgactacttaaacaccccacttctggatgaaattgatccagacagtgctgaggaacccccagtttccagaagactattcttggatggggaccagctaacactggctgattgtagcttgttacccaagctgaacattattaaagttgctgccaagaaatatcgtgactttgacattccagcagaattctcaggagtctggcgttatctccacaatgcctatgcccgtgaagaatttacccacacgtgtcctgaagacaaagaaattgaaaatacttacgcaaatgtggcttaa

SEQ ID NO: 2154 - DNA, 600 bp, Homo sapiens; identical to SEQ ID NO: 2153

SEQ ID NO: 2155 - DNA, 600 bp, Homo sapiens
tgaggaatttctgttcttccatcacctccccccccccgccaccctcccactgccaagaacttggaaatagtgatttccacagtgactccactctgagtcccagagccaatcagtagccagcatctgcctccccttcactcccaccgcaggatttgggctcttggaatcctggggaacatagaactcatgacggaagagttgagacctaacgagaaatagaaatgggggaactactgctggcagtggaactaagaaagcccttaggaagaatttttatatccactaaaatcaaacaattcagggagtgggctaagcacgggccatatgaataacatggtgtgcttcttaaaatagccataaaggggagggactcatcatttccatttacccttcttttctgactatttttcagaatctctcttcttttcaagttgggtgatatgttggtagattctaatggctttattgcagcgattaataacaggcaaaaggaagcagggttggtttcccttctttttgttcttcatctaagccttctggttttatgggtcagagttccgactgccatcttggacttgtcagcaaaaaaaaaaaaaaaaa

SEQ ID NO: 2156 - DNA, 600 bp, Homo sapiens
aggaaagggaggagaaggcggagtaaggtggggtgaggcggatcccgcgcgcagttccagcaggtgtgtccccagcgcccgctgcgcccctcgccccagcgccccaccttcccccacggctcaagagaagatgcttttccgtagtcgtgacctcagtggctgcagctctgaccgtcccgccagcacgccagccccgactcagctcctcgcggggctgggcctgagctcgacaagttgcatcaagtgttcgagtccctgagctctcactatcatttgagagccctaccttttcctgactgttcctctttttaagaacaaaatgattttccacttttaaagttcatgggtgagggataaaatgaggctccaatacatgggaagctttgctgaaaaagtaaagtgttattgaatgtgtggggtttcccctcaggaatttgtctaacacatttcaaggatagaaaatacttcactgccgggcatggtggctcatgcctataatcccagtgctttgggaagccgaagcaggaggatcactggaggccaagagttggagagcagactgggcaacatagcgagacctcatctcaaaccggaattcgg

SEQ ID NO: 2157 - DNA, 600 bp, Homo sapiens; identical to SEQ ID NO: 2156

SEQ ID NO: 2158 - DNA, 1400 bp, Homo sapiens
ccggggatgctacaaaaacagaggacaaacaacagtgaaaatgcagcatctgtctcctgcttcacagggtcgactgtcagggtgaccgtatgtggccgcagctgtgtggcatggaacttggtcagggttgaattccagctctactcaccctttgaaagctgtgtgactgcctgagagaacctgtttcttcacctaaaaaatgggactttttgtctcagtcccagtgaagtgccaggtttgattgtgaagtccgcatgaaacactgcaccaggcagggctttgcaaagtgcaaggtatccccagtccaagtatatgaaaacgtgcacacaggactctcattacttttttatggaatctgcaaggtgtttttaggctttttaatctgattttcttataaatgaaagattatttagtcacctttctcctgtccaacttcaccaccacctgataatgggtatataacaggaagctgaaggtacaacatagtgactaaaattcagacttacacaagacagtttgaggcatatttcttaatctggtatcacctcgtgtgttctttggggccctagaaaccctggcttttgggagtgctatggcaagtagaagttctgccggatggaaagaggctgccccatttgaggtcatttaaaatctgtgaagcaaatccagactccttgccgttcagccactgtgaaaccagaatctgcttcacagaaaaaagcatctcagttaggagaagagacatcccctccttctcacttgccaaagagattcaaagacagcccctatcctccattcttgagtcagggccctaggtgacctattctaactcaaggaggagagctatgtacagggagagcattttagattgaaggttggaatggtgtactaaaccaaaaaagctgacaactgagagttttagaagattagaccattaggaacgtatctttgcaaactgcccattcacccatgaagaggaagcctcaagatcccttggaattgcatcccaaggcaaagcttttggctcaccgaaagctcacagattgcagaaattagcttttttaaaaaacaaaccccagtaaatataatttcattaacattttataacagatttatatttttgagttccgtgattgcaaattatgacctcaaattccatccttcacttatgtaacatgttgcaaattacccaaagatgagtctttcttctttctttcctttttcctttcttcttcctttccttttttctttcttcttccttctttcttcctttttctctctcctcttttcctcctcaaaatgtatatattttaaaagccttaactgttagttatgcctgcattcatatttgcacaggaaaaataaagacctggatttaaaaataaaaaaaaaaaaaaaaa

SEQ ID NO: 2159 - DNA, 600 bp, Homo sapiens
tataccctgtaatagcatactattattgaaatcgcttgaccggtcttgttcacataggcctctgggagtgatttggttctttgccctaatgtttcatttgacggtctctttttgatcaaccaatttttctaaaagttcagtcgaaagcttttaagtatagcttcctcccttgaaaaaaaatgtaaactatgactgctgagtgataaaacactgtggtgtgaaagtgtcatcttcactgccaatcaggcaaagaccggaaagatttgcattttattatgtctgtcttatcatgcaatggaaatgatgctttttgtaagtatgcatcttaccaatgatgtaacggtttaatacctttgaatgttttaataaccaagttgctgctgaacttatactaaatcaggggaccaaaaaacttgctcttatcttctcaaattgtattctatatccattaatgtatcagttatcccaaagccttcaggtggaggggtttaccaccttcctaggtcgttcaaccaggttttgtgaggaatgcattcaaagtggctttataaaagaagattttctttagcaagaaaaaaaaaaaaaaaaaaaaaaaaaaaa

SEQ ID NO: 2160 - DNA, 600 bp, Homo sapiens
atctccataccaactgctttgagatcacgctggaactgagttgcgacaagtttccccccgaagaggagttacagcgggagtggctgggtaatcgggaagccctaatccagttcctggaacaggttcaccagggcatcaagggaatggtgcttgatgagaattacaataatctcgccaatgctgtcatttctgtcagtgggattaaccatgatgtcacttcaggtgaccatggtgattacttccggctgctgcttccaggtatctacactgttagtgccacagcacctgggtatgacccagagacagtaactgtgaccgtgggtcctgcggaaccaacgttggttaacttccacctcaaaagaagcatccctcaagtaagccctgtgaggagagctcccagcagaaggcacggagtcagagccaaagtgcagccccaagccagaaagaaagaaatggagatgaggcagctgcagagaggccctgcctgaaacccacagtgccaggcaacccttcagaaaggctttgctcctgctctcagatcagatcaagcattctttctattttattatctgggacatatttaaatacaaacatattcag

SEQ ID NO: 2161 - DNA, 600 bp, Homo sapiens
tcacagtggtcgcacctggaaaggagaaggccctgatgaaagcagtcgcaactgtggggcccatctccgttgctatggatgcaggccattcgtccttccagttctacaaatcaggcatttattttgaaccagactgcagcagcaaaaacctggatcatggtgttctggtggttggctacggctttgaaggagcaaattcgaataacagcaagtattggctcgtcaaaaacagctggggtccagaatggggctcgaatggctatgtaaaaatagccaaagacaagaacaaccactgtggaatcgccacagcagccagctaccccaatgtgtgagctgatggatggtgaggaggaaggacttaaggacagcatgtctggggaaattttatcttgaaactgaccaaacgcttattgtgtaagataaaccagttgaatcattgaggatccaagttgagattttaattctgtgacatttttacaagggtaaaatgttaccactactttaattattgttatacacagctttatgatatcaaagactcattgcttaattctaagacttttgaattttcattttttaaaaagatgtacaaaacagttt

SEQ ID NO: 2162 - DNA, 600 bp, Homo sapiens; identical to SEQ ID NO: 2161

SEQ ID NO: 2163 - DNA, 600 bp, Homo sapiens
atgaaggttttcataatgcaatgtaacatagtacttcaaagtattattcaacttcaagtttcagcaactacctacaaaagattctaaggcctagtagtatttaaactaagtttcagaatgttcccttcttgtagagagatggacaaccaaagtcagtgggacaaactccagcacagaagcctgcgaggaagcctatggaatagtttcctgtcctgagacgaaattcagattaggagatattttaggcccctgcaactggggaaggctactgtttgtttttgtttgcttattatttatttgtttgtttattgtgagatatttcaggtgggatcaaagaggtcataagaatttattttcttttgtggggtgtaactactagctttagattacccctatacacaagaatggccaacctaaaattatgtgtgtcttgtacagttagttatattagcagccctctgagatggcgtatctatcggaaggatttcaaacaccaattgctttacctgaacaaatggtgcttaccctttgaacagcagagtgaccacgtagaaggaaggaaaagggcaaaatcgcttcagttaaactgaaaccgaattc

SEQ ID NO: 2164 - DNA, 600 bp, Homo sapiens
gtgcatgaactgctggactgtggccgctgtggggatggctgccacggtggcttcgtctgggacgcgttcataactgtcctcaacaacagcggcctggccagtgaaaaggactacccgttccagggcaaagtcagagcccacaggtgccaccccaagaagtaccagaaggtggcctggatccaggacttcatcatgctgcagaacaacgagcacagaattgcgcagtacctggccacttatggccccatcaccgtgaccatcaacatgaagccccttcagctataccggaaaggtgtgatcaaggccacacccaccacctgtgacccccagcttgtggaccactctgtcctgctggtgggttttggcagcgtcaagtcagaggaggggatatgggcagagacagtctcatcgcagtctcagcctcagcctccacaccccaccccatactggatcctgaagaactcctggggggcccaatggggagagaagggctatttccggctgcaccgagggagcaatacctgtggcatcaccaagttcccgctcactgcccgtgtgcagaaaccggatatgaagccccgagtctcctgccctccctga

SEQ ID NO: 2165 - DNA, 600 bp, Homo sapiens
ggacaccacatatataaaccatgtcgtttccgtggctgggtggggcatcagtgatgggactgagtactggattgtccggaattcatggggtgaaccatggggcgagagaggctggctgaggatcgtgaccagcacctataaggatgggaagggcgccagatacaaccttgccatcgaggagcactgtacatttggggaccccatcgtttaaggccatgtcactagaagcgcagtttaagaaaaggcatggtgacccatgaccagaggggatcctatggttatgtgtgccaggctggctggcaggaactggggtggctatcaatattggatggcgaggacagcgtggtactggctgcgagtgttcctgagagttgaaagtgggatgacttatgacacttgcacagcatgctctgcctcacaatgatgcagtcagccacctggtgaagaagtgacctgcaacacaggaaacgatgggacctcagtcttcttcagcagaggacttgatattttgtatttggcaactgtgggcaataatatggcatttaagaggtgaaagagttcagacttatcaccattcttatgtcactttagaatcaaggg

SEQ ID NO: 2166 - DNA, 600 bp, Homo sapiens; identical to SEQ ID NO: 2165

SEQ ID NO: 2167 - DNA, 600 bp, Homo sapiens
gtcgtgggccatgagctgactcatgcttttgatgatcaaggacgggagtatgacaaggacgggaacctccggccatggtggaagaactcatccgtggaggccttcaagcgtcagaccgagtgcatggtagagcagtacagcaactacagcgtgaacggggagccggtgaacgggcggcacaccctgggggagaacatcgccgacaacgggggtctcaaggcggcctatcgggcttaccagaactgggtgaagaagaacggggctgagcactcgctccccaccctgggcctcaccaataaccagctcttcttcctgggctttgcacaggtctggtgctccgtccgcacacctgagagctcccacgaaggcctcatcaccgatccccacagcccctctcgcttccgggtcatcggctccctctccaattccaaggagttctcagaacacttccgctgcccacctggctcacccatgaacccgcctcacaagtgcgaagtctggtaaggacgaagcggagagagccaagacggaggaggggaaggggctgaggacgagacccccatccagcctccagggcattgctcagcccgcttggccacc

SEQ ID NO: 2168 - DNA, 600 bp, Homo sapiens; identical to SEQ ID NO: 2167

SEQ ID NO: 2169 - DNA, 1400 bp, Homo sapiens
accattatgtcttctggaaacgtcaactcttcttcctagaactggaagctgtccacccaccggaagcgctctttacttggtcgctggccaccccagtgtttggaaaaaaatctctgggcttcgactgctgccagggaggagctgctgcaagccagagggaggaagggggagaatacgaacagcctggtggtgtcgggtgttggtgggtagagttagttcctgtgaacaatgcactgggaagggtggagatcaggtcccggcctggaatatatattctacccccctggagctttgattttgcactgagccaaaggtctagcattgtcaagctcctaaagggttcatttggcccctcctcaaagactaatgtccccatgtgaaagcgtctctttgtctggagctttgaggagatgttttccttcactttagtttcaaacccaagtgagtgtgtgcacttctgcttctttagggatgccctgtacatcccacaccccaccctcccttcccttcatacccctcctcaacgttcttttactttatactttaactacctgagagttatcagagctggggttgtggaatgatcgatcatctatagcaaataggctatgttgagtacgtaggctgtgggaagatgaagatggtttggaggtgtaaaacaatgtccttcgctgaggccaaagtttccatgtaagcgggatccgttttttggaatttggttgaagtcactttgatttctttaaaaaacatcttttcaatgaaatgtgttaccatttcatatccattgaagccgaaatctgcataaggaagcccactttatctaaatgatattagccaggatccttggtgtcctaggagaaacagacaagcaaaacaaagtgaaaaccgaatggattaacttttgcaaaccaagggagatttcttagcaaatgagtctaacaaatatgacatccgtctttcccacttttgttgatgtttatttcagaatcttgtgtgattcatttcaagcaacaacatgttgtattttgttgtgttaaaagtacttttcttgatttttgaatgtatttgtttcaggaagaagtcattttatggatttttctaacccgtgttaacttttctagaatccaccctcttgtgcccttaagcattactttaactggtagggaacgccagaacttttaagtccagctattcattagatagtaattgaagatatgtataaatattacaaagaataaaaatatattactgtctctttagtatggttttcagtgcaattaaaccgagagatgtcttgtttttttaaaaagaatagtatttaataggtttctgacttttgtggatcattttgcacatagctttatcaacttttaaacattaataaactgatttttttaaag

SEQ ID NO: 2170 - DNA, 1400 bp, Homo sapiens
gtcctgagcaaaccctatgctcatctctctctccttcctggggtggactcagatgggtgggacacatgccttcctccccctattccacccccaagttgatctgagtatcgtcaggggcccaaagtacagaattgttctttgctttttattgaatgctccaaaggccaaacttctggggctgggggttggtcttggaaacaggggtcctctgacttcctcatgggggcttgctcataccgcccctcctggtggatgtgtgtgtttattatgtggagtccctgccacttactgccttatgacctaggactgatgctgtggggtgctggtggagcagctgatgtcgtgtttacagagcaaggcttccctgtctcccacggggaggggctcgggcctctagtcagacattcctgcagagggtcggtggaggggtcattcacctgcccctgcagcaagcaaaagttgtctgtggtgccatttgattccctgacactgccccctgcttgaattgattccgaagggtagggtgggaaggtgagcaaagggagcagaaacaagggaattcaagacccagaatgtaggtgccactgcctcctatgtttacaggatcctccgtggccctaggcacctgggctgcaggaagtgactccgttccactcctcctttattcccttaaaaagggaaaaatgactgttacgaccctgttcacaaaactcttacttttgctattttgtctgctgtccagaactgaagactttaaaattttgttactgtttacaagtccagattcaaaaaatgtttttactttgtttacaactcaaaactttgagttttacactttgtttacagtagataattttttttcctttgtttccaagtgaaaggtagggaaagtgggagagggacttggaggacccacctgtgaggaccctgacctggccatcttgaggggttttctaacccccaggtctcccaggccgaaggtcagccttgagtcccgtttaacagcagatccagaagaccttgagagtaggcgtcctctaaccacgggggagagtggctgtgcagggctggggggtggtctgtgcagacacctcctcacccaccaccccatgcatactcttgggaagcagcttcctgggagattagaaattctacttccctgactggagctaaatcccaccagccaggacccaaactctccttaccgagaaggaccccagctcttgaagggctgagtggcctgctgggggtgggagggtgtctttactatgtcctaggtttcgtagatgcccctctctggggttcccctcctccagcccagcggccctctttcctgtctgtgtaaattgttccgtgaagccgcgctctgttttgggaataaacttctatagaaaacaaaa

SEQ ID NO: 2171 - DNA, 1400 bp, Homo sapiens
actcttcatgacttcagggattcattttttttatacgctggaaattgactcccctttcccttcccaaagaggataggacctcccaggatgcttcccagcctctcctcagtttcccatctgctgtgcctctgggaggagagggactcctggggggcctgcccctcatacgccatcaccaaaaggaaaggacaaagccacacgcagccagggcttcacacccttcaggctgcacccgggcaggcctcagaacggtgaggggccagggcaaagggtgtgtctcgtcctgcccgcactgcctctcccaggaactggaaaagccctgtccggtgagggggcagaaggactcagcgcccctggacccccaaatgctgcatgaacacattttcaggggagcctgtgcccccaggcgggggtcgggcagccccagcccctctccttttcctggactctggccgtgcgcggcagcccaggtgtttgctcagttgctgacccaaaagtgcttcatttttcgtgcccgccccgcgccccgggcaggccagtcatgtgttaagttgcgcttctttgctgtgatgtgggtgggggaggaagagtaaacacagtgctggctcggctgccctgagggtgctcaatcaagcacaggtttcaagtctgggttctggtgtccactcacccaccccaccccccaaaatcagacaaatgctactttgtctaacctgctgtggcctctgagacatgttctatttttaaccccttcttggaattggctctcttcttcaaaggaccaggtcctgttcctctttctccccgactccaccccagctccctgtgaagagagagttaatatatttgttttatttatttgctttttgcgttgggatgggttcgtgtccagtcccgggggtctgatatggccatcacaggctgggtgttcccagcagccctggcttgggggcttgacgcccttccccttgccccaggccatcatctccccacctctcctcccctctcctcagttttgccgactgcttttcatctgagtcaccatttactccaagcatgtattccagacttgtcactgactttccttctggagcaggtggctagaaaaagaggctgtgggcaggaaagaaaggctcctgtttctcatttgtgaggccagcctctggcttttctgccgtggattctccccctgtcttctcccctcagcaattcctgcaaagggttaaaaatttaactggtttttactactgatgacttaaaaaaaatacaaagatgctggatgctaacttgatactaaccatcagattgtacagtttggttgttgctgtaaatatggtagcgttttgttgttgttgttttttcatgccccatactactgaataaactagttctgtgcgggt

SEQ ID NO: 2172 - DNA, 600 bp, Homo sapiens
gagagctgttggatggaggtgttaatgatggggctgatgtggcgctcaattgaccaccccggcaagctcatctttgctccagatcttgttctggacagggatgaggggaaatgcgtagaaggaattctggaaatctttgacatgctcctggcaactacttcaaggtttcgagagttaaaactccaacacaaagaatatctctgtgtcaaggccatgatcctgctcaattccagtatgtaccctctggtcacagcgacccaggatgctgacagcagccggaagctggctcacttgctgaacgccgtgaccgatgctttggtttgggtgattgccaagagcggcatctcctcccagcagcaatccatgcgcctggctaacctcctgatgctcctgtcccacgtcaggcatgcgagtaacaagggcatggaacatctgctcaacatgaagtgcaaaaatgtggtcccagtgtatgacctgctgctggagatgctgaatgcccacgtgcttcgcgggtgcaagtcctccatcacggggtccgagtgcagcccggcagaggacagtaaaagcaaagagggctcccagaacccacagtctcagtga

SEQ ID NO: 2173 - DNA, 600 bp, Homo sapiens; identical to SEQ ID NO: 2172

SEQ ID NO: 2174 - DNA, 600 bp, Homo sapiens
ttgctcttttaggttcgttcttatttaaagcaatatgattgtgtgactccttgtagttacacttgtgtttcaatcagatcagattgttgtatttattccactattttgcatttaaatgataacataacagatataaaaaatttaaaactgctatttttcttatagaagagaaaatgggtgttggtgattgtattttaattatttaagcgtctctgtttacctgcctaggaaaacattttatggcagtcttatgtgcaaagatcgtaaaaggacaaaaaatttaaactgcttataataatccaggagttgcattatagccagtagtaaaaaaaataataataataataataaaaccatgtctatagctgtagatgggcttcacatctgtaaagcaatcaattgtatatttttgtgatgtgtaccatactgtgtgctccagcaaatgtccatttgtgtaaatgtatttattttatattgtatatattgttaaatgcaaaaaggagatatgattctgtaactccaatcagttcagatgtgtaacccaaatattatgcctttcaggatgatggtagagcaatattaaacaagcttccacttttg

SEQ ID NO: 2175 - DNA, 600 bp, Homo sapiens
tccacctgtagctataccagccagactccctgaaaggcgctacattgagaacatttaccattccaaaccaatgagatggccatttttcttattcattcctttctttattattttctgtgtactgattgctataatggtgaaagttaatttccaaaggaaaaaatggagaactgaggactattcaagcgatgagcaacctgaaagtgagagtgaacctaaagggtagtctggacaacagagatgccatgatatcacttcttctagagtaattatctgtgatggatggacacaaaaaaatggaaagaaaagaatgtacattacctggtttcctgggattcaaacctgcatattgtgattttaatttgaccagaaaatatgatatatatgtataatttcacagataatttacttatttaaaaatgcatgataatgagttttacattacaaatttctgtttttttaaagttatcttacgctatttctgttggttagtagacactaattctgtcagtaggggcatggtataaggaaatatcataatgtaatgaggtggtactatgattaaaagccactgttacatttcaaaaaaaaaaaaaaaaa

SEQ ID NO: 2176 - DNA, 1400 bp, Homo sapiens
tcggccagaaccactccgaggacggagctcccgcgctactcaccaccgcgccgccgccgggactgcagccgggtgccgggggcaccccgggtggcccgggcggcggcggcgctcccccgcgctacgccacgctggagcaccccttccactgcccgcgcgtcctcaaggtgccatcctatctcagctacaagtttctgggcgagcgtgattgtgctgcgccctgcgaacctgcgcggcccgatggttccatgttcttctcacaggaggagacgcgtttcgcgcgcctctggatcctcacctggtcggtgctgtgctgcgcttccaccttcttcactgtcaccacgtacttggtagacatgcagcgcttccgctacccagagcggcctatcatttttctgtcgggctgctacaccatggtgtcggtggcctacatcgcgggcttcgtgctccaggagcgcgtggtgtgcaacgagcgcttctccgaggacggttaccgcacggtggtgcagggcaccaagaaggagggctgcaccatcctcttcatgatgctctacttcttcagcatggccagctccatctggtgggtcatcctgtcgctcacctggttcctggcagccggcatgaagtggggccacgaggccatcgaggccaactctcagtacttccacctggccgcctgggccgtgccggccgtcaagaccatcaccatcctggccatgggccagatcgacggcgacctgctgagcggcgtgtgcttcgtaggcctcaacagcctggacccgctgcggggcttcgtgctagcgccgctcttcgtgtacctgttcatcggcacgtccttcctcctggccggcttcgtgtcgctcttccgcatccgcaccatcatgaagcacgacggcaccaagaccgaaaagctggagcggctcatggtgcgcatcggcgtcttctccgtgctctacacagtgcccgccaccatcgtcatcgcttgctacttctacgagcaggccttccgcgagcactgggagcgctcgtgggtgagccagcactgcaagagcctggccatcccgtgcccggcgcactacacgccgcgcatgtcgcccgacttcacggtctacatgatcaaatacctcatgacgctcatcgtgggcatcacgtcgggcttctggatctggtcgggcaagacgctgcactcgtggaggaagttctacactcgcctcaccaacagccgacacggtgagaccaccgtgtgagggacgcccccaggccggaaccgcgcggcgctttcctccgcccggggtggggcccctacagactccgtattttatttttttaaataaaaaacgatcgaaaccatttcacttttaggttgctttttaaaagagaactctctgcccaacaccccc

SEQ ID NO: 2177 - DNA, 1400 bp, Homo sapiens; identical to SEQ ID NO: 2176

SEQ ID NO: 2178 - DNA, 600 bp, Homo sapiens
gtgttgtactggtgacctgggatgcagtagtaggcactgttgattcaaatttatcctgtgaaactggctttatagagttaacaaaacagagtcagagaccactgtcttaacagtggaagatgcaaataagtttttgagaataaaactggattttgaaattttacattagtacttgacaaaagttttcattttgccttgaatggaacctactaaaaagagagatgaaaaaaaatcagcgaggttgatgtagataataatttctatgggaccaaagactagacagaattcagtaagtcacatgaagtaatggtcatgcctgtacataaagcatatttcatgtttgatttagatgacattcaaaaaaaatcatgggactgaatatacctggggtatcctatcttgtacaaatgcatgctttttcattaaatttgtaatgatgtttaatgaacatttccaccaaacattatttcctctaaaaatgttaatttggggttaaaaccatcaccatttgaatttcaaatgtagttttcatgacaattttatattgatgtgtgtttacaatgagaaaatggcatgaaaatattaaattgtcttgtatcg

SEQ ID NO: 2179 - DNA, 600 bp, Homo sapiens; identical to SEQ ID NO: 2178

SEQ ID NO: 2180 - DNA, 1400 bp, Homo sapiens
tgctgggcaacggcgcggtggcagccgtgctgctgagccggcggacagccctgagcagcaccgacaccttcctgctccacctagctgtagcagacacgctgctggtgctgacactgccgctctgggcagtggacgctgccgtccagtgggtctttggctctggcctctgcaaagtggcaggtgccctcttcaacatcaacttctacgcaggagccctcctgctggcctgcatcagctttgaccgctacctgaacatagttcatgccacccagctctaccgccgggggcccccggcccgcgtgaccctcacctgcctggctgtctgggggctctgcctgcttttcgccctcccagacttcatcttcctgtcggcccaccacgacgagcgcctcaacgccacccactgccaatacaacttcccacaggtgggccgcacggctctgcgggtgctgcagctggtggctggctttctgctgcccctgctggtcatggcctactgctatgcccacatcctggccgtgctgctggtttccaggggccagcggcgcctgcgggccatgcggctggtggtggtggtcgtggtggcctttgccctctgctggaccccctatcacctggtggtgctggtggacatcctcatggacctgggcgctttggcccgcaactgtggccgagaaagcagggtagacgtggccaagtcggtcacctcaggcctgggctacatgcactgctgcctcaacccgctgctctatgcctttgtaggggtcaagttccgggagcggatgtggatgctgctcttgcgcctgggctgccccaaccagagagggctccagaggcagccatcgtcttcccgccgggattcatcctggtctgagacctcagaggcctcctactcgggcttgtgaggccggaatccgggctcccctttcgcccacagtctgacttccccgcattccaggctcctccctccctctgccggctctggctctccccaatatcctcgctcccgggactcactggcagccccagcaccaccaggtctcccgggaagccaccctcccagctctgaggactgcaccattgctgctccttagctgccaagccccatcctgccgcccgaggtggctgcctggagccccactgcccttctcatttggaaactaaaacttcatcttccccaagtgcggggagtacaaggcatggcgtagagggtgctgccccatgaagccacagcccaggcctccagctcagcagtgactgtggccatggtccccaagacctctatatttgctcttttatttttatgtctaaaatcctgcttaaaacttttcaataaacaagatcgtcaggaccaaaaaaaaaaaaaaaaaaaaaaaaaaaaaaaaaaaaaaaaaaaaaaa

SEQ ID NO: 2181 - DNA, 1400 bp, Homo sapiens; identical to SEQ ID NO: 2180

SEQ ID NO: 2182 - DNA, 1400 bp, Homo sapiens
tcatcggcctgtgctactccctcattgtccgggtgctggtcagggcgcaccggcaccgtgggctgcggccccggcggcagaaggcgctccgcatgatcctcgcggtggtgctggtcttcttcgtctgctggctgccggagaacgtcttcatcagcgtgcacctcctgcagcggacgcagcctggggccgctccctgcaagcagtctttccgccatgcccaccccctcacgggccacattgtcaacctcgccgccttctccaacagctgcctaaaccccctcatctacagctttctcggggagaccttcagggacaagctgaggctgtacattgagcagaaaacaaatttgccggccctgaaccgcttctgtcacgctgccctgaaggccgtcattccagacagcaccgagcagtcggatgtgaggttcagcagtgccgtgtagacagccttggccgcataggcccagccagggtgtgactcgggagctgcacacacctgggtggacacaaggcacggccacgtcatgtctctaaactgcggtcagatgtggcttctggctcctcggggcctcgcgagggtcacgcttgcctggtcaccctggggctgcttaggaaacctcacgactggtcaccttgcactcttcacacagaattgctacaatcccaaagcgctcgccccgcagggtccaaaggccagcggtgaccagcctgtcacccagctcctccccgccaaccctgcctgccgctgcacctgcctgccgctgcaggaaacatttgacaccgtcgaccaggaaagccacacggagaggccactgtgggtgaagcgcctcagttacacaggaaccctaaagcaaatctgccaccgtgggggaactgacgctggagatgcaaggtgctggtgggtctgagctggacgtcgcggtgtgtcctctgtgcccacggtctgagctagctagcgcaccgccgagttaaagaggagaaggaaaacatgctgctctggtgcacgcctgagcgtcctccatcttccaggatggcagcaatggcgctgtgcggcctcaccaggcccacgaggagcagcagcgctcggcccggagcagcaggaaggcccctctgtggagcgcccgccgtctgctccggggtggttcagtcactgcttgttgacatcaacatggcaattgcactcatgtggactgggaccgtgcgagctgccgtgtgggttagtcgggtgccaggacaatgaaatactccagcacgtgtggctgacgaatttgtttctacagaaataacagctggggacaactgcggtgatgatgtaaaaaccttcccataaaatgtaagaaaagctgatgaggctggtgacgttcagcctttgtcaataaacctgtcatgtgcggatcctt

SEQ ID NO: 2183 - DNA, 1400 bp, Homo sapiens; identical to SEQ ID NO: 2182

SEQ ID NO: 2184 - DNA, 600 bp, Homo sapiens
ccaccgccgtccccgccgtcggggcccgagaccgcggaggccgcggcgctgttcagccgcgaatgccggccgagccccgcgcagctgggcgcgctgcgtgtcatgctgtgggtcaccaccgcctacttcttcctgccctttctgtgcctcagcatcctctacgggctcatcgggcgggagctgtggagcagccggcggccgctgcgaggcccggccgcctcggggcgggagagaggccaccggcagaccgtccgcgtcctgctggtggtggttctggcatttataatttgctggttgcccttccacgttggcagaatcatttacataaacacggaagattcgcggatgatgtacttctctcagtactttaacatcgtcgctctgcaacttttctatctgagcgcatctatcaacccaatcctctacaacctcatttcaaagaagtacagagcggcggcctttaaactgctgctcgcaaggaagtccaggccgagaggcttccacagaagcagggacactgcgggggaagttgcaggggacactggaggagacacggtgggctacaccgagacaagcgctaacgtgaagacgatgggataa

SEQ ID NO: 2185 - DNA, 600 bp, Homo sapiens; identical to SEQ ID NO: 2184

SEQ ID NO: 2186 - DNA, 600 bp, Homo sapiens
ggctcgctggccgggggcacgcggcctccgcagctgaggaagtccgagagcgaagagagcaggaccgccaggaggcagaccatcatcttcctgaggctgattgttgtgacattggccgtatgctggatgcccaaccagattcggaggatcatggctgcggccaaacccaagcacgactggacgaggtcctacttccgggcgtacatgatcctcctccccttctcggagacgtttttctacctcagctcggtcatcaacccgctcctgtacacggtgtcctcgcagcagtttcggcgggtgttcgtgcaggtgctgtgctgccgcctgtcgctgcagcacgccaaccacgagaagcgcctgcgcgtacatgcgcactccaccaccgacagcgcccgctttgtgcagcgcccgttgctcttcgcgtcccggcgccagtcctctgcaaggagaactgagaagattttcttaagcacttttcagagcgaggccgagccccagtctaagtcccagtcattgagtctcgagtcactagagcccaactcaggcgcgaaaccagccaattctgctgcagagaatggttttcaggagcatgaagtttga

SEQ ID NO: 2187 - DNA, 600 bp, Homo sapiens
ggccagtgtgacctgtactcgtcagtggacacaaagcagaaaggaggcgccctggacataaagagctttgcaggggtcttttgtatcctggctgctggaattgtcctctcctgcttcatagccatgctggagacgtggtggaacaagaggaaaggctcccgggttccatcaaaagaggatgacaaggaaattgacctggagcacctccatagacgtgtaaatagcttgtgcacagatgacgacagcccccataaacagttttccacctcgtcaattgatttgacccctctggacattgacactttgccaacacgacaagcactggagcaaatcagtgatttcaggaacactcatattaccacaacaacctttatcccagagcagatccagactcttagccgcacactgtcagctaaagctgcttctggtttcacttttggcaacgtgcctgagcaccgaactggcccttttaggcacagggcacctaatgggggctttttcaggagtcctataaaaacaatgtcatctattccttatcaaccaactcctaccctggggctcaatctgggtaatgatccagaccgaggcacctccatatga

SEQ ID NO: 2188 - DNA, 600 bp, Homo sapiens
gcctgagtggagagccccagccccggggccgcgccttcctggctgaagtgaagcagatgcgtgcacggaggaagacagccaagatgctgatggtggtgctgctggtcttcgccctctgctacctgcccatcagcgtcctcaatgtccttaagagggtgttcgggatgttccgccaagccagtgaccgcgaagctgtctacgcctgcttcaccttctcccactggctggtgtacgccaacagcgctgccaaccccatcatctacaacttcctcagtggcaaattccgggagcagtttaaggctgccttctcctgctgcctgcctggcctgggtccctgcggctctctgaaggcccctagtccccgctcctctgccagccacaagtccttgtccttgcagagccgatgctccatctccaaaatctctgagcatgtggtgctcaccagcgtcaccacagtgctgccctgagcgagggctgccctggaggctccggctcgggggatctgcccctacccctcatggaaagacagctggatgtggtgaaaggctgtggcttcagtcctgggtttctgcctgtgtgactctggataagtcacttcct

SEQ ID NO: 2189 - DNA, 1400 bp, Homo sapiens
gcggtacctgtggagggaatacctgcacccgaaagaatatgagtgggtcctgatcgccgggtacatcatcgtgttcgtcgtggctctcattgggaacgtcctggtttgtgtggcagtgtggaagaaccaccacatgaggacggtaaccaactacttcatagtcaatctttctctggctgatgtgctcgtgaccatcacctgccttccagccacactggtcgtggatatcactgagacctggttttttggacagtccctttgcaaagtgattccttatctacagaccgtgtcggtgtctgtgtctgtcctcacactgagctgtatcgccttggatcggtggtatgcaatctgtcaccctttgatgtttaagagcacagcaaagcgggcccgtaacagcattgtcatcatctggattgtctcctgcattataatgattcctcaggccatcgtcatggagtgcagcaccgtgttcccaggcttagccaataaaaccaccctctttacggtgtgtgatgagcgctggggtggtgaaatttatcccaagatgtaccacatctgtttctttctggtgacatacatggcaccactgtgtctcatggtgttggcttatctgcaaatatttcgcaaactctggtgtcgacagatccctggaacatcatctgtagttcagagaaaatggaagcccctgcagcctgtttcacagcctcgagggccaggacagccaacgaagtcccggatgagcgctgtggcggctgaaataaagcagatccgagccagaaggaaaacagcccggatgttgatggttgtgcttttggtatttgcaatttgctatctaccaattagcatcctcaatgtgctaaagagagtatttgggatgtttgcccatactgaagacagagagactgtgtatgcctggtttaccttttcacactggcttgtatatgccaatagtgctgcgaatccaattatttataattttctcagtggaaaatttcgagaggaatttaaagctgcgttttcttgctgttgccttggagttcaccatcgccaggaggatcggctcaccaggggacgaactagcacagagagccggaagtccttgaccactcaaatcagcaactttgataacatatcaaaactttctgagcaagttgtgctcactagcataagcacactcccagcagccaatggagcaggaccacttcaaaactggtagaatatttattcatatgacaaggatacctgagtaaaactatcctttttaaaatcactgggaacagaaattttattatcctatgatgtgaagctaaaattacttgtggatcttttttttttttaatctattgctctttggaaataaaaaaaaagtcagtttaaaatgaaaaaaaaaaaaaaaaaaa

SEQ ID NO: 2190 - DNA, 1400 bp, Homo sapiens
gaggggggcgaccgctgggcccgcgtgcgccagggccacgtggaacagtgcgagtgcttcgggggccggacctggtgcgaaggcacccgacatacagcttgtctgagcagcccttgcctgaacgggggcacctgccacctgatcgtggccaccgggaccaccgtgtgtgcctgcccaccaggcttcgctggacggctctgcaacatcgagcctgatgagcgctgcttcttggggaacggcactgggtaccgtggcgtggccagcacctcagcctcgggcctcagctgcctggcctggaactccgatctgctctaccaggagctgcacgtggactccgtgggcgccgcggccctgctgggcctgggcccccatgcctactgccggaatccggacaatgacgagaggccctggtgctacgtggtgaaggacagcgcgctctcctgggagtactgccgcctggaggcctgcgaatccctcaccagagtccaactgtcaccggatctcctggcgaccctgcctgagccagcctccccggggcgccaggcctgcggcaggaggcacaagaagaggacgttcctgcggccacgtatcatcggcggctcctcctcgctgcccggctcgcacccctggctggccgccatctacatcggggacagcttctgcgccgggagcctggtccacacctgctgggtggtgtcggccgcccactgcttctcccacagcccccccagggacagcgtctccgtggtgctgggccagcacttcttcaaccgcacgacggacgtgacgcagaccttcggcatcgagaagtacatcccgtacaccctgtactcggtgttcaaccccagcgaccacgacctcgtcctgatccggctgaagaagaaaggggaccgctgtgccacacgctcgcagttcgtgcagcccatctgcctgcccgagcccggcagcaccttccccgcaggacacaagtgccagattgcgggctggggccacttggatgagaacgtgagcggctactccagctccctgcgggaggccctggtccccctggtcgccgaccacaagtgcagcagccctgaggtctacggcgccgacatcagccccaacatgctctgtgccggctacttcgactgcaagtccgacgcctgccagggggactcaggggggcccctggcctgcgagaagaacggcgtggcttacctctacggcatcatcagctggggtgacggctgcgggcggctccacaagccgggggtctacacccgcgtggccaactatgtggactggatcaacgaccggatacggcctcccaggcggcttgtggctccctcctgaccctccagcgggacaccctggttcccaccattccctgccttgctgacaataaagatatttccaag

SEQ ID NO: 2191 - DNA, 1400 bp, Homo sapiens
gctcttcttcagggcacacttccactactctctaagacctcctgcctaagtgcagcccgtggggttcctcccttctcttcacagtcacattccaagcctcatgtccactggttcttcttggtctcagtgtcaatgcagcccccattgtggtcacaggaagtagaggaggccacgttcttactagtttcccttgcatggtttagaaagcttgccctggtgcctcaccccttgccataattactatgtcatttgctggagctctgcccatcctgcccctgagcccatggcactctatgttctaagaagtgaaaatctacactccagtgagacagctctgcatactcattaggatggctagtatcaaaagaaagaaaatcaggctggccaacggggtgaaacctgtctctactaaaaatacaaaaaaaaaaaaaaattagccgggcgtggtggtgagtgcctgtaatcacagctacttgggaggctgagatgggagaatcacttgaacccgggagcagaggttgcagtgagccgagattgtgcccctgccatccagcctgagcgacagtgagactctgtctcagtccatgaagatgtagaggagaaactggaactctcgagcgttgctgggggggattgtaaaatggtgtgaccactgcagaagacagtatggcagctttcctcaaaacttcagacatagaattaacacatgatcctgcaattccacttataggaattgacccacaagaaatgaaagcagggacttgaacccatatttgtacaccaatattcatagcagcttattcacaagacccaaaaggcagaagcaacccaaatgttcatcaatgaatgaatgaatggctaagcaaaatgtgatatgtacctaacgaagtatccttcagcctgaaagaggaatgaagtactcatacatgttacaacacggacgaaccttgaaaactttatgctaagtgaaataagccagacatcaacagataaatagtttatgattccacctacatgaggtactgagagtgaacaaatttacagagacagaaagcagaacagtgattaccagggactgaggggaggggagcatgggaagtgacggtttaatgggcacagggtttatgtttaggatgttgaaaaagttctgcagataaacagtagtgatagttgtaccgcaatgtgacttaatgccactaaattgacacttaaaaatggtttaaatggtcaattttgttatgtatattttatatcaatttaaaaaaaaacctgagccccaaaaggtattttaatcaccaaggctgattaaaccaaggctagaaccacctgcctatattttttgttaaatgatttcattcaatatcttttttttaataaaccatttttacttgggtgtttat

SEQ ID NO: 2192 - DNA, 1400 bp, Homo sapiens; identical to SEQ ID NO: 2191

SEQ ID NO: 2193 - DNA, 1400 bp, Homo sapiens
acccatctctgatcccccatcaccaatgcagccagctgtgcctgtatgactggtataccaaggttacctcagtggtggtagatgttgtgcctcggcagctgggagagaacttctctgggatctactgcagccttctgcctttgggatgctggtcagctgacagccagagagtggtctttgactcggctcagcgcagccggcaggacctgtttgctgtggacacccaagtgggcactgtgacctccctcacagctggagggtcaggtgggagctggaagttgctcacaattgaccaggacctcatggtggcacagttttccacacccagcctacctccaaccctgaaagttgggttcctgccttctgcagggaaggagcagtcagtgttgtgggtgtccctggaggaggccgagcccattcccgacatccactggggcatccgggtgctacagccacccccagagcaagagaatgtgcagtatgctggccttgactttgaagcaatcctgctgcagcctggcagccctccagataagacccaagtgcccatggtggtcatgccccacggggggccccattcatcctttgtcactgcctggatgctgttcccagccatgctttgcaagatgggctttgcggtactactagtgaactatcgtggctccacgggctttggccaggacagcatcctctccctcccaggcaatgtgggccaccaggatgtgaaggatgtccagtttgcagtggaacaggtgctccaggaggaacactttgatgcaagccatgtggcccttatgggtggttcccatggtggcttcatttcctgccacttgattggtcagtacccagagacctacagggcctgcgtggcccggaaccccgtgatcaacatcgcctccatgttgggctccactgacatccctgactggtgcgtggtggaggctggctttcctttcagcagtgactgcctgccagacctcagcgtgtgggctgagatgctggacaaatcgcccatcagatacatccctcaggtgaagacaccactgttactgatgttgggccaggaggaccggcgtgtgcccttcaagcagggcatggagtattaccgtgccctcaagacccggaatgtgcctgttcggctcctgctctatcccaaaagcacccacgcattatcagaggtggaggtggagtcagacagcttcatgaatgctgtgctctggctacgcacacacttgggcagctgaagccctgccattctgcatgagctgatcagcctgtgccacacttcgctcttgaggagctcaacggtctggcagggcagcaggaggctttctgggctctggactccacggatgcgtgggcagaggaatgtgggctatgtagtcataataaattaggac

SEQ ID NO: 2194 - DNA, 1400 bp, Homo sapiens
caccctgtccgtgacgtggattggtgctgcacccctcatcctgtctcggattgtgggaggctgggagtgcgagaagcattcccaaccctggcaggtgcttgtggcctctcgtggcagggcagtctgcggcggtgttctggtgcacccccagtgggtcctcacagctgcccactgcatcaggaacaaaagcgtgatcttgctgggtcggcacagcctgtttcatcctgaagacacaggccaggtatttcaggtcagccacagcttcccacacccgctctacgatatgagcctcctgaagaatcgattcctcaggccaggtgatgactccagccacgacctcatgctgctccgcctgtcagagcctgccgagctcacggatgctgtgaaggtcatggacctgcccacccaggagccagcactggggaccacctgctacgcctcaggctggggcagcattgaaccagaggagttcttgaccccaaagaaacttcagtgtgtggacctccatgttatttccaatgacgtgtgtgcgcaagttcaccctcagaaggtgaccaagttcatgctgtgtgctggacgctggacagggggcaaaagcacctgctcgggtgattctgggggcccacttgtctgtaatggtgtgcttcaaggtatcacgtcatggggcagtgaaccatgtgccctgcccgaaaggccttccctgtacaccaaggtggtgcattaccggaagtggatcaaggacaccatcgtggccaacccctgagcacccctatcaaccccctattgtagtaaacttggaaccttggaaatgaccaggccaagactcaagcctccccagttctactgacctttgtccttaggtgtgaggtccagggttgctaggaaaagaaatcagcagacacaggtgtagaccagagtgtttcttaaatggtgtaattttgtcctctctgtgtcctggggaatactggccatgcctggagacatatcactcaatttctctgaggacacagataggatggggtgtctgtgttatttgtggggtacagagatgaaagaggggtgggatccacactgagagagtggagagtgacatgtgctggacactgtccatgaagcactgagcagaagctggaggcacaacgcaccagacactcacagcaaggatggagctgaaaacataacccactctgtcctggaggcactgggaagcctagagaaggctgtgagccaaggagggagggtcttcctttggcatgggatggggatgaagtaaggagagggactggaccccctggaagctgattcactatggggggaggtgtattgaagtcctccagacaaccctcagatttgatgatttcctagtagaactcacagaaataaagagctgttatactgtg

SEQ ID NO: 2195 - DNA, 1400 bp, Homo sapiens; identical to SEQ ID NO: 2194

SEQ ID NO: 2196 - DNA, 1400 bp, Homo sapiens
ccttcgtcggtgacggggacatcttcaagaagctggactcggagctgagccgggcccaggagaaggctctggacacgagctacgtgatcctgcccacggccacggccacgctgcggcccaagcccaaggaggagcccaagtacagcatccacattgaccagatgccgcagacccgcctcatccacctcagcacggcccccgaggccagcctccccgcccgcagcccgccctcccgccagccccccagcggcgggccccccgaggcaccccctgcccagcccccaccgcctccgcccccaccgccaccacctccccagcagcccctgcccccaccgcccaatctggagccggcaccccccagcctgggggatcccggggagcctgccgcccatccgggacccagcacggggcccagcaccaagaacgagaatgtcgccaccttgtctgtgagctccctggagcggcggaagtcgcggtatgcagaactggactttgagaagatcatgcacacccggaagcggcaccaagacatgttccaggacctgaaccggaagctgcagcacgcagcggagaaggacaaggaggtgctggggccggacagcaagccggaaaagcagcagacgcccaacaagaggccctgggagagcctccggaaagcccacgggacgcccacgtgggtgaagaaggagctggagccgctgcagccgtcgccgctggagcttcgcagcgtggagtgggagaggtcgggcgccacgatcccgctggtgggccaggacatcatcgacctccagaccgaggtctgagcgggtgggcggcggccacgcactgggccacggaggagggatgctgctccgcccgctcctgccgcagacgggcacagacacgctcgcgggcagcgggccaggcccgcaccccggcctcagggcgctcagacggcggccaggcacagggcccgcagtgctgggaccagagccagatgcaggacaggaggcggcccggccagcgggcacagggcaccagaggccgaaggtgcctcagactccgccctcctcgggccgaggcccagcgggcagatgggcggacggctgtggaccgtggacaggcccagcgcggccagcgtcccagggtacccgcctgagctcctgctgcggaggagctgcctgcttggcccggccggcctggcaccgttttttaaacacccccatccctcgggaagcagccagctccccacaccttccagggccctaggcccctcctagacccaggtggagggcacagccctccgaccctcatggcccccaggggcaggactgagtcccctccaggaagaagcaggggggaatctattttttctctccttttcttttcttcaataaaaagaattaaaaacccaaaaaaaa

SEQ ID NO: 2197 - DNA, 1400 bp, Homo sapiens
gaatgagcttagcaatccatgtttgaaaaaagaaaatagtgaattgcggagaactgtgtacttatgtacggatgataatttgagaggggctgacatggacatagtccatcctcaagaaagaatgatggaaagtgactatattgtgatgcccagaagttctgtaaataaccagccttcaatgaaagaagaaagcaaaatgaatattggcatggaaaccttgccacatgaaaggctattgcactacaaagtaaaccctgaattcaatatgaatccccctgtaatggaccagttcaatatgaacttagagcaacatctcgcaccccaggaacatatgcagaatttgccctttgaacctcgcacagctgtgaagaatttcatggcctctgagttggatgataatgcaggactatcaagaagtgaaactggatcaacgatatcaatgagttctttagagagaagaaaatcacgatattcagaccttgactttgagaaggtcatgcatacaaggaagaggcatatggaactatttcaagaactaaatcagaaatttcaaactttggacagatttcgggatataccaaatacaagcagtatggaaaaccccgcaccaaacaagaatccatgggacactttcaaaaaccccagtgaatacccgcattacaccacaatcaatgtcttagacacagaggcaaaggatgctttggaactgaggccagcagagtgggagaagtgtctgaatttgcctctggatgtgcaagagggtgactttcaaacagaagtttaaaaaaatcaaaatggactaaggtagagacaaaactttattgcactgacacttaagacttgggaagcctgacatttctatctggacagtgtgactatcttatgtcaggaccttcatgtgccaaacgtcagtggtgttttcatatggtaacttctcactagtcaggctagtggagagatgaccaggtgtacagttctgaccatcctgtgttgtaagtacccgtggaatggatttgtaaggtaatctttatagataaacctcaagcaacgattcatgttgtaaccgcttcatatggtttagttttcaaaaaacttcaccatgaagcacaatgtatatatttatgcagtttttaaagtttataacagtctgtttggccattactacactttttactttataatataaaagcaaagtttttgtcattaaatgaatgtttgttgagctacattcttcattgctttaaatgcaataaagtaataatctcacttttatatgaataatatatttcacatctttattattgcagttttctctagaaagctctgagaagctttctctgctgcagctgtgtataaaatatttaaaatgttgtatggtgtaaataaacttttgtctacat

SEQ ID NO: 2198 - DNA, 600 bp, Homo sapiens
catcccacccttctttggctggagccggttcatccctgagggcctgcagtgttcctgtggccctgactggtacaccgtgggcaccaaataccgcagcgagtcctatacgtggttcctcttcatcttctgcttcattgtgcctctctccctcatctgcttctcctacactcagctgctgagggccctgaaagctgttgcagctcagcagcaggagtcagctacgacccagaaggctgaacgggaggtgagccgcatggtggttgtgatggtaggatccttctgtgtctgctacgtgccctacgcggccttcgccatgtacatggtcaacaaccgtaaccatgggctggacttacggcttgtcaccattccttcattcttctccaagagtgcttgcatctacaatcccatcatctactgcttcatgaataagcagttccaagcttgcatcatgaagatggtgtgtgggaaggccatgacagatgaatccgacacatgcagctcccagaaaacagaagtttctactgtctcgtctacccaagttggccccaactgaggacccaatattggcctgtttgcaacagctagaattaaattttactt

SEQ ID NO: 2199 - DNA, 600 bp, Homo sapiens; identical to SEQ ID NO: 2198

SEQ ID NO: 2200 - DNA, 600 bp, Homo sapiens
gaataagctgaaatatggccagactatcaggcccatttgtctcccctgcaccgagggaacaactcgagctttgaggcttcctccaactaccacttgccagcaacaaaaggaagagctgctccctgcacaggatatcaaagctctgtttgtgtctgaggaggagaaaaagctgactcggaaggaggtctacatcaagaatggggataagaaaggcagctgtgagagagatgctcaatatgccccaggctatgacaaagtcaaggacatctcagaggtggtcacccctcggttcctttgtactggaggagtgagtccctatgctgaccccaatacttgcagaggtgattctggcggccccttgatagttcacaagagaagtcgtttcattcaagttggtgtaatcagctggggagtagtggatgtctgcaaaaaccagaagcggcaaaagcaggtacctgctcacgcccgagactttcacatcaacctctttcaagtgctgccctggctgaaggagaaactccaagatgaggatttgggttttctataaggggtttcctgctggacaggggcgtgggattgaattaaaacagctgcgacaac

SEQ ID NO: 2201 - DNA, 600 bp, Homo sapiens; identical to SEQ ID NO: 2200

SEQ ID NO: 2202 - DNA, 1400 bp, Homo sapiens
gaaagcagctcgaaggcacagtgaaggctgtccttacccatctgcacccccctgggctgagagaacctcacgcacctcccatcctaatcatccaatgctcaagaaacaacttctacttctgcccttgccaacggagagcgcctgcccctcccagaacacactccatcagcttaggggctgctgacctccacagcttcccctctctcctcctgcccacctgtcaaacaaagccagaagctgagcaccaggggatgagtggaggttaaggctgaggaaaggccagctggcagcagagtgtggcttcggacaactcagtccctaaaaacacagacattctgccaggcccccaagcctgcagtcatcttgaccaagcaggaagctcagactggttgagttcaggtagctgcccctggctctgaccgaaacagcgctgggtccaccccatgtcaccggatcctgggtggtctgcaggcagggctgactctaggtgcccttggaggccagccagtgacctgaggaagcgtgaaggccgagaagcaagaaagaaacccgacagagggaagaaaagagctttcttcccgaaccccaaggagggagatggatcaatcaaacccggctgtcccctccgcccaggcgagatggggtggggggagaactcctagggtggctgggtccaggggatgggaggttgtgggcattgatggggaaggaggctggcttgtcccctcctcactcccttcccataagctatagacccgaggaaactcagagtcggaacggagaaaggtggactggaaggggcccgtgggagtcatctcaaccatcccctccgttggcatcaccttaggcagggaagtgtaagaaacacactgaggcaggaactcccaggcccaggaagccgtgccctgcccccgtgaggatgtcactcagatggaaccgcaggaagctgctccgtgcttgtttgctcacctggggtgtgggaggcccgtccggcagttctgggtgctccctaccacctccccagcctttgatcaggtggggagtcagggacccctgcccttgtcccactcaagccaagcagccaagctccttgggaggccccactggggaaataacagctgtggctcacgtgagagtgtcttcacggcaggacaacgagaaagccctaagacgtcccttttttctctgagtatctcctcgcaagctgggtaatcgatggggagtctgaagcagatgcaaagaggcagaggatggattttgaattttctttttaataaaaaggcacctataaaacaggtcaatacagtacaggcagcacagagacccccggaacaagcctaaaaattgtttcaaaataaaaaccaagaagatgtcttcaaaaaaaaaaaaaaaaaaaaaaa

SEQ ID NO: 2203 - DNA, 1400 bp, Homo sapiens; identical to SEQ ID NO: 2202

SEQ ID NO: 2204 - DNA, 600 bp, Homo sapiens
tcttagtgttctacattattccactctctattatctctgtctactattccttgattgctaggaccctttacaaaagcaccctgaacatacctactgaggaacaaagccatgcccgtaagcagattgaatcccgaaagagaattgccagaacggtattggtgttggtggctctgtttgccctctgctggttgccaaatcacctcctgtacctctaccattcattcacttctcaaacctatgtagacccctctgccatgcatttcattttcaccattttctctcgggttttggctttcagcaattcttgcgtaaacccctttgctctctactggctgagcaaaagcttccagaagcattttaaagctcagttgttctgttgcaaggcggagcggcctgagcctcctgttgctgacacctctcttaccaccctggctgtgatgggaacggtcccgggcactgggagcatacagatgtctgaaattagtgtgacctcgttcactgggtgtagtgtgaagcaggcagaggacagattctagcttttcaaggaaaaatgctgcttctcctcccagcgtgtgtatccgactctaagctgtgtgcagg

SEQ ID NO: 2205 - DNA, 600 bp, Homo sapiens
ctgacaacgataccttctacgacctgggcttgatgggctatgtcagtggcttcggggtcatggaggagaagattgctcatgacctcaggtttgtccgtctgcccgtagctaatccacaggcctgtgagaactggctccggggaaagaataggatggatgtgttctctcaaaacatgttctgtgctggacacccatctctaaagcaggacgcctgccagggggatagtgggggcgtttttgcagtaagggacccgaacactgatcgctgggtggccacgggcatcgtgtcctggggcatcgggtgcagcaggggctatggcttctacaccaaagtgctcaactacgtggactggatcaagaaagagatggaggaggaggactgagcccagaattcactaggttcgaatccagagagcagtgtggaaaaaaaaaaacaaaaaacaactgaccagttgttgataaccactaagagtctctattaaaattactgatgcagaaagaccgtgtgtgaaattctctttcctgtagtcccattgatgtactttacctgaaacaaccaaagggcccctttctttcttctgaggattgcagaggatatag

SEQ ID NO: 2206 - DNA, 1400 bp, Homo sapiens
attccaaactgaaatgtcaacctgtggactgtggcattcctgaatccattgagaatggtaaagttgaagacccagagagcactttgtttggttctgtcatccgctacacttgtgaggagccatattactacatggaaaatggaggaggtggggagtatcactgtgctggtaacgggagctgggtgaatgaggtgctgggcccggagctgccgaaatgtgttccagtctgtggagtccccagagaaccctttgaagaaaaacagaggataattggaggatccgatgcagatattaaaaacttcccctggcaagtcttctttgacaacccatgggctggtggagcgctcattaatgagtactgggtgctgacggctgctcatgttgtggagggaaacagggagccaacaatgtatgttgggtccacctcagtgcagacctcacggctggcaaaatccaagatgctcactcctgagcatgtgtttattcatccgggatggaagctgctggaagtcccagaaggacgaaccaattttgataatgacattgcactggtgcggctgaaagacccagtgaaaatgggacccaccgtctctcccatctgcctaccaggcacctcttccgactacaacctcatggatggggacctgggactgatctcaggctggggccgaacagagaagagagatcgtgctgttcgcctcaaggcggcaaggttacctgtagctcctttaagaaaatgcaaagaagtgaaagtggagaaacccacagcagatgcagaggcctatgttttcactcctaacatgatctgtgctggaggagagaagggcatggatagctgtaaaggggacagtggtggggcctttgctgtacaggatcccaatgacaagaccaaattctacgcagctggcctggtgtcctgggggccccagtgtgggacctatgggctctacacacgggtaaagaactatgttgactggataatgaagactatgcaggaaaatagcaccccccgtgaggactaatccagatacatcccaccagcctctccaagggtggtgaccaatgcattaccttctgttccttatgatattctcattatttcatcatgactgaaagaagacacgagcgaatgatttaaatagaacttgattgttgagacgccttgctagaggtagagtttgatcatagaattgtgctggtcatacatttgtggtctgactccttggggtcctttccccggagtacctattgtagataacactatgggtggggcactcctttcttgcactattccacagggataccttaattctttgtttcctctttacctgttcaaaattccatttacttgatcattctcagtatccactgtctatgtacaataaaggatgtttataagc

SEQ ID NO: 2207 - DNA, 1400 bp, Homo sapiens
tggccggccagggcttccagggccgactgcggaaatccctccccagcctcctccggaacgtgttgactgaagagtccgtggttagggagagcaagtcattcacgcgctccacagtggacactatggcccagaagacccaggcagtgtaggcgacagcctcatgggccactgtggcccgatgtccccttccttcccggccattctccctcttgttttcacttcacttttcgtgggatggtgttaccttagctaactaactctcctccatgttgcctgtctttcccagacttgtccctccttttccagcgggactcttctcatccttcctcatttgcaaggtgaacacttccttctagggagcaccctcccaccccccacccccccccacacaccatctttccatcccaggcttttgaaaaacaaacagaaacccgtgtatctgggatatttccatatggcaataggtgtgaacagggaactcagaatacagacaagtagaaagattctcgcttaaaaaaatgtatttattttatggcaagttggaaaatatgtaactggaatctcaaaagttctttgggacaaaacagaagtccatggagttatctaagctcttgtaagtgagttaatttaaaaaagaaaattaggctgagagcagtggctcacgcctgtaatcccagaactttgggaggctaaggtgggtggatcacctgaggtcaagagttccagaccaggctggccagcatggtgaaaccccgtctgtactaaaaatacaaaaaattaactgggcatggtagtgggtgcctgtaatcccagctacttgggaggctgaggtgggagaattgctcgaaccttggaggtggaggttgtggtgagccatgatcgcaccactgcactctagcctgggtgaccgagggaggctctgtctcaaaagcaaagcaaaaacaaaaacaaaaacacctaaaaaacctgcagttttgtttgtactttgtttttaaattatgctttctattttgagatcattgcaaactcaacacaattgtaagtaatgatacagagggatcttgtgtacccttcacccagcctcccccaatggcaacatcttgcaaaactacaatgtagtctcataaccaggatattgacattgatacagtgaagatacaggacattctcatcaccacagggatccccaggatgcccacttccctccacccccacaccccagccgtgtccctaacccctggcaaccaggaatccactctccatttctataatgttgtcatttcaagaatgttattcaatggaatcatatagtatgtaacctgttttgagcttaaaaaaaaaagtatacatgactttaatgaggaaaataaaaatgaatattgaaaaaaaaaactttagag

SEQ ID NO: 2208 - DNA, 600 bp, Homo sapiens
attaatttgtgaatttgcaacagtaatcagagttaccattatttaatttgtatgctaaatgaggaggtacattgaaaccctccaaatctccagtctcatctatgtcatattttgccactgcctttcagaagtgatttagttgtggaaagataataaattgatttgttatggttacatatttagcgcacccagagaaaattaattatatttctacagagaaaatgaatttgggatactaaagtagtttaagtctcctttactgaatgtaagggggggatcgaaaagaaggtatttttccaatcacagtgttatgtagtattgttctatttttgtttacaaacatggaaaacagagtatttctggcagctgtggtacaaatgtgataatatattgctaaaatattttagatgttattatgctaatatagtaggggttgaagaaaacaaaatagcttattatagaattgcacatagttctgcccaaattatgtgaaatgcttatgcttgtgtatatgtataaattaatacagagtacgttaaaagcaaaaagatgtatatttgcatatttttctaaagaaatatattattcatcttttcattc

SEQ ID NO: 2209 - DNA, 600 bp, Homo sapiens
agagacaggttttgtagaatattgattggtaatagtaaatcgttctccttacaatcaagttcttgaccctattcggccttatacatctggtcttacaaagaccaaagggatcctgcgcttgatcaactgaaccagtatgccaaaaccaggcatccaatttgtaaaccaattatgataaaggacaaaataagctgtttgccacctcaaaactttatgaacttcaccaccactagtgtctgtccatggagttagaggggacatcacttagaagttcttatagaaaggacacaagtttgtttcctggctttaccttgggaaaatgctagcaacattatagaaattttgccttgttgccttatcttcttccaaatgtactgttaaataaaaataaagggttaccccatgcaatcacaccatgccatgttttccttcctggagggcagccccacaggacggtttatgagcacacaattatagcttgtttctactttaacagggtatgctgcctctgtaaattcatgtattcaaaggaaaagacaccttgcctataattaaaatgtggaactataaaattttttaaaatccaaaaaaaaaaaaaaa

SEQ ID NO: 2210 - DNA, 600 bp, Homo sapiens; identical to SEQ ID NO: 2209

SEQ ID NO: 2211 - DNA, 600 bp, Homo sapiens
cagcagctcctgtggccacagcagctttgtacacgaagaccatccatcctcccttcgtccaccactctactccctccaccctccctccctgatcccgtgtgccaccaggagggagtggcagctatagtctggcaccaaagtccaggacacccagtggggtggagtcggagccactggtcctgctgctggctgcctctctgctccaccttgtgacccagggtggggacaggggctggcccagggctgcaatgcagcatgttgccctggcacctgtggccagtactcgggacagactaagggcgcttgtcccatcctggacttttcctctcatgtctttgctgcagaactgaagagactaggcgctggggctcagcttccctcttaagctaagactgatgtcagaggccccatggcgaggccccttggggccactgcctgaggctcacggtacagaggcctgccctgcctggccgggcaggaggttctcactgttgtgaaggttgtagacgttgtgtaatgtgtttttatctgttaaaatttttcagtgttgacacttaaaattaaacacatgcatacagaaaaaaaaaaaaaaaaaaaaaa

SEQ ID NO: 2212 - DNA, 1400 bp, Homo sapiens
ccagctacaatggatttcctgtcataatgtcaaaagaatctcagagattagtgggatttgccctcagaagagacctgacaattgcaatagaaagtgccaggaaaaaacaagaaggtatcgttggcagttctcgggtgtgttttgcacagcacaccccatctcttccagcagaaagtcctcggccattgaagcttcgaagcattcttgacatgagcccttttacagtgacagaccacaccccaatggagattgtggtggatattttccgaaagctgggactgaggcagtgccttgtaactcacaatgggcgcctccttggcattataacaaaaaaagatatcctccggcatatggcccagacggcaaaccaagaccccgcttcaataatgttcaactgaatctcacagatgaggagagagaagaaacggaagaggaagtttatttgttgaatagcacaactctttaacctgagggagtcatctacttttttttcctcctttacaaaaaaagaaaggaaatataaaagccgggtttttgcaacatggtttgcaaataatgctggtggaatggaggagttgtttggggagggaaaggagagagaaggaaaggagtgaggtatttcccgtctaacagaaagcagcgtatcaactcctattgttctgcactggatgcattcagctgaggatgtgcctgatagtgcaggcttgcgcctcaacagagatgacagcagagtcctcgagcacctggcctgtttgctcacatgcaagacacatacagccctattctagaggatacttgaatggacctctataaacgcaaggttcttgcctttttttaatcaaaactgttctgtttaattcatgaattgtatagttaagcattacctttctacattccagaagagcctttatttctctctctctctctctctctctctctctctctactgagctgtaacaaagcctctttaaatcggtgtatccttttgaagcagtcctttctcatattgagatgtactgtgattttactgaggtttcatcacaagaagggagtgtttcttgtgccattaaccatgtagtttgtaccatcactaaatgcttggaacagtacacatgcaccacaacaaaggctcatcaaacaggtaaagtctcgaaggaagcgagaacgaaatctctcattgtgtgccgtgtggctcaaaaccgaaaacaatgaagcttggttttaaaggataaagttttcttttttgttttcctctcagactttatggataatgtgaccgggtcttatgcaaattttctatttctaaaactactactatgatatacaagtgctgttgagcataattaaataaaatgctgctgctttgacagtaaagagaaggaagtattctgaaaaaaaac

SEQ ID NO: 2213 - DNA, 1400 bp, Homo sapiens; identical to SEQ ID NO: 2212

SEQ ID NO: 2214 - DNA, 600 bp, Homo sapiens
aaattttgtggtggtttccttataagacggaactttgtgctgacggctgctcattgtgcaggaaggtctataacagtcacccttggagcccataacataacagaggaagaagacacatggcagaagcttgaggttataaagcaattccgtcatccaaaatataacacttctactcttcaccacgatatcatgttactaaagttgaaggagaaagccagcctgaccctggctgtggggacactccccttcccatcacaattcaactttgtcccacctgggagaatgtgccgggtggctggctggggaagaacaggtgtgttgaagccgggctcagacactctgcaagaggtgaagctgagactcatggatccccaggcctgcagccacttcagagactttgaccacaatcttcagctgtgtgtgggcaatcccaggaagacaaaatctgcatttaagggagactctgggggccctcttctgtgtgctggggtggcccagggcatcgtatcctatggacggtcggatgcaaagccccctgctgtcttcacccgaatctcccattaccggccctggatcaaccagatcctgcaggcaaattaa

SEQ ID NO: 2215 - DNA, 600 bp, Homo sapiens; identical to SEQ ID NO: 2214

SEQ ID NO: 2216 - DNA, 600 bp, Homo sapiens
acagtatatagctggaggcatttccacactctgagaatgaccatcttctgtctcgttctccctctgctcgttatggccatctgctacacaggaatcatcaaaacgctgctgaggtgccccagtaaaaaaaagtacaaggccatccggctcatttttgtcatcatggcggtgtttttcattttctggacaccctacaatgtggctatccttctctcttcctatcaatccatcttatttggaaatgactgtgagcggagcaagcatctggacctggtcatgctggtgacagaggtgatcgcctactcccactgctgcatgaacccggtgatctacgcctttgttggagagaggttccggaagtacctgcgccacttcttccacaggcacttgctcatgcacctgggcagatacatcccattccttcctagtgagaagctggaaagaaccagctctgtctctccatccacagcagagccggaactctctattgtgttttaggtcagatgcagaaaattgcctaaagaggaaggaccaaggagatgaagcaaacacattaagccttccacactcacctctaaaacagtccttcaaacttccagt

SEQ ID NO: 2217 - DNA, 600 bp, Homo sapiens
gtgggagtggcctgaagagtcctctgaatgaaccttctggcctcccacagactcaaatgctcagaccagctcttccgaaaaccaggccttatctccaagaccagagatagtggggagacttcttggcttggtgaggaaaagcggacatcagctggtcaaacaaactctctgaacccctccctccatcgttttcttcactgtcctccaagccagcgggaatggcagctgccacgccgccctaaaagcacactcatcccctcacttgccgcgtcgccctcccaggctctcaacaggggagagtgtggtgtttcctgcaggccaggccagctgcctccgcgtgatcaaagccacactctgggctccagagtggggatgacatgcactcagctcttggctccactgggatgggaggagaggacaagggaaatgtcaggggcggggagggtgacagtggccgcccaaggccacgagcttgttctttgttctttgtcacagggactgaaaacctctcctcatgttctgctttcgattcgttaagagagcaacattttacccacacacagataaagttttcccttgaggaaacaacagctttaaaag

SEQ ID NO: 2218 - DNA, 600 bp, Homo sapiens; identical to SEQ ID NO: 2217

SEQ ID NO: 2219 - DNA, 600 bp, Homo sapiens
catggacattaggttagccaagaccctggtcctgatcctggtggtgttgatcatctgctggggccctctgcttgcaatcatggtgtatgatgtctttgggaagatgaacaagctcattaagacggtgtttgcattctgcagtatgctctgcctgctgaactccaccgtgaaccccatcatctatgctctgaggagtaaggacctgcgacacgctttccggagcatgtttccctcttgtgaaggcactgcgcagcctctggataacagcatgggggactcggactgcctgcacaaacacgcaaacaatgcagccagtgttcacagggccgcagaaagctgcatcaagagcacggtcaagattgccaaggtaaccatgtctgtgtccacagacacgtctgccgaggctctgtgagcctgatgcctccctggcagcacaggaaaagaatttttttttttaagctcaaaatctagaagagtctattgtctccttggttatatttttttaactttaccatgctcaatgaaaaggtgattgccacatgtcacttatttgcttagtttccgtttgggctaatcttccggggttcgtaggaaaccttt

SEQ ID NO: 2220 - DNA, 600 bp, Homo sapiens; identical to SEQ ID NO: 2219

SEQ ID NO: 2221 - DNA, 600 bp, Homo sapiens
gattccagagatctagacctctctgattgctgatgaggcctcttcccaatttaaacaactcaagtcagaaatcagttcactccctggaagagagagaggggtcttggcactctcttcttacttaaaccagtcccagacacctagacacggacccctttttgctgatgagtgttgggactgactcctggaagacagcctggccttgcccacctgcacacagtctgttggataggtagggccacgaggagtagccaggtaggcgagacacaaaaaggcctgggacagggtcagtacaagtcaggacaggcttcatgcctgcatcctccagagaccaccaggagccaaagcgagcctccaggcccagcaatgagggacttgggagaaatctgagaagaatgggttgttctcttgggaagtcagggtatcagatgggatggacatccaggtcttctctctgcctaattgtcaaggcctccttggctctggagctatgaaaggccccactttcaagtcacccttgccactgaggaccgaggactatgctatgatgaggattaaggtgttgacttgcctctttcagagataaatgacaagccttca

SEQ ID NO: 2222 - DNA, 1380 bp, Homo sapiens
cagcagcatgcgggggttgctggtgttgagtgtcctgttgggggctgtctttggcaaggaggactttgtggggcatcaggtgctccgaatctctgtagccgatgaggcccaggtacagaaggtgaaggagctggaggacctggagcacctgcagctggacttctggcgggggcctgcccaccctggctcccccatcgacgtccgagtgcccttccccagcatccaggcggtcaagatctttctggagtcccacggcatcagctatgagaccatgatcgaggacgtgcagtcgctgctggacgaggagcaggagcagatgttcgccttccggtcccgggcgcgctccaccgacacttttaactacgccacctaccacaccctggaggagatctatgacttcctggacctgctggtggcggagaacccgcaccttgtcagcaagatccagattggcaacacctatgaagggcgtcccatttatgtgctgaagttcagcacggggggcagtaagcgtccagccatctggatcgacacgggcatccattcccgggagtgggtcacccaggccagtggggtctggtttgcaaagaagatcactcaagactatgggcaggatgcagctttcaccgccattctcgacaccttggacatcttcctggagatcgtcaccaaccctgatggctttgccttcacgcacagcacgaatcgcatgtggcgcaagactcggtcccacacagcaggctccctctgtattggcgtggaccccaacaggaactgggacgctggctttgggttgtccggagccagcagtaacccctgctcggagacttaccacggcaagtttgccaattccgaagtggaggtcaagtccattgtagactttgtgaaggaccatgggaacatcaaggccttcatctccatccacagctactcccagctcctcatgtatccctatggctacaaaacagaaccagtccctgaccaggatgagctggatcagctttccaaggctgctgtgacagccctggcctctctctacgggaccaagttcaactatggcagcatcatcaaggcaatttatcaagccagtggaagcactattgactggacctacagccagggcatcaagtactccttcaccttcgagctccgggacactgggcgctatggcttcctgctgccagcctcccagatcatccccacagccaaggagacgtggctggcgcttctgaccatcatggagcacaccctgaatcacccctactgagctgaccctttgacacccttcttgtcctcctctctggccccatccaggcaaccaaataaagtttgagtgtaccaggaacagaatcctggggcttgcaaaaaaaaaaaaaaaaa

SEQ ID NO: 2223 - DNA, 600 bp, Homo sapiens
cggaagacccggtccaaggtatctggaagcctctgtgttggtgtggatcctaaccggaactgggatgcaggttttggaggacctggagccagcagcaacccttgctctgattcataccacggacccagtgccaactctgaagttgaagtgaaatccatagtggacttcatcaagagtcatggaaaagtcaaggccttcattatcctccacagctattcccagctgctgatgttcccctatgggtacaaatgtaccaagttagatgactttgatgagctgagtgaagtggcccaaaaggctgcccaatctctgagaagcctgcatggcaccaagtacaaagtgggaccaatctgctctgtcatctaccaagccagtggaggaagcattgactggtcctatgattatggcatcaagtactcatttgcctttgaactgagagacacagggcgctacggcttcctcttgccagcccgtcagatcctgcccacagccgaggagacctggcttggcttgaaggcaatcatggagcatgtgcgagaccacccctattagggccctggggaagaaacaagagccattaaaatctctttggtttgaagc

SEQ ID NO: 2224 - DNA, 600 bp, Homo sapiens; identical to SEQ ID NO: 2223

SEQ ID NO: 2225 - DNA, 600 bp, Homo sapiens
gctccacccatactggatctagcattggcacagaccccaacagaaattttgatgctggttggtgtgaaattggagcctctcgaaacccctgtgatgaaacttactgtggacctgccgcagagtctgaaaaggagaccaaggccctggctgatttcatccgcaacaaactctcttccatcaaggcatatctgacaatccactcgtactcccaaatgatgatctacccttactcatatgcttacaaactcggtgagaacaatgctgagttgaatgccctggctaaagctactgtgaaagaacttgcctcactgcacggcaccaagtacacatatggcccgggagctacaacaatctatcctgctgctgggggctctgacgactgggcttatgaccaaggaatcagatattccttcacctttgaacttcgagatacaggcagatatggctttctccttccagaatcccagatccgggctacctgcgaggagaccttcctggcaatcaagtatgttgccagctacgtcctggaacacctgtactagttgagaaagctgatggccttgtttcaaaattctcatttttcatttcttttctttcttg

SEQ ID NO: 2226 - DNA, 1400 bp, Homo sapiens
tcttattcaacagcagatttccaacgacacagtcagcccccgagcctccgcatcgtactatgaacagtatcactcactaaatgaaatctattcttggatagaatttataactgagaggcatcctgatatgcttacaaaaatccacattggatcctcatttgagaagtacccactctatgttttaaaggtttctggaaaagaacaaacagccaaaaatgccatatggattgactgtggaatccatgccagagaatggatctctcctgctttctgcttgtggttcataggccatataactcaattctatgggataatagggcaatataccaatctcctgaggcttgtggatttctatgttatgccggtggttaatgtggacggttatgactactcatggaaaaagaatcgaatgtggagaaagaaccgttctttctatgcgaacaatcattgcatcggaacagacctgaataggaactttgcttccaaacactggtgtgaggaaggtgcatccagttcctcatgctcggaaacctactgtggactttatcctgagtcagaaccagaagtgaaggcagtggctagtttcttgagaagaaatatcaaccagattaaagcatacatcagcatgcattcatactcccagcatatagtgtttccatattcctatacacgaagtaaaagcaaagaccatgaggaactgtctctagtagccagtgaagcagttcgtgctattgagaaaactagtaaaaataccaggtatacacatggccatggctcagaaaccttatacctagctcctggaggtggggacgattggatctatgatttgggcatcaaatattcgtttacaattgaacttcgagatacgggcacatacggattcttgctgccggagcgttacatcaaacccacctgtagagaagcttttgccgctgtctctaaaatagcttggcatgtcattaggaatgtttaatgcccctgattttatcattctgcttccgtattttaatttactgattccagcaagaccaaatcattgtatcagattatttttaagttttatccgtagttttgataaaagattttcctattccttggttctgtcagagaacctaataagtgctactttgccattaaggcagactagggttcatgtctttttaccctttaaaaaaaattgtaaaagtctagttacctactttttctttgattttcgacgtttgactagccatctcaagcaactttcgacgtttgactagccatctcaagcaagtttaatcaaagatcatctcacgctgatcattggatcctactcaacaaaaggaagggtggtcagaagtacattaaagatttctgctccaaattttcaataaatttctgcttgtgcctttagaaataca

SEQ ID NO: 2227 - DNA, 1400 bp, Homo sapiens; identical to SEQ ID NO: 2226

SEQ ID NO: 2228 - DNA, 1400 bp, Homo sapiens
cttgtggccaattatccatatgatgagacgcggagtggtagtgctcacgaatacagctcctccccagatgacgccattttccaaagcttggcccgggcatactcttctttcaacccggccatgtctgaccccaatcggccaccatgtcgcaagaatgatgatgacagcagctttgtagatggaaccaccaacggtggtgcttggtacagcgtacctggagggatgcaagacttcaattaccttagcagcaactgttttgagatcaccgtggagcttagctgtgagaagttcccacctgaagagactctgaagacctactgggaggataacaaaaactccctcattagctaccttgagcagatacaccgaggagttaaaggatttgtccgagaccttcaaggtaacccaattgcgaatgccaccatctccgtggaaggaatagaccacgatgttacatccgcaaaggatggtgattactggagattgcttatacctggaaactataaacttacagcctcagctccaggctatctggcaataacaaagaaagtggcagttccttacagccctgctgctggggttgattttgaactggagtcattttctgaaaggaaagaagaggagaaggaagaattgatggaatggtggaaaatgatgtcagaaactttaaatttttaaaaaggcttctagttagctgctttaaatctatctatataatgtagtatgatgtaatgtggtcttttttttagattttgtgcagttaatacttaacattgatttattttttaatcatttaaatattaatcaactttccttaaaataaatagcctcttaggtaaaaatataagaacttgatatatttcattctcttatatagtattcattttcctacctatattacacaaaaaagtatagaaaagatttaagtaattttgccatcctaggcttaaatgcaatattcctggtattatttacaatgcagaattttttgagtaattctagctttcaaaaattagtgaagttcttttactgtaattggtgacaatgtcacataatgaatgctattgaaaaggttaacagatacagctcggagttgtgagcactctactgcaagacttaaatagttcagtataaattgtcgtttttttcttgtgctgactaactataagcatgatcttgttaatgcatttttgatgggaagaaaaggtacatgtttacaaagaggttttatgaaaagaataaaaattgacttcttgcttgtacatataggagcaatactattatattatgtagtccgttaacactacttaaaagtttagggttttctcttggttgtagagtggcccagaattgcattctgaatgaataaaggttaaaaaaaaatccccagtgaaaaaaaa

SEQ ID NO: 2229 - DNA, 600 bp, Homo sapiens
ctctagtgggaccttgactggagaaactccacgatcttcctgaagaagagaaatggatgtttccaaattccacaataagcaatatgtggtgataatgaaaagaatgattcagtcttgacggtgaatggaagacacttacctaacaagtactgctcatttacactcaaattaatcttgaagtagtcttaaaatgtgtaagaagttaaaacttgagaagcaaaaaatgcctgcaaaaagaagatcattttgtatacagagaaccggatgaatataagcaatgaagatgaacatttattgatcttctacatacaagacttcaccataaggccaggagcagtgctcacgccttgtaatcccagcactttgggaggccaaggtgggcggatcaccttgaggtcaggagttcaagaccagcctgaccaacatggtgaaaccctgtctctactaaatattagcggggtgtggtggcgggcacctgtagtcgcagcctttcgggaggctgagacaggagaatcgcttgaaccctagaggcggagtttgcagtgagccgagatagtgccattgtactccagcttgggcaacagagtaagactctgtctc

SEQ ID NO: 2230 - DNA, 600 bp, Homo sapiens
tgaatttggctcctcagccccagcaccaccagctgtgggcagtcagtagcagaggacgatcctccgatgaaagcagccatttctcctttccttcctcccatcccccctccttcggcctatccattactgggcaatagagcaggtatcttcaccccctttcactctctttaaagagatggagcaagagagtggtcagaacacaggccgaatccaggctctatcaccttactagtttgcagtgctgggcaggtgacttcatctcttcgaacttcagtttcttcataagatggaaatgctataccttacctacctcgtaaaagtctgatgaggaaaagattaagtaatagatgcatagcacttaacagagtgcatagcatacactgttttcaataaatgcaccttagcagaaggtcgatgtgtctaccaggcagcgaagctctcttacaaacccctgcctgggtcttagcattgatcagtgacacacctctcccctcaaccttgaccatctccatctgcccttaaatgctgtatgcttttttgccaccgtgcaacttgcccaacatcaatcttcaccctcatccctaaaaaagtaaaacagac

SEQ ID NO: 2231 - DNA, 600 bp, Homo sapiens; identical to SEQ ID NO: 2230

SEQ ID NO: 2232 - DNA, 1400 bp, Homo sapiens
catcatcgtcgcctgggccatcggcaagctctactatgagaatgaacagtgctggtttggcaaggagcctggcgacctggtggactacatctaccaaggccccatcattctcgtgctcctgatcaatttcgtatttctgttcaacatcgtcaggatcctaatgacaaagttacgcgcgtccaccacatccgagacaatccagtacaggaaggcagtgaaggccaccctggtgctcctgcccctcctgggcatcacctacatgctcttcttcgtcaatcccggggaggacgacctgtcacagatcatgttcatctatttcaactccttcctgcagtcgttccagggtttcttcgtgtctgtcttctactgcttcttcaatggagaggtgcgctcagccgtgaggaagaggtggcaccgctggcaggaccatcactcccttcgagtccccatggcccgggccatgtccatccctacatcacccacacggatcagcttccacagcatcaagcagacggccgctgtgtgacccctcggtcgcccacctgcacagctcccctgtcctcctccaccttcttcctctgggttctctgtgctgggcaggctctcgtggggcaggagatgggaggggagagaccagctctccagcctggcaggaaagagggggtgcggcagccaagggggactgcaagggacagggatgagtgggggccaccaggctcagcgcaagaggaagcagagggaattcacaggaccccctgagaagagccagtcagatgtctgcaggcatttgcccatcccagcctctctggccagggccttactgggcccagagcagagaaggacctgtccaacacacacagctatttatagtagcagacacagggctcccctgccctactcatggagccagcagccaggcaatggtgtggccctgcactggcccttggactccacactcagtggtgccctgcagttgggtgggttaacgccaagcaaaggatcagtttggctgccttatcccagggctgtcacctagagaggctcacttgtaccccaccctgttcctgtgtcccctccccagccatcctccccgccttgggggctccatgaaggatgcaggcttccaggcctggcttcctctcttgggagaccccttctctgcctagtccacagattaggcaatcaaggaagacgccatcagggaagccacatccttagtcaaccagttgcatcgtgcggggcaaaatgaggagcagaggcatggaggagggaggcgtgggatgggaatagcagaaccaccatgtcttcagtgattgaaactcataccccattgccctttgccctccagtctccccttcagaaacatctctgctctctgtgaaataaaccatgcctcttgg

SEQ ID NO: 2233 - DNA, 1400 bp, Homo sapiens; identical to SEQ ID NO: 2232

SEQ ID NO: 2234 - DNA, 1400 bp, Homo sapiens
atgctgtggcagcatgtgtggggacggctgtaatggtggctatcctgctgaagcttggaacttctggacaagaaaaggcctggtttctggtggcctctatgaatcccatgtagggtgcagaccgtactccatccctccctgtgagcaccacgtcaacggctcccggcccccatgcacgggggagggagatacccccaagtgtagcaagatctgtgagcctggctacagcccgacctacaaacaggacaagcactacggatacaattcctacagcgtctccaatagcgagaaggacatcatggccgagatctacaaaaacggccccgtggagggagctttctctgtgtattcggacttcctgctctacaagtcaggagtgtaccaacacgtcaccggagagatgatgggtggccatgccatccgcatcctgggctggggagtggagaatggcacaccctactggctggttgccaactcctggaacactgactggggtgacaatggcttctttaaaatactcagaggacaggatcactgtggaatcgaatcagaagtggtggctggaattccacgcaccgatcagtactgggaaaagatctaatctgccgtgggcctgtcgtgccagtcctgggggcgagatcggggtagaaatgcattttattctttaagttcacgtaagatacaagtttcaggcagggtctgaaggactggattggccaaacatcagacctgtcttccaaggagaccaagtcctggctacatcccagcctgtggttacagtgcagacaggccatgtgagccaccgctgccagcacagagcgtccttccccctgtagactagtgccgtgggagtacctgctgcccagctgctgtggccccctccgtgatccatccatctccagggagcaagacagagacgcaggatggaaagcggagttcctaacaggatgaaagttcccccatcagttcccccagtacctccaagcaagtagctttccacatttgtcacagaaatcagaggagagatggtgttgggagccctttggagaacgccagtctccaggtccccctgcatctatcgagtttgcaatgtcacaacctctctgatcttgtgctcagcatgattctttaatagaagttttatttttcgtgcactctgctaatcatgtgggtgagccagtggaacagcgggagcctgtgctggtttgcagattgcctcctaatgacgcggctcaaaaggaaaccaagtggtcaggagttgtttctgacccactgatctctactaccacaaggaaaatagtttaggagaaaccagcttttactgtttttgaaaaattacagcttcaccctgtcaagttaacaaggaatgcctgtgccaataaaaggtttctccaacttga

SEQ ID NO: 2235 - DNA, 1400 bp, Homo sapiens; identical to SEQ ID NO: 2234

SEQ ID NO: 2236 - DNA, 600 bp, Homo sapiens
tgctgttttgttctgtggttttcccctccctgggttcagaaatgctgcctgcctgtctgtctctccatctgtttggtgggggtagagctgatccagagcacagatctgtttcgtgcattggaagaccccacccaagcttggcagccgagctcgtgtatcctggggctcccttcatctccagggagtcccctccccggccctaccagcgcccgctggctgagcccctaccccacaccaggccgtcctcccgggccctcccttggaaacctgccctgcctgagggcccctctgcccagcttgggcccagctgggctctgccaccctacctgttcagtgtcccgggcccgttgaggatgaggccgctagaggcctgaggatgagctggaaggagtgagaggggacaaaacccaccttgttggagcctgcagggtggtgctgggactgagccagtcccaggggcatgtattggcctggaggtggggttgggattgggggctggtgccagccttcctctgcagctgacctctgttgtcctccccttgggcggctgagagccccagctgacatggaaatacagttgttggcctccggcctcccctc

SEQ ID NO: 2237 - DNA, 857 bp, Homo sapiens
caggaaagatgcagccactcctgcttctgctggcctttctcctacccactggggctgaggcaggggagatcatcggaggccgggagagcaggccccactcccgcccctacatggcgtatcttcagatccagagtccagcaggtcagagcagatgtggagggttcctggtgcgagaagactttgtgctgacagcagctcattgctggggaagcaatataaatgtcaccctgggcgcccacaatatccagagacgggaaaacacccagcaacacatcactgcgcgcagagccatccgccaccctcaatataatcagcggaccatccagaatgacatcatgttattgcagctgagcagaagagtcagacggaatcgaaacgtgaacccagtggctctgcctagagcccaggagggactgagacccgggacgctgtgcactgtggccggctggggcagggtcagcatgaggaggggaacagatacactccgagaggtgcagctgagagtgcagagggataggcagtgcctccgcatcttcggttcctacgacccccgaaggcagatttgtgtgggggaccggcgggaacggaaggctgccttcaagggggattccggaggccccctgctgtgtaacaatgtggcccacggcatcgtctcctatggaaagtcgtcaggggttcctccagaagtcttcaccagggtctcaagtttcctgccctggataaggacaacaatgagaagcttcaaactgctggatcagatggagacccccctgtgactgactcttcttctcggggacacaggccagctccacagtgttgccagagccttaataaacgtccacagagtataaataacc

SEQ ID NO: 2238 - DNA, 1400 bp, Homo sapiens
tgctggccttgaggtggggaagccggggagggcagttgaggaccccgcggaggcgcgtgactggttgagcgggcaggccagcctccgagccgggtggacacaggttttaaaacatgaatcctacactcatccttgctgccttttgcctgggaattgcctcagctactctaacatttgatcacagtttagaggcacagtggaccaagtggaaggcgatgcacaacagattatacggcatgaatgaagaaggatggaggagagcagtgtgggagaagaacatgaagatgattgaactgcacaatcaggaatacagggaagggaaacacagcttcacaatggccatgaacgcctttggagacatgaccagtgaagaattcaggcaggtgatgaatggctttcaaaaccgtaagcccaggaaggggaaagtgttccaggaacctctgttttatgaggcccccagatctgtggattggagagagaaaggctacgtgactcctgtgaagaatcagggtcagtgtggttcttgttgggcttttagtgctactggtgctcttgaaggacagatgttccggaaaactgggaggcttatctcactgagtgagcagaatctggtagactgctctgggcctcaaggcaatgaaggctgcaatggtggcctaatggattatgctttccagtatgttcaggataatggaggcctggactctgaggaatcctatccatatgaggcaacagaagaatcctgtaagtacaatcccaagtattctgttgctaatgacaccggctttgtggacatccctaagcaggagaaggccctgatgaaggcagttgcaactgtggggcccatttctgttgctattgatgcaggtcatgagtccttcctgttctataaagaaggcatttattttgagccagactgtagcagtgaagacatggatcatggtgtgctggtggttggctacggatttgaaagcacagaatcagataacaataaatattggctggtgaagaacagctggggtgaagaatggggcatgggtggctacgtaaagatggccaaagaccggagaaaccattgtggaattgcctcagcagccagctaccccactgtgtgagctggtggacggtgatgaggaaggacttgactggggatggcgcatgcatgggaggaattcatcttcagtctaccagcccccgctgtgtcggatacacactcgaatcattgaagatccgagtgtgatttgaattctgtgatattttcacactggtaaatgttacctctattttaattactgctataaataggtttatattattgattcacttactgactttgcattttcgtttttaaaaggatgtataaatttttacctgtttaaataaaatttaatttcaaatgt

SEQ ID NO: 2239 - DNA, 1400 bp, Homo sapiens; identical to SEQ ID NO: 2238

SEQ ID NO: 2240 - DNA, 600 bp, Homo sapiens
agcctgcagcacgtgctcttgccagtgctggaccgcgccacctgcaaccggcgcacgcaccacgacggcgccatcaccgagcgcttgatgtgcgcggagagcaatcgccgggacagctgcaagggtgactccgggggcccgctggtgtgcgggggcgtgctcgagggcgtggtcacctcgggctcgcgcgtttgcggcaaccgcaagaagcccgggatctacacccgcgtggcgagctatgcggcctggatcgacagcgtcctggcctagggtgccggggcctgaaggtcagggtcacccaagcaacaaagtcccgagcaatgaagtcatccactcctgcatctggttggtctttattgagcacctactatatgcagaaggggaggccgaggtgggaggatcattggatctcaggagttggagatcagcatgggccacgtagcgcgactccatctctacaaataaataaaaattagctgggcaattggcgggcatggaggtgggtgcttgtagttccagctactcaggaggctgaggtgggaggatgacttgaacgcaggaggctgaggctgcagtgagttgtgattgcaccactgccct

SEQ ID NO: 2241 - DNA, 600 bp, Homo sapiens; identical to SEQ ID NO: 2240

SEQ ID NO: 2242 - DNA, 1400 bp, Homo sapiens
gtgttcaagtgtggaatagccgtggcgcctgtatcccggtgggagtactatgactcagtgtacacagaacgttacatgggtctcccaactccagaagacaaccttgaccattacagaaattcaacagtcatgagcagagctgaaaattttaaacaagttgagtacctccttattcatggaacagcagatgataacgttcactttcagcagtcagctcagatctccaaagccctggtcgatgttggagtggatttccaggcaatgtggtatactgatgaagaccatggaatagctagcagcacagcacaccaacatatatatacccacatgagccacttcataaaacaatgtttctctttaccttagcacctcaaaataccatgccatttaaagcttattaaaactcatttttgttttcattatctcaaaactgcactgtcaagatgatgatgatctttaaaatacacactcaaatcaagaaacttaaggttacctttgttcccaaatttcatacctatcatcttaagtagggacttctgtcttcacaacagattattaccttacagaagtttgaattatccggtcgggttttattgtttaaaatcatttctgcatcagctgctgaaacaacaaataggaattgtttttatggaggctttgcatagattccctgagcaggattttaatctttttctaactggactggttcaaatgttgttctcttctttaaagggatggcaagatgtgggcagtgatgtcactagggcagggacaggataagagggattagggagagaagatagcagggcatggctgggaacccaagtccaagcataccaacacgagcaggctactgtcagctcccctcggagaagagctgttcacagccagactggcacagttttctgagaaagactattcaaacagtctcaggaaatcaaatatgcaaagcactgacttctaagtaaaaccacagcagttgaaaagactccaaagaaatgtaagggaaactgccagcaacgcaggcccccaggtgccagttatggctataggtgctacaaaaacacagcaagggtgatgggaaagcattgtaaatgtgcttttaaaaaaaaatactgatgttcctagtgaaagaggcagcttgaaactgagatgtgaacacatcagcttgccctgttaaaagatgaaaatatttgtatcacaaatcttaacttgaaggagtccttgcatcaatttttcttatttcatttctttgagtgtcttaattaaaagaatattttaacttccttggactcattttaaaaaatggaacataaaatacaatgttatgtattattattcccattctacatactatggaatttctcccagtcatttaataaatgtgccttcattttttc

SEQ ID NO: 2243 - DNA, 1400 bp, Homo sapiens; identical to SEQ ID NO: 2242

SEQ ID NO: 2244 - DNA, 600 bp, Homo sapiens
cgcccacactagcctctgtgttcccgttagggacatcacaccctgtctcacgtcgcagtgccatggacgcagcagttacagcaccattgttttagcagtgcgtgttcatatatgggcttgctacttcctgtaatgaggacgttcaacatggtgaggggctacaagaaaacgcttttctgtacagagtcttactgtagctacgctaatggttaacctgatagaattaactcgtatttttctatggttttaacctgatgctccactgtctccgtcatggggttgttttgctgtttggggttgggccttgtttccctttcctttctccagtccacgtgtagactttgcgcttgatgaagaagcagatcggaagtaactgctccctcctcaaggttgtcttcagacgtcttggggacgttcctaaacactgagggggaagacagccaatagcacccattaaaagaaatacctaaataaaacctctctcccactcagctatgctagggcttggctgtaggtgtgcactgtctatttacatccgtccttacaaccatccttgtcctccttggtaccgtatcaagctctttcccatgacatttggtt

SEQ ID NO: 2245 - DNA, 1400 bp, Homo sapiens
gcactgtatatagaagtctaaaacacacctaagagaaaaagatcgaatttttcagatgattcggaaattttcattcaggtatttgtaatagtgacatatatatgtatatacatatcacctcctattctcttaatttttgttaaaatgttaactggcagtaagtcttttttgatcattcccttttccatataggaaacataattttgaagtggccagatgagtttatcatgtcagtgaaaaataattacccacaaatgccaccagtaacttaacgattcttcacttcttggggttttcagtatgaacctaactccccaccccaacatctccctcccacattgtcaccatttcaaagggcccacagtgacttttgctgggcattttcccagatgtttacagactgtgagtacagcagaaaatcttttactagtgtgtgtgtgtatatatataaacaattgtaaatttcttttagcccatttttctagactgtctctgtggaatatatttgtgtgtgtgatatatgcatgtgtgtgatggtatgtatggatttaatctaatctaataattgtgccccgcagttgtgccaaagtgcatagtctgagctaaaatctaggtgattgttcatcatgacaacctgcctcagtccattttaacctgtagcaaccttctgcattcataaatcttgtaatcatgttaccattacaaatgggatataagaggcagcgtgaaagcagatgagctgtggactagcaatatagggttttgtttggttggttggtttgataaagcagtatttggggtcatattgtttcctgtgctggagcaaaagtcattacactttgaagtattatattgttcttatcctcaattcaatgtggtgatgaaattgccaggttgtctgatatttctttcagacttcgccagacagattgctgataataaattaggtaagataatttgttgggccatattttaggacaggtaaaataacatcaggttccagttgcttgaattgcaaggctaagaagtactgcccttttgtgtgttagcagtcaaatctattattccactggcgcatcatatgcagtgatatatgcctataatataagccataggttcacaccattttgtttagacaattgtctttttttcaagatgctttgtttctttcatatgaaaaaaatgcattttataaattcagaaagtcatagatttctgaaggcgtcaacgtgcattttatttatggactggtaagtaactgtggtttactagcaggaatatttccaatttctacctttactacatcttttcaacaagtaactttgtagaaatgagccagaagccaaggccctgagttggcagtggcccataagtgtaaaataaaagtttacagaaacctt

SEQ ID NO: 2246 - DNA, 600 bp, Homo sapiens
acagctgctcactgcgtggattaccagaagactttccgcgtggtggctggagaccataacctgagccagaatgatggcactgagcagtacgtgagtgtgcagaagatcgtggtgcatccatactggaacagcgataacgtggctgccggctatgacatcgccctgctgcgcctggcccagagcgttaccctcaatagctatgtccagctgggtgttctgccccaggagggagccatcctggctaacaacagtccctgctacatcacaggctggggcaagaccaagaccaatgggcagctggcccagaccctgcagcaggcttacctgccctctgtggactatgccatctgctccagctcctcctactggggctccactgtgaagaacaccatggtgtgtgctggtggagatggagttcgctctggatgccagggtgactctgggggccccctccattgcttggtgaatggcaagtattctctccatggagtgaccagctttgtgtccagccggggctgtaatgtctccaggaagcctacagtcttcacccaggtctctgcttacatctcctggataaataatgtcatcgcctccaactga

SEQ ID NO: 2247 - DNA, 920 bp, Homo sapiens
gcacggaggggcagagaccccggagccccagccccaccatgaccctcggccgccgactcgcgtgtcttttcctcgcctgtgtcctgccggccttgctgctggggggcaccgcgctggcctcggagattgtggggggccggcgagcgcggccccacgcgtggcccttcatggtgtccctgcagctgcgcggaggccacttctgcggcgccaccctgattgcgcccaacttcgtcatgtcggccgcgcactgcgtggcgaatgtaaacgtccgcgcggtgcgggtggtcctgggagcccataacctctcgcggcgggagcccacccggcaggtgttcgccgtgcagcgcatcttcgaaaacggctacgaccccgtaaacttgctcaacgacatcgtgattctccagctcaacgggtcggccaccatcaacgccaacgtgcaggtggcccagctgccggctcagggacgccgcctgggcaacggggtgcagtgcctggccatgggctggggccttctgggcaggaaccgtgggatcgccagcgtcctgcaggagctcaacgtgacggtggtgacgtccctctgccgtcgcagcaacgtctgcactctcgtgaggggccggcaggccggcgtctgtttcggggactccggcagccccttggtctgcaacgggctaatccacggaattgcctccttcgtccggggaggctgcgcctcagggctctaccccgatgcctttgccccggtggcacagtttgtaaactggatcgactctatcatccaacgctccgaggacaacccctgtccccacccccgggacccggacccggccagcaggacccactgagaagggctgcccgggtcacctcagctgcccacacccacactctccagcatctggcacaataaacattctctgttttgt

SEQ ID NO: 2248 - DNA, 920 bp, Homo sapiens; identical to SEQ ID NO: 2247

SEQ ID NO: 2249 - DNA, 1400 bp, Homo sapiens
aagcttctgagacatataccatctgcagctgtaatcagatggcaaatcttgccgttatcatggcgtctggggagctcacgatggacttttccttgtacatcattagccatgtaggcattatcatctccttggtgtgcctcgtcttggccatcgccacctttctgctgtgtcgctccatccgaaatcacaacacctacctccacctgcacctctgcgtgtgtctcctcttggcgaagactctcttcctcgccggtatacacaagactgacaacaagacgggctgcgccatcatcgcgggcttcctgcactaccttttccttgcctgcttcttctggatgctggtggaggctgtgatactgttcttgatggtcagaaacctgaaggtggtgaattacttcagctctcgcaacatcaagatgctgcacatctgtgcctttggttatgggctgccgatgctggtggtggtgatctctgccagtgtgcagccacagggctatggaatgcataatcgctgctggctgaatacagagacagggttcatctggagtttcttggggccagtttgcacagttatagtgatcaactcccttctcctgacctggaccttgtggatcctgaggcagaggctttccagtgttaatgccgaagtctcaacgctaaaagacaccaggttactgaccttcaaggcctttgcccagctcttcatcctgggctgctcctgggtgctgggcatttttcagattggacctgtggcaggtgtcatggcttacctgttcaccatcatcaacagcctgcagggggccttcatcttcctcatccactgtctgctcaacggccaggtacgagaagaatacaagaggtggatcactgggaagacgaagcccagctcccagtcccagacctcaaggatcttgctgtcctccatgccatccgcttccaagacgggttaaagcctttcttgctttcaaatatgctatggagccacagttgaggacagtagtttcctgcaggagcctaccctgaaatctcttctcagcttaacatggaaatgaggatcccaccagccccagaaccctctggggaagaatgttgggggccgtcttcctgtggttgtatgcactgatgagaaatcagacgtttctgctccaaacgaccattttatcttcgtgctctgcaacttcttcaattccagagtttctgagaacagacccaaattcaatggcatgaccaagaacacctggctaccattttgttttctcctgcccttgttggtgcatggttctaagcgtgcccctccagcgcctatcatacgcctgacacagagaacctctcaataaatgatttgtcgcctgtctgactgatttaccctaaaaaaaaaaaaaaaaaaaaaaaaaaaaaaa

SEQ ID NO: 2250 - DNA, 600 bp, Homo sapiens
atgggactgtaagccttcccgtaaatctcaggcttctggtgtatcggtatgggatgcagaactctggcaatgagatttcatggaactacactcttgagcaataccagaaaacttcattagctcaagaaaaagaaaaactgctgtatggattagcatcagtgaagaacgttactcttttgtcaaggtatttggatttgctcaaggacacgaaccttattaaaactcaggatgtgtttacagtcattcgatatatctcatataacagctatgggaagaacatggcctggaattggatacaactcaactgggactatctagtcaacagatatacactcaataacagaaaccttggccgaattgtcacaatagcagagccattcaacactgaactgcaactgtggcagatggagagcttttttgcaaaatatccacaagctggagcaggagaaaaacctagggaacaagtgctggaaacagtgaaaaacaatatagagtggctaaaacaacatagaaacaccatcagagaatggttttttaatttacttgagagtggttaatgtattcaaatgttagagtttaattttgtgaatctattgtttc

SEQ ID NO: 2251 - DNA, 600 bp, Homo sapiens; identical to SEQ ID NO: 2250

SEQ ID NO: 2252 - DNA, 600 bp, Homo sapiens
caaatgttttgctcaatagattgctcaaatcaggttttcttttaagaatcaatcatgtcagtctgcttagaaataacagaagaaaatagaattgacattgaaatctaggaaaattattctataatttccatttacttaagacttaatgagactttaaaagcattttttaacctcctaagtatcaagtatagaaaatcttcatggaattcacaaagtaatttggaaattaggttgaaacatatctcttatcttacgaaaaaatggtagcattttaaacaaaatagaaagttgcaaggcaaatgtttatttaaaagagcaggccaggcgcggtggctcacgcctgtaatcccagcactttgggaggctgaggcgggtggatcacgaggtcaggagatcgagaccatcctggctaacacggtgaaacccgtctctactaaaaatgcaaaaaaaattagccgggcgtggtggcaggcacctgtagtcccagctactcgggaggctgaggcaggagactggcgtgaacccaggaggcggaccttgtagtgagccgagatcgcgccactgtgctccagcctgggcaacagagcaagactccatctc

SEQ ID NO: 2253 - DNA, 1281 bp, Homo sapiens
cccagacctagaactacccagagcaagaccacagctggtgaacagtccaggagcagacaagatggagacaaattcctctctccccacgaacatctctggagggacacctgctgtatctgctggctatctcttcctggatatcatcacttatctggtatttgcagtcacctttgtcctcggggtcctgggcaacgggcttgtgatctgggtggctggattccggatgacacacacagtcaccaccatcagttacctgaacctggccgtggctgacttctgtttcacctccactttgccattcttcatggtcaggaaggccatgggaggacattggcctttcggctggttcctgtgcaaattcgtctttaccatagtggacatcaacttgttcggaagtgtcttcctgatcgccctcattgctctggaccgctgtgtttgcgtcctgcatccagtctggacccagaaccaccgcaccgtgagcctggccaagaaggtgatcattgggccctgggtgatggctctgctcctcacattgccagttatcattcgtgtgactacagtacctggtaaaacggggacagtagcctgcacttttaacttttcgccctggaccaacgaccctaaagagaggataaatgtggccgttgccatgttgacggtgagaggcatcatccggttcatcattggcttcagcgcacccatgtccatcgttgctgtcagttatgggcttattgccaccaagatccacaagcaaggcttgattaagtccagtcgtcccttacgggtcctctcctttgtcgcagcagccttttttctctgctggtccccatatcaggtggtggcccttatagccacagtcagaatccgtgagttattgcaaggcatgtacaaagaaattggtattgcagtggatgtgacaagtgccctggccttcttcaacagctgcctcaaccccatgctctatgtcttcatgggccaggacttccgggagaggctgatccacgcccttcccgccagtctggagagggccctgaccgaggactcaacccaaaccagtgacacagctaccaattctactttaccttctgcagaggtggagttacaggcaaagtgaggagggagctgggggacactttcgagctcccagctccagcttcgtctcaccttgagttaggctgagcacaggcatttcctgcttattttaggattacccactcatcagaaaaaaaaaaaaaagcctttgtgtcccctgatttggggagaataaacagatatgagttt

SEQ ID NO: 2254 - DNA, 600 bp, Homo sapiens
ggccacagactgggtgcaggccaggtcccaggcctcaccctggggctcactgtgggaatttggggagtggctgccctactgacactgcctgtcaccctggccagtggtgcttctggtggactctgcaccctgatatacagcacggagctgaaggctttgcaggccacacacactgtagcctgtcttgccatctttgtcttgttgccattgggtttgtttggagccaaggggctgaagaaggcattgggtatggggccaggcccctggatgaatatcctgtgggcctggtttattttctggtggcctcatggggtggttctaggactggatttcctggtgaggtccaagctgttgctgttgtcaacatgtctggcccagcaggctctggacctgctgctgaacctggcagaagccctggcaattttgcactgtgtggctacgcccctgctcctcgccctattctgccaccaggccacccgcaccctcttgccctctctgcccctccctgaaggatggtcttctcatctggacacccttggaagcaaatcctagttctcttcccacctgtcaacctgaattaaagtctacactgcctttgtg

SEQ ID NO: 2255 - DNA, 600 bp, Homo sapiens
cattgataaatactccaggatcatctttccagcagcatacattttattcaatttaatatactggtctattttctcctagatgcttgtaattctacaaatttcacatttccatggcatgcactacagaaataactgtataatgaaaaagtatttaaggatatggttaaaaaaaaatcccaggacccacccatgttttcactatcccttctgcagctttccaaagctacattgacgagacacttactggtttaatttgcacttattaaccgtctgttgaatacacagcattatattaggtgctgcagaaatacgacactgtagcgactgatgttagttgttacccagataaaatggaaaagcacactaccagtgttgtgggcacatttagytccacccgattagacccttgatgctattcacatgaataatttatttttccctaaaagtgtcattacattgttcaggctacgtgaacttggaagcaccatcaggccatttgcatgaaattcacatgcacctaaatcctcactttgacagaaactcatgcttcagttataacctattacctattttgtatgcgactccacctccgcatgttcg

SEQ ID NO: 2256 - DNA, 600 bp, Homo sapiens; identical to SEQ ID NO: 2255

SEQ ID NO: 2257 - DNA, 1040 bp, Homo sapiens
aacacatttcatctgggcttcttaaatctaaatctttaaaatgactaagttttcttccttttctctgtttttcctaatagttggggcttatatgactcatgtgtgtttcaatatggaaattattggagggaaagaagtgtcacctcattccaggccatttatggcctccatccagtatggcggacatcacgtttgtggaggtgttctgattgatccacagtgggtgctgacagcagcccactgccaatatcggtttaccaaaggccagtctcccactgtggttttaggcgcacactctctctcaaagaatgaggcctccaaacaaacactggagatcaaaaaatttataccattctcaagagttacatcagatcctcaatcaaatgatatcatgctggttaagcttcaaacagccgcaaaactcaataaacatgtcaagatgctccacataagatccaaaacctctcttagatctggaaccaaatgcaaggttactggctggggagccaccgatccagattcattaagaccttctgacaccctgcgagaagtcactgttactgtcctaagtcgaaaactttgcaacagccaaagttactacaacggcgacccttttatcaccaaagacatggtctgtgcaggagatgccaaaggccagaaggattcctgtaagggtgactcagggggccccttgatctgtaaaggtgtcttccacgctatagtctctggaggtcatgaatgtggtgttgccacaaagcctggaatctacaccctgttaaccaagaaataccagacttggatcaaaagcaaccttgtcccgcctcatacaaattaagttacaaataattttattggatgcacttgcttcttttttcctaatatgctcgcaggttagagttgggtgtaagtaaagcagagcacatatggggtccatttttgcacttgtaagtcattttattaaggaatcaagttctttttcacttgtatcactgatgtatttctaccatgctggttttattctaaataaaatttagaagact

SEQ ID NO: 2258 - DNA, 1040 bp, Homo sapiens; identical to SEQ ID NO: 2257

SEQ ID NO: 2259 - DNA, 1400 bp, Homo sapiens
tgccagttctgccgcttccagaagtgcctggcggtgggcatggtgaaggaagttgtccgaacagacagcctgaaggggcggcggggccggctaccttcaaaacccaagcagcccccagatgcctcccctgccaatctcctcacttccctggtccttgcacacctggattcagggcccagcactgccaaactggactactccaagttccaggagctggtgctgccccactttgggaaggaagatgctggggatgtacagcagttctacgacctgctctccggttctctggaggtcatccgaaagtgggcggagaagatccctggctttgctgagctgtcaccggctgaccaggacctgttgctggagtcggccttcctggagctcttcatcctccgcctggcgtacaggtctaagccaggcgagggcaagctcatcttctgctcaggcctggtgctacaccggctgcagtgtgcccgtggcttcggggactggattgacagtatcctggccttctcaaggtccctgcacagcttgcttgtcgatgtccctgccttcgcctgcctctctgcccttgtcctcatcaccgaccggcatgggctgcaggagccgcggcgggtggaggagctgcagaaccgcatcgccagctgcctgaaggagcacgtggcagctgtggcgggcgagccccagccagccagctgcctgtcacgtctgttgggcaaactgcccgagctgcggaccctgtgcacccagggcctgcagcgcatcttctacctcaagctggaggacttggtgccccctccacccatcattgacaagatcttcatggacacgctgcccttctgacccctgcctgggaacacgtgtgcacatgcgcactctcatatgccaccccatgtgcctttagtccacggacccccagagcacccccaagcctgggcttgagctgcagaatgactccaccttctcacctgctccaggaggtttgcagggagctcaagcccttggggagggggatgccttcatgggggtgaccccacgatttgtcttatcccccccagcctggccccggcctttatgttttttgtaagataaaccgtttttaacacatagcgccgtgctgtaaataagcccagtgctgctgtaaatacaggaagaaagagcttgaggtgggagcggggctgggaggaagggatgggccccgccttcctgggcagcctttccagcctcctgcctggctctctcttcctaccctccttccacatgtacataaactgtcactctaggaagaagacaaatgacagattctgacatttatatttgtgtattttcctggatttatagtatgtgacttttctgattaatatatttaatatattgaataaaaaatagacatgtagttg

SEQ ID NO: 2260 - DNA, 1400 bp, Homo sapiens; identical to SEQ ID NO: 2259

SEQ ID NO: 2261 - DNA, 1400 bp, Homo sapiens
gaccaggagccgctgtacccagtgcaggtcagctctgcggacgctcggctcatggtctttgacaagacggaagggacgtggcggctgctgtgctcctcgcgctccaacgccagggtagccggactcagctgcgaggagatgggcttcctcagggcactgacccactccgagctggacgtgcgaacggcgggcgccaatggcacgtcgggcttcttctgtgtggacgaggggaggctgccccacacccagaggctgctggaggtcatctccgtgtgtgattgccccagaggccgtttcttggccgccatctgccaagactgtggccgcaggaagctgcccgtggaccgcatcgtgggaggccgggacaccagcttgggccggtggccgtggcaagtcagccttcgctatgatggagcacacctctgtgggggatccctgctctccggggactgggtgctgacagccgcccactgcttcccggagcggaaccgggtcctgtcccgatggcgagtgtttgccggtgccgtggcccaggcctctccccacggtctgcagctgggggtgcaggctgtggtctaccacgggggctatcttccctttcgggaccccaacagcgaggagaacagcaacgatattgccctggtccacctctccagtcccctgcccctcacagaatacatccagcctgtgtgcctcccagctgccggccaggccctggtggatggcaagatctgtaccgtgacgggctggggcaacacgcagtactatggccaacaggccggggtactccaggaggctcgagtccccataatcagcaatgatgtctgcaatggcgctgacttctatggaaaccagatcaagcccaagatgttctgtgctggctaccccgagggtggcattgatgcctgccagggcgacagcggtggtccctttgtgtgtgaggacagcatctctcggacgccacgttggcggctgtgtggcattgtgagttggggcactggctgtgccctggcccagaagccaggcgtctacaccaaagtcagtgacttccgggagtggatcttccaggccataaagactcactccgaagccagcggcatggtgacccagctctgaccggtggcttctcgctgcgcagcctccagggcccgaggtgatcccggtggtgggatccacgctgggccgaggatgggacgtttttcttcttgggcccggtccacaggtccaaggacaccctccctccagggtcctctcttccacagtggcgggcccactcagccccgagaccacccaacctcaccctcctgacccccatgtaaatattgttctgctgtctgggactcctgtctaggtgcccctgatgatgggatgctctttaaataataaagatggttttgatt

SEQ ID NO: 2262 - DNA, 600 bp, Homo sapiens
agtgcctccgtctcctagtgataatgctccaagtctatgaactgttaaatcagcattcattttaagaaaagcaactttagtttcaaagatacttttaagcttctaaattgatcatttaaactatttctttaaataagagagccaaattagaggctcatactttagcttgtgaagaagataatgaattttttaaagggaactttctatgcaatgttcaggataaatcgatactgctggccaatcagtgtcatctcctgggtaaattttgatgtcgcattataaagacatgcataattgatggtttctagattatctagtccaaacaatagagtttattttttcttcatctgaaccaacatgctacagtagctaagaagtattaaaactatatacatccatataaagatgaaatatgaactatctcattagaagtcatagttgaccacagacatgttattcttctgaaagagccacattttggttttatttcttgtcacatgatttcttttcttgatggatgaaaaatatgaaatgaaatcttttatatctgttgcctagttttgtacatggatctcattttacaagagaatctctctgcta

SEQ ID NO: 2263 - DNA, 600 bp, Homo sapiens; identical to SEQ ID NO: 2262

SEQ ID NO: 2264 - DNA, 1400 bp, Homo sapiens
gaaccatgggctacgcaacggtggtggcgtgggcgacattctccgcaagccctccaaagatgagtctctcttcccagcccgagtggtctatgacctcctgttcttcttcatcgtcatcatcattgtgctgaacctcatctttggggtaatcatcgacaccttcgctgacctgcgtagtgagaagcagaagaaggaggagattcttaagacgacatgcttcatctgtggtctggagagggacaagtttgataacaagacagtgtcatttgaggaacacatcaagctggagcacaacatgtggaactacttgtacttcattgtgctggtccgcgtgaagaacaagaccgactacacgggccctgagagctacgtggcccagatgatcaagaacaagaacctggactggttcccccggatgcgggccatgtcccttgtcagcaatgagggcgagggggagcagaatgagattcggattctccaggacaagctcaactccaccatgaagctggtgtcccacctcactgcccagctcaacgagctcaaggagcagatgacggagcagcggaaacgcaggcaacgcctaggctttgtggatgtccagaactgcattagccgctgaggagagccaccgaaggccccaacaggggatgctcatcactggagactgcgactgggaagaacactgccccctccctcgggttgggtggcccagccagctggccagcctccactcccactctgccagacaccctgacacccacccaggctttgaagagcatggagggggagcctcagagctgacagtcctgcttagagcccttaaaaagacttgaaagttcactgggactcagtttaccttaatgccttagcagaagataaatcctacctagagacctttgttccttaaagcaataactgacaactctttgtagtcctccttgtgggtagttaagagtggggtcacccctttaactccaagcactacattttggcggctgcggcctctgggggaggtggcagttatgctgttactagtgattttagggctttgttatttaacttatttcaagggtgctgtgctcagccctgcccatggctgtgcagctccctccgtgcctcagatctgctgtagccagtgcagacctcactgtcgtgtccatgccacccccggcatggctccaggtggcctggtgactccatgatggacgatcttgctcccaggacctgcctcttcccaggcttcctggggaagagttgtacgcccaggcaacaagggctgagctgcgcttgcgtggctgtttcatgaccgcttgtttttctccttttggtgtaatgttttacaaatcctttggcctgagaactaatatgttaattgccttaaataaattaatagaaatcta

SEQ ID NO: 2265 - DNA, 1400 bp, Homo sapiens; identical to SEQ ID NO: 2264

SEQ ID NO: 2266 - DNA, 1400 bp, Homo sapiens
atatcttcactgaggaggtgaagttctatcagttgggggaggaggccctgttgaagtttcgggaggacgagggctttgtgagagaagaggaagacagggccctccccgagaatgaatttaaaaagcagatttggctcctctttgaatatccagagagctccagtcctgcaaggggcatagccattgtgtccgtcctggtcatcttaatctccattgtcatcttttgcctggaaaccttgcctgagtttagggacgacagggatctcgtcatggcactgagtgctggcgggcatggtgggttgttgaatgatacttcagcaccccatctggagaactcagggcacacaatattcaatgaccccttcttcatcgtggaaacagtctgtattgtatggttttcctttgagtttgtggttcgctgctttgcttgtcccagccaagcactcttcttcaaaaacatcatgaacatcattgacattgtctccattttgccttacttcatcacactgggcactgacctggcccagcaacaggggggtggcaatggtcagcagcagcaggccatgtcctttgccatcctcagaatcattcgtctggtccgagtattccggatcttcaaactctccaggcactccaaaggcctgcagatcctgggccacaccctcagagccagcatgcgggaactgggccttctgatcttcttcctcttcattggggtcatcctcttttctagtgctgtgtattttgcagaggcggatgaacctactacccatttccaaagcatcccagatgcattttggtgggctgtggtgaccatgacaactgtgggctatggggacatgaagcccatcactgtagggggcaagattgtcgggtccctgtgtgccattgcgggtgtcttaaccattgctttgccagtgccagtgattgtctctaactttaactatttctaccacagagagactgaaaatgaggaacagacacagctaacgcagaatgcagtcagttgtccatacctcccctctaatttgctcaagaaatttcggagctctacttcttcttccctgggggacaagtcagagtatctagagatggaagaaggagttaaggaatctctgtgtgcaaaggaggagaagtgtcagggaaagggggatgacagtgagacagataaaaacaactgttctaatgcaaaggctgtggagactgatgtgtgaatctttttccacctgccactgctcccccctcagcatctccaaatatatttatgcatagagagtgcagttatgaaaatgaaatatgcaaatgatccaatgcatacagtagtacactatttaatggttatacatggcataattgttactaaacttgtattacatatcaaataaatgatacatcttgga

SEQ ID NO: 2267 - DNA, 600 bp, Homo sapiens
gaggcttttttgctgagtcaagcaaacacttgcctgctctgccccttggaggtgcatttgacctgctctcactggtaaggtgacttggtggcgttcccacttgatttagccattttcttccattgtgagaccactgccatctatccacctgcccacctccccttttgtttctcagtaacattgccatttgttttttgcctttgataaactgtgatgtactgttctgagatcttttgggtgcagttctgaaactgaaaggactgttaacatgtttttaattttatatctatgctttcagactctttgatgataatttttttttttaaaaattatctctcgaagagcaacttacgagaggacagccttatgagggtttgcttgagaggcagtgtggcttctgtgactgccagctctaaatctcgatcttgccataactttacagggtaacttgggtccacagtcactctttgtgcctcagtttacccacccattaaatgggaacattactgtcttcccctccctacctcatggggaatgtctgggaagctggggacattgctatgcaaatgtgtgaatcttagtcatggatttgatttttag

SEQ ID NO: 2268 - DNA, 600 bp, Homo sapiens
acgctgctggtggacggcgccgccgcaggccgtcgcaagcccggcgcgggcaacagctacctggacaaggtggggctggtgctgcgcgtgctgcgggcgctgcgcatcctgtacgtgatgcgcctggcgcgccactccctggggctgcagacgctggggctcacggcccgccgctgcacccgcgagttcgggctcctgctgctcttcctctgcgtggccatcgccctcttcgcgcccctgctctacgtcatcgagaacgagatggccgacagccccgagttcaccagcatccctgcctgctactggtgggctgtcatcaccatgacgacggtggactatggcgacatggtccccaggagcaccccgggccaggtagtggccctgagcagcatcctgagcggcatcctgctcatggccttcccagtcacctccatcttccacaccttctccccctcctacctggagctcaaacaggagcaagagagggtgatgttccggagggcgcagttcctcatcaaaaccaagtcgcagctgagcgtgtcccaggacagtgacatcttgttcggaagtgcctcctcggacaccagagacaataactga

SEQ ID NO: 2269 - DNA, 600 bp, Homo sapiens; identical to SEQ ID NO: 2268

SEQ ID NO: 2270 - DNA, 600 bp, Homo sapiens
cctccggggtgccagaccacgcaaagctacaggcgccagggtccgagtgcctgggccccaaggggggcgggggcgattgtgccaagcgcaaaagctgggcccgcttcaaagatgcttgcgggaagagtgaggactggaacaaggtgtccaaggctgagtcgatggagacacttcccgagaggacaaaagcatcaggcgaggccacactgaagaagacagactcgtgtgacagtggcatcaccaagagcgacttgcgcctggacaacgtgggtgaggccaggagtccccaggatcggagtcccatcctggcagaggtcaagcattcgttctaccccatccctgagcagacgctgcaggccacagtcctggaggtgaggcacgagctgaaggaggacatcaaggccttaaacgccaaaatgaccaatattgagaaacagctctctgagatactcaggatattaacttccagaagatcctctcagtctcctcaggagttgtttgaaatatcgaggccacagtccccagaatcagagagagacatttttggagccagctgagaggtctatttaaaaaaaaagtcagagacagatacctacaacc

SEQ ID NO: 2271 - DNA, 600 bp, Homo sapiens
gtctctcttgctttgttctttatttgtttatatttaatttttacatgaccagaaaacaaatcttcaaggtgtaaaatatctacctgccctctctcagttattcagattgacaaggtagacatggatttgatgaaagtgcaaagtgccctcatttgtggcccaagcctggtctcctcccaaaatactacacatccaactcctggagatttcagttacttacctgcatgtgttgtacaataccagatcactcaaaaaggtgtgtcaaagattttacctgggatatgacaagcaaggtttctggtgcctatttattcattcagtgagacacagagtggagccctcagttttatggatcccaattcatttcatctactacagggtgaggtgcttgcccccatgtgggtgtggcagttacagggcccaggtgagctgaagacaaaccactgtacatatatatgccttatgtaattattttctttttgtaattagtaataaaacccagcatgtacaaaagtaccatagcacagcactgctaaatactgtacatagatgtatcattaatgtaggtttagatatataactttagaaataagaagcaaa

SEQ ID NO: 2272 - DNA, 600 bp, Homo sapiens; identical to SEQ ID NO: 2271

SEQ ID NO: 2273 - DNA, 1400 bp, Homo sapiens
cgctcttcttcgccagcaccgtgctctccaccacaggttatggccacaccgtgcccttgtcagatggaggtaaggccttctgcatcatctactccgtcattggcattcccttcaccctcctgttcctgacggctgtggtccagcgcatcaccgtgcacgtcacccgcaggccggtcctctacttccacatccgctggggcttctccaagcaggtggtggccatcgtccatgccgtgctccttgggtttgtcactgtgtcctgcttcttcttcatcccggccgctgtcttctcagtcctggaggatgactggaacttcctggaatccttttatttttgttttatttccctgagcaccattggcctgggggattatgtgcctggggaaggctacaatcaaaaattcagagagctctataagattgggatcacgtgttacctgctacttggccttattgccatgttggtagttctggaaaccttctgtgaactccatgagctgaaaaaattcagaaaaatgttctatgtgaagaaggacaaggacgaggatcaggtgcacatcatagagcatgaccaactgtccttctcctcgatcacagaccaggcagctggcatgaaagaggaccagaagcaaaatgagccttttgtggccacccagtcatctgcctgcgtggatggccctgcaaaccattgagcgtaggatttgttgcattatgctagagcaccagggtcagggtgcaaggaagaggcttaagtatgttcatttttatcagaatgcaaaagcgaaaattatgtcactttaagaaatagctactgtttgcaatgtcttattaaaaaacaacaaaaaaagacacatggaacaaagaagctgtgaccccagcaggatgtctaatatgtgaggaaatgagatgtccacctaaaattcatatgtgacaaaattatctcgaccttacataggaggagaatacttgaagcagtatgctgctgtggttagaagcagattttatacttttaactggaaactttggggtttgcatttagatcatttagctgatggctaaatagcaaaatttatatttagaagcaaaaaaaaaaagcatagagatgtgttttataaataggtttatgtgtactggtttgcatgtacccacccaaaatgattatttttggagaatctaagtcaaactcactatttataatgcataggtaaccattaactatgtacatataaagtataaatatgtttatattctgtacatatggtttaggtcaccagatcctagtgtagttctgaaactaagactatagatattttgtttcttttgatttctctttatactaaagaatccagagttgctacaataaaataaggggaataataaacttgagagtgaataaccat

SEQ ID NO: 2274 - DNA, 1400 bp, Homo sapiens; identical to SEQ ID NO: 2273

SEQ ID NO: 2275 - DNA, 600 bp, Homo sapiens
atatgctttgttttggaatttaccggctgagagatgctcacctcagcacccccagtcagtgcacaaagaggtatgtcatcaccaacccgccctatgagtttgagctcgtgccgacggacctgatcttctgcttaatgcagtttgaccacaatgccggccagtcccgggccagcctgtcccattcctcccactcgtcgcagtcctccagcaagaagagctcctctgttcactccatcccatccacagcaaaccgacagaaccggcccaagtccagggagtcccgggacaaacagaagtacgtgcaggaagagcggctttgatatgtgtatccaccgccactgtgtgaaactgtatctgccactcatttccccagttggtgtttccaacaaagtaactttccctgttttcccctgtagtccccccctttttttttacacatatttgcatatgtatgatagtgtgcatgtggttgtcatttttatttcaccaccataaaacccttgagcacaacagcaaataagcaggacgggcccaaagttatttatgattctggggggaaaataacccaaaggcatgctccagacataaatagctcactgc

SEQ ID NO: 2276 - DNA, 600 bp, Homo sapiens; identical to SEQ ID NO: 2275

SEQ ID NO: 2277 - DNA, 1400 bp, Homo sapiens
gggaagcgctgctgtccctggccatgctgctgcgtctctacctggtgccccgcgccgtgctcctgcgcagcggcgtcctgctcaacgcttcctaccgcagcatcggcgctctcaatcaagtccgcttccgccactggttcgtggccaagctttacatgaacacgcaccctggccgcctgctgctcggcctcacgcttggcctctggctgaccaccgcctgggtgctgtccgtggccgagaggcaggctgttaatgccactgggcacctttcagacacactttggctgatccccatcacattcctgaccatcggctatggtgacgtggtgccgggcaccatgtggggcaagatcgtctgcctgtgcactggagtcatgggtgtctgctgcacagccctgctggtggccgtggtggcccggaagctggagtttaacaaggcagagaagcacgtgcacaacttcatgatggatatccagtataccaaagagatgaaggagtccgctgcccgagtgctacaagaagcctggatgttctacaaacatactcgcaggaaggagtctcatgctgcccgcaggcatcagcgcaagctgctggccgccatcaacgcgttccgccaggtgcggctgaaacaccggaagctccgggaacaagtgaactccatggtggacatctccaagatgcacatgatcctgtatgacctgcagcagaatctgagcagctcacaccgggccctggagaaacagattgacacgctggcggggaagctggatgccctgactgagctgcttagcactgccctggggccgaggcagcttccagaacccagccagcagtccaagtagctggacccacgaggaggaaccaggctactttccccagtactgaggtggtggacatcgtctctgccactcctgacccagccctgaacaaagcacctcaagtgcaaggaccaaagggggccctggcttggagtgggttggcttgctgatggctgctggaggggacgctggctaaagtgggtaggccttggcccacctgaggccccaggtgggaacatggtcacccccactctgcataccctcatcaaaaacactctcactatgctgctatggacgacctccagctctcagttacaagtgcaggcgactggaggcaggactcctgggtccctgggaaagagggtactaggggcccggatccaggattctgggaggcttcagttaccgctggccgagctgaagaactgggtatgaggctggggcggggctggaggtggcgccccctggtgggacaacaaagaggacaccatttttccagagctgcagagagcacctggtggggaggaagaagtgtaactcaccagcctctgctcttatctttgtaataaatgttaaagccag

SEQ ID NO: 2278 - DNA, 1400 bp, Homo sapiens
cccttgctgggggcatatctctcatacccacctgctgaatcttctcttcacttgctgagaaagtcagaggaggggatccagtagccctttccacatactgtggctacagcacccagcactgtgctgttgttgtctgactgtggctatctctgtcccatcaccctgagcctcaagatggaagacattgtctgcttgaactctgggcttggtgcagagtaggtatttggtaaatgttgaatagatcaaccaattcctacagcccactgggtgccaagctcagagggggaaaaaaagatagccagagagagacctggacctcaaaaaggtgtgaacaagactgaaaaggaggtccgttcagctccgcctgccctgtccctgcttggttcttgaagtttttacaatatattccttgtaggttcttcactcactcactcaacaaatacccgttggaagagtcttaaactggggcttcatgtgtggcctgcagtcatgtttcggcttagtccaacagtgtttttattatattttaagaatctgaatgcctttgcgtgaggcatgcactctcaggttccccatagtgtctcccccgctgccacccacaaacagacacacatgccgttgtgttatgcccagccactctgatatactggcttctgacttatgggctgcttactagtctcaagagatacagtggtggaaaaatatatccctatactcatgaagcttaccgactagtagggaagatagactctaatgcaataatcacataaatatagcgagctctactaagtacaggtgtgtataatgtatcagggaccatggcccgagaaagtgagaaagctttcctgagcaagtgacaatctaacctgccatccaaatgataaattgctaattaagcaaatgaggttccaggggggagtactccaagcagagagaatggcatgtgtgaaggtgtgtgtcatacacagggcctagtacatagtgggccccctacatacgcatggattctgggtctccagattggaacagaggatggagctaagcagcaaagggcctcccttgaattcaccacacacataccagcccttctgcacactttgctccttacatctaggcccagctgaacccaggttaggggcagatcagaagggctgcgtgtagcacccttatggtcttgcagaacacaccaagaaacccgacggcttccatattttctgaccctacaaacaggtccctaatactgatgtggagaaagctcaagagggaatcatctggcctgagcctaccatgaggctgtttgtggttcctggcagaaaagcaacaactcgctccccttcccatgtatcagtgaaaaccattatgcaaataaagagctggcccccgaaaaaaaaaaaaaaaaa

SEQ ID NO: 2279 - DNA, 1400 bp, Homo sapiens
ctcctccttgagcgtggtgctggcctccatcgtggccatgtgcgttcacagcatgtcggagttccagaatgaggatggagaagtggatgatccggtgctggaaggagtggagatcgcgtgcattgcctggttcaccggggagcttgccgtccggctggctgccgctccttgtcaaaagaaattctggaaaaaccctctgaacatcattgactttgtctctattattcccttctatgccacgttggctgtagacaccaaggaggaagagagtgaggatattgagaacatgggcaaggtggtccagatcctacggcttatgaggattttccgaattctaaagcttgcccggcactcggtaggacttcggtctttaggtgccacactgagacacagctaccatgaagttgggcttctgcttctcttcctctctgtgggcatttccattttctctgtgcttatctactccgtggagaaagatgaccacacatccagcctcaccagcatccccatctgctggtggtgggccaccatcagcatgacaactgtgggctatggagacacccacccggtcaccttggcgggaaagctcatcgccagcacatgcatcatctgtggcatcttggtggtggcccttcccatcaccatcatcttcaacaagttttccaagtactaccagaagcaaaaggacattgatgtggaccagtgcagtgaggatgcaccagagaagtgtcatgagctaccttactttaacattagggatatatatgcacagcggatgcacgccttcattaccagtctctcttctgtaggcattgtggtgagcgatcctgactccacagatgcttcaagcattgaagacaatgaggacatttgtaacaccacctccttggagaattgcacagcaaaatgagcgggggtgtttgtgcctgtttctcttatcctttcccaacattaggttaacacagctttataaacctcagtgggttcgttaaaatcatttaattctcagggtgtacctttccagccatagttggacattcattgctgaattctgaaatgatagaattgtctttatttttctctgtgaggtcaattaaatgccttgttctgaaatttattttttacaagagagagttgtgatatagtttggaatataagataaatggtattgggtggggtttgtggctacagcttatgcatcattctgtgtttgtcatttactcacattgagctaactttaaattactgacaagtagaatcaaaggtgcagctgactgagacgacatgcatgtaagatccacaaaatgagacaatgcatgtaaatccatgctcatgttctaaacatggaaactaggagcctaataaacttcctaattcagtacgaaaaaaaaaaaaaaaaa

SEQ ID NO: 2280 - DNA, 600 bp, Homo sapiens
acttgtttgacgacgaaaacacagcccagtttgttcatgtcagtgagagcttcccacaccctggcttcaacatgagcctcctggagaaccacacccgccaagcagacgaggactacagccacgacctcatgctgctccgcctgacagagcctgctgataccatcacagatgctgtgaaggtcgtggagttgcccaccgaggaacccgaagtggggagcacctgtttggcttccggctggggcagcatcgaaccagagaatttctcatttccagatgatctccagtgtgtggacctcaaaatcctgcctaatgatgagtgcaaaaaagcccacgtccagaaggtgacagacttcatgctgtgtgtcggacacctggaaggtggcaaagacacctgtgtgggtgattcagggggcccgctgatgtgtgatggtgtgctccaaggtgtcacatcatggggctacgtcccttgtggcacccccaataagccttctgtcgccgtcagagtgctgtcttatgtgaagtggatcgaggacaccatagcggagaactcctgaacgcccagccctgtcccctacccccagtaaaatcaaatgtgcatcc

SEQ ID NO: 2281 - DNA, 600 bp, Homo sapiens; identical to SEQ ID NO: 2280

SEQ ID NO: 2282 - DNA, 600 bp, Homo sapiens
ggaaataacaatgaggcatgggctaaggatttgaagctggcagactttgcgctgctgtgcctcgatggcaaacggaagcctgtgactgaggctagaagctgccatcttgccatggccccgaatcatgccgtggtgtctcggatggataaggtggaacgcctgaaacaggtgctgctccaccaacaggctaaatttgggagaaatggatctgactgcccggacaagttttgcttattccagtctgaaaccaaaaaccttctgttcaatgacaacactgagtgtctggccagactccatggcaaaacaacatatgaaaaatatttgggaccacagtatgtcgcaggcattactaatctgaaaaagtgctcaacctcccccctcctggaagcctgtgaattcctcaggaagtaaaaccgaagaagatggcccagctccccaagaaagcctcagccattcactgcccccagctcttctccccaggtgtgttggggccttggctcccctgctgaaggtggggattgcccatccatctgcttacaattccctgctgtcgtcttagcaagaagtaaaatgagaaattttgttgatattcaaaaaaaa

SEQ ID NO: 2283 - DNA, 600 bp, Homo sapiens; identical to SEQ ID NO: 2282

SEQ ID NO: 2284 - DNA, 600 bp, Homo sapiens
agaagaagagagtcactctcggaatgactgccgagcagtcatcatctttatagccatcctgagcttcctggtcttcacgcccctcatgctggtgtccagcaccatcttggtcgtgaagatccggaagaacacgtgggcttcccattcctccaagctttacatagtcatcatggtcaccatcattatattcctcatcttcgctatgcccatgagactcctttacctgctgtactatgagtattggtcgacctttgggaacctacaccacatttccctgctcttctccacaatcaacagtagcgccaaccctttcatttacttctttgtgggaagcagtaagaagaagagattcaaggagtccttaaaagttgttctgaccagggctttcaaagatgaaatgcaacctcggcgccagaaagacaattgtaatacggtcacagttgagactgtcgtctaagaactgtgagggaagttgtggataaaaatggtggaacacaggtcatttttagtttgtgcttggaatatgacttaagtatctcctaaatgtgatacagaagaacatctcatcccatatgcatgagatactaattaatgatgaaa

SEQ ID NO: 2285 - DNA, 600 bp, Homo sapiens
tctgggtggccagtgtcgtcttcagcacgctcttcatcgcctactacgaccacgtggccgtcctgctgtgcctcgtggtcttcttcctggctatgctggtgctcatggccgtgctgtacgtccacatgctggcccgggcctgccagcacgcccagggcatcgcccggctccacaagaggcagcgcccggtccaccagggctttggccttaaaggcgctgtcaccctcaccatcctgctgggcattttcttcctctgctggggccccttcttcctgcatctcacactcatcgtcctctgccccgagcaccccacgtgcggctgcatcttcaagaacttcaacctctttctcgccctcatcatctgcaatgccatcatcgaccccctcatctacgccttccacagccaggagctccgcaggacgctcaaggaggtgctgacatgctcctggtgagcgcggtgcacgcgctttaagtgtgctgggcagagggaggtggtgatattgtgtggtctggttcctgtgtgaccctgggcagttccttacctccctggtccccgtttgtcaaagaggatggactaaatgatctctgaaagtgttgaag

SEQ ID NO: 2286 - DNA, 1400 bp, Homo sapiens
agtgcagtaagcaggacgtgctgtgtggcttcctcctctgtgtcaacatctctggagctcctcggctaggggacctggtgggagacatcagtagtgtcaccttctaccaccagggcaaggagctggactgcaggggaggccacgtgcagctggcggacggctctgacctgagctatgtggaggatggcacagcctgcgggcctaacatgttgtgcctggaccatcgctgcctgccagcttctgccttcaacttcagcacctgccccggcagtggggagcgccggatttgctcccaccacggggtctgcagcaatgaagggaagtgcatctgtcagccagactggacaggcaaagactgcagtatccataaccccctgcccacgtccccacccacgggggagacggagagatataaaggtcccagcggcaccaacatcatcattggctccatcgctggggctgtcctggttgcagccatcgtcctgggcggcacgggctggggatttaaaaacattcgccgaggaaggtccggaggggcctaagtgccaccctcctccctccaagcctggcacccaccgtctcggccctgaaccacgaggctgcccccatccagccacggagggaggcaccatgcaaatgtcttccaggtccaaacccttcaactcctggctccgcaggggtttgggtgggggctgtggccctgcccttggcaccaccagggtggaccaggcctggagggcacttcctccacagtcccccacccacctcctgcggctcagccttgcacacccactgccccgtgtgaatgtagcttccacctcatggattgccacagctcaactcgggggcacctggagggatgcccccaggcagccaccagtggacctagcctggatggcccctccttgcaaccaggcagctgagaccagggtcttatctctctgggacctagggggacggggctgacatctacattttttaaaactgaatcttaatcgatgaatgtaaactcgggggtgctggggccagggcagatgtggggatgttttgacatttacaggaggccccggagaaactgaggtatggccatgccctagaccctccccaaggatgaccacacccgaagtcctgtcactgagcacagtcaggggctgggcatcccagcttgcccccgcttagccccgctgagcttggaggaagtatgagtgctgattcaaaccaaagctgcctgtgccatgcccaaggcctaggttatgggtacggcaaccacatgtcccagatcgtctccaattcgaaaacaaccgtcctgctgtccctgtcaggacacatggattttggcagggcgggggggggttctagaaaatataggttcctataataaaatggcaccttcccccttt

SEQ ID NO: 2287 - DNA, 600 bp, Homo sapiens
  misc_feature (274)..(274): n is a, c, g, or t
ggacatgccagtagtgtaagcagcttagtaattgtgtctggaatgacagcagaagaaaaaaaggttaagaaagagaaagcttccacagaaactgaatgctagtctgttttgtttctttaatttttttttttaacagtcagaaacccactaatgggtgtcatcttggcccatcctaaacacatmtccaatttcctaaaaacattttcccttaaaaaattttggaaattcagacttgatttacaatttaatgcactaaaagtagtattttgttagnatatgttagtaggcttagttttttcagttgcagtagtatcaaatgaaagtgatgatactgtaacgaagataaattggctaatcagtatacaagattatacaatctctttattactgagggccaccaaatagcctaggaagtgccctcgagcactgaagtcaccattaggtcactcaagaagtaagcaactagctgggcacagtggctcatgcctgtaatcctagcactttgggaggccaaggcagaaagatagcttgagtccaggagtttgagaccagcctgggcaacatagtgataccccatctcttaaaaaaaaaaaaaaaaaa

SEQ ID NO: 2288 - DNA, 1400 bp, Homo sapiens
atcgggacaactctccttttgatggacctggaggaaatcttgctcatgcttttcaaccaggcccaggtattggaggggatgctcattttgatgaagatgaaaggtggaccaacaatttcagagagtacaacttacatcgtgttgcggctcatgaactcggccattctcttggactctcccattctactgatatcggggctttgatgtaccctagctacaccttcagtggtgatgttcagctagctcaggatgacattgatggcatccaagccatatatggacgttcccaaaatcctgtccagcccatcggcccacaaaccccaaaagcgtgtgacagtaagctaacctttgatgctataactacgattcggggagaagtgatgttctttaaagacagattctacatgcgcacaaatcccttctacccggaagttgagctcaatttcatttctgttttctggccacaactgccaaatgggcttgaagctgcttacgaatttgccgacagagatgaagtccggtttttcaaagggaataagtactgggctgttcagggacagaatgtgctacacggataccccaaggacatctacagctcctttggcttccctagaactgtgaagcatatcgatgctgctctttctgaggaaaacactggaaaaacctacttctttgttgctaacaaatactggaggtatgatgaatataaacgatctatggatccaggttatcccaaaatgatagcacatgactttcctggaattggccacaaagttgatgcagttttcatgaaagatggatttttctatttctttcatggaacaagacaatacaaatttgatcctaaaacgaagagaattttgactctccagaaagctaatagctggttcaactgcaggaaaaattgaacattactaatttgaatggaaaacacatggtgtgagtccaaagaaggtgttttcctgaagaactgtctattttctcagtcatttttaacctctagagtcactgatacacagaatataatcttatttatacctcagtttgcatatttttttactatttagaatgtagccctttttgtactgatataatttagttccacaaatggtgggtacaaaaagtcaagtttgtggcttatggattcatataggccagagttgcaaagatcttttccagagtatgcaactctgacgttgatcccagagagcagcttcagtgacaaacatatcctttcaagacagaaagagacaggagacatgagtctttgccggaggaaaagcagctcaagaacacatgtgcagtcactggtgtcaccctggataggcaagggataactcttctaacacaaaataagtgttttatgtttggaataaagtcaaccttgtttctactgtttt

SEQ ID NO: 2289 - DNA, 1400 bp, Homo sapiens
attatacaccagatttgccaaaagatgctgttgattctgctgttgagaaagctctgaaagtctgggaagaggtgactccactcacattctccaggctgtatgaaggagaggctgatataatgatctcttttgcagttagagaacatggagacttttacccttttgatggacctggaaatgttttggcccatgcctatgcccctgggccagggattaatggagatgcccactttgatgatgatgaacaatggacaaaggatacaacagggaccaatttatttctcgttgctgctcatgaaattggccactccctgggtctctttcactcagccaacactgaagctttgatgtacccactctatcactcactcacagacctgactcggttccgcctgtctcaagatgatataaatggcattcagtccctctatggacctccccctgactcccctgagacccccctggtacccacggaacctgtccctccagaacctgggacgccagccaactgtgatcctgctttgtcctttgatgctgtcagcactctgaggggagaaatcctgatctttaaagacaggcacttttggcgcaaatccctcaggaagcttgaacctgaattgcatttgatctcttcattttggccatctcttccttcaggcgtggatgccgcatatgaagttactagcaaggacctcgttttcatttttaaaggaaatcaattctgggccatcagaggaaatgaggtacgagctggatacccaagaggcatccacaccctaggtttccctccaaccgtgaggaaaatcgatgcagccatttctgataaggaaaagaacaaaacatatttctttgtagaggacaaatactggagatttgatgagaagagaaattccatggagccaggctttcccaagcaaatagctgaagactttccagggattgactcaaagattgatgctgtttttgaagaatttgggttcttttatttctttactggatcttcacagttggagtttgacccaaatgcaaagaaagtgacacacactttgaagagtaacagctggcttaattgttgaaagagatatgtagaaggcacaatatgggcactttaaatgaagctaataattcttcacctaagtctctgtgaattgaaatgttcgttttctcctgcctgtgctgtgactcgagtcacactcaagggaacttgagcgtgaatctgtatcttgccggtcatttttatgttattacagggcattcaaatgggctgctgcttagcttgcaccttgtcacatagagtgatctttcccaagagaaggggaagcactcgtgtgcaacagacaagtgactgtatctgtgtagactatttgcttatttaataaagacgatttgtcagttgtttt

SEQ ID NO: 2290 - DNA, 1127 bp, Homo sapiens
accaaatcaaccataggtccaagaacaattgtctctggacggcagctatgcgactcaccgtgctgtgtgctgtgtgcctgctgcctggcagcctggccctgccgctgcctcaggaggcgggaggcatgagtgagctacagtgggaacaggctcaggactatctcaagagattttatctctatgactcagaaacaaaaaatgccaacagtttagaagccaaactcaaggagatgcaaaaattctttggcctacctataactggaatgttaaactcccgcgtcatagaaataatgcagaagcccagatgtggagtgccagatgttgcagaatactcactatttccaaatagcccaaaatggacttccaaagtggtcacctacaggatcgtatcatatactcgagacttaccgcatattacagtggatcgattagtgtcaaaggctttaaacatgtggggcaaagagatccccctgcatttcaggaaagttgtatggggaactgctgacatcatgattggctttgcgcgaggagctcatggggactcctacccatttgatgggccaggaaacacgctggctcatgcctttgcgcctgggacaggtctcggaggagatgctcacttcgatgaggatgaacgctggacggatggtagcagtctagggattaacttcctgtatgctgcaactcatgaacttggccattctttgggtatgggacattcctctgatcctaatgcagtgatgtatccaacctatggaaatggagatccccaaaattttaaactttcccaggatgatattaaaggcattcagaaactatatggaaagagaagtaattcaagaaagaaatagaaacttcaggcagaacatccattcattcattcattggattgtatatcattgttgcacaatcagaattgataagcactgttcctccactccatttagcaattatgtcacccttttttattgcagttggtttttgaatgtctttcactccttttattggttaaactcctttatggtgtgactgtgtcttattccatctatgagctttgtcagtgcgcgtagatgtcaataaatgttacatacacaaataaataaaatgtttattccatggtaaattta

SEQ ID NO: 2291 - DNA, 600 bp, Homo sapiens
aatatgtttggaatattccactatttgcagaggcttattcagttcttacacattccatcttacattagtgattccatcaaagagaaggaaagtaagcctttttgtcacctcaatatttactatttcaatacttacatatctgacttctaggatttattgttatattacttgcctatctgacttcatacatccctcagtttcttaaaatgtcctatgtatatcttctacatgcaatttagaactagattttggttagaagtaaggattataaacaacctagacagtacccttggcctttacagaaaatatggtgctgttttctacccttggaaagaaatgtagatgatatgtttcgtgggttgaattgtgtcccccataaaagatatgttgaagttctaaccccaggtacccatgaatgtgagcttaccagggtctttgcagatgtaattagttaagttaaggtgagatcacactgaattagggtgggctctaaatccattatgactgttgttcttataagaagaagagagcatagccacctaggggaggaggccgtgtgaagacagaggcagagattggagtgacgcatctccaagccaa

SEQ ID NO: 2292 - DNA, 600 bp, Homo sapiens; identical to SEQ ID NO: 2291

SEQ ID NO: 2293 - DNA, 1400 bp, Homo sapiens
tggaggaaaacccaccttacatacaggattgtgaattatacaccagatttgccaagagatgctgttgattctgccattgagaaagctctgaaagtctgggaagaggtgactccactcacattctccaggctgtatgaaggagaggctgatataatgatctctttcgcagttaaagaacatggagacttttactcttttgatggcccaggacacagtttggctcatgcctacccacctggacctgggctttatggagatattcactttgatgatgatgaaaaatggacagaagatgcatcaggcaccaatttattcctcgttgctgctcatgaacttggccactccctggggctctttcactcagccaacactgaagctttgatgtacccactctacaactcattcacagagctcgcccagttccgcctttcgcaagatgatgtgaatggcattcagtctctctacggacctccccctgcctctactgaggaacccctggtgcccacaaaatctgttccttcgggatctgagatgccagccaagtgtgatcctgctttgtccttcgatgccatcagcactctgaggggagaatatctgttctttaaagacagatatttttggcgaagatcccactggaaccctgaacctgaatttcatttgatttctgcattttggccctctcttccatcatatttggatgctgcatatgaagttaacagcagggacaccgtttttatttttaaaggaaatgagttctgggccatcagaggaaatgaggtacaagcaggttatccaagaggcatccataccctgggttttcctccaaccataaggaaaattgatgcagctgtttctgacaaggaaaagaagaaaacatacttctttgcagcggacaaatactggagatttgatgaaaatagccagtccatggagcaaggcttccctagactaatagctgatgactttccaggagttgagcctaaggttgatgctgtattacaggcatttggatttttctacttcttcagtggatcatcacagtttgagtttgaccccaatgccaggatggtgacacacatattaaagagtaacagctggttacattgctaggcgagatagggggaagacagatatgggtgtttttaataaatctaataattattcatctaatgtattatgagccaaaatggttaatttttcctgcatgttctgtgactgaagaagatgagccttgcagatatctgcatgtgtcatgaagaatgtttctggaattcttcacttgcttttgaattgcactgaacagaattaagaaatactcatgtgcaataggtgagagaatgtattttcatagatgtgttattacttcctcaataaaaagttttattttgggcctgttcctt

SEQ ID NO: 2294 - DNA, 1400 bp, Homo sapiens
cctgacatgaaccgtgaggatgttgactacgcaatccggaaagctttccaagtatggagtaatgttacccccttgaaattcagcaagattaacacaggcatggctgacattttggtggtttttgcccgtggagctcatggagacttccatgcttttgatggcaaaggtggaatcctagcccatgcttttggacctggatctggcattggaggggatgcacatttcgatgaggacgaattctggactacacattcaggaggcacaaacttgttcctcactgctgttcacgagattggccattccttaggtcttggccattctagtgatccaaaggctgtaatgttccccacctacaaatatgtcgacatcaacacatttcgcctctctgctgatgacatacgtggcattcagtccctgtatggagacccaaaagagaaccaacgcttgccaaatcctgacaattcagaaccagctctctgtgaccccaatttgagttttgatgctgtcactaccgtgggaaataagatctttttcttcaaagacaggttcttctggctgaaggtttctgagagaccaaagaccagtgttaatttaatttcttccttatggccaaccttgccatctggcattgaagctgcttatgaaattgaagccagaaatcaagtttttctttttaaagatgacaaatactggttaattagcaatttaagaccagagccaaattatcccaagagcatacattcttttggttttcctaactttgtgaaaaaaattgatgcagctgtttttaacccacgtttttataggacctacttctttgtagataaccagtattggaggtatgatgaaaggagacagatgatggaccctggttatcccaaactgattaccaagaacttccaaggaatcgggcctaaaattgatgcagtcttctattctaaaaacaaatactactatttcttccaaggatctaaccaatttgaatatgacttcctactccaacgtatcaccaaaacactgaaaagcaatagctggtttggttgttagaaatggtgtaattaatggtttttgttagttcacttcagcttaataagtatttattgcatatttgctatgtcctcagtgtaccactacttagagatatgtatcataaaaataaaatctgtaaaccataggtaatgattatataaaatacataatatttttcaattttgaaaactctaattgtccattcttgcttgactctactattaagtttgaaaatagttaccttcaaagcaagataattctatttgaagcatgctctgtaagttgcttcctaacatccttggactgagaaattatacttacttctggcataactaaaattaagtatatatattttggctcaaataaaattg

SEQ ID NO: 2295 - DNA, 1400 bp, Homo sapiens
atgctgtctatgagaaaaatggttatatctattttttcaacggacccatacagtttgaatacagcatctggagtaaccgtattgttcgcgtcatgccagcaaattccattttgtggtgttaagtgtctttttaaaaattgttatttaaatcctgaagagcatttggggtaatacttccagaagtgcggggtaggggaagaagagctatcaggagaaagcttggttctgtgaacaagcttcagtaagttatctttgaatatgtagtatctatatgactatgcgtggctggaaccacattgaagaatgttagagtaatgaaatggaggatctctaaagagcatctgattcttgttgctgtacaaaagcaatggttgatgatacttcccacaccacaaatgggacacatggtctgtcaatgagagcataatttaaaaatatatttataaggaaattttacaagggcataaagtaaatacatgcatataatgaataaatcattcttactaaaaagtataaaatagtatgaaaatggaaatttgggagagccatacataaaagaaataaaccaaaggaaaatgtctgtaataatagactgtaacttccaaataaataattttcattttgcactgaggatattcagatgtatgtgcccttcttcacacagacactaacgaaatatcaaagtcattaaagacaggagacaaaagagcagtggtaagaatagtagatgtggcctttgaattctgtttaattttcacttttggcaatgactcaaagtctgctctcatataagacaaatattcctttgcatattataaaggataaagaaggatgatgtctttttattaaaatatttcaggttcttcagaagtcacacattacaaagttaaaattgttatcaaaatagtctaaggccatggcatccctttttcataaattatttgattatttaagactaaaagttgcattttaaccctattttacctagctaattatttaattgtccggtttgtcttggatatataggctattttctaaagacttgtatagcatgaaataaaatatatcttataaagtggaagtatgtatattaaaaaagagacatccaaatttttttttaaagcagtctactagattgtgatcccttgagatatggaaggatgcctttttttctctgcatttaaaaaaatcccccagcacttcccacagtgcctattgatacttggggagggtgcttggcacttattgaatatatgatcggccatcaagggaagaactattgtgctcagagacactgttgataaaaactcaggcaaagaaaatgaaatgcatatttgcaaagtgtattaggaagtgtttatgttgtttataataaaaatatattttcaacagaaaaaaaa

SEQ ID NO: 2296 - DNA, 1400 bp, Homo sapiens
gcccccaggtaggggcccctctcagccctcacacaccctgtctgccccgccctcattatttatgtccaggtgtttgttttgttttgtttttggcaccttacttgaccatttgtttctgtttccccgactggggcagggtgtttagaattttctaaatgtagttctgctccagacagggaattaggcccccatcatcctctggcttggccacagccaggggagcagaggggcagaggcccacattggaagagcagcacctcctcagcctgaaccccagggctgtaactgccaggctctctttgcccagttggagactgtctggcccccctggtcccctccttcccaagtgagtctctctgggccttaggaagagccttccacccaggggcagccccaggccaaaggggacctggaagggaggtgggccgtggcccttgagtccccattgaggcttggttccttcccaatccagtggacttcgcagtccacttctgacagcctcagtgaccctggctccttgtgccagagaacccagcccacccccggcagcagcccccagctcccacctccccttgggcccacaccttcttccctctctggagaaagggccctgggcctgcctcaccacggaccaaagggagtctgccagggcccctctccccagggaagcagcagcctcgcccctggcagagatgcctccctgagctagaaccctctgttccttccctgtgcctcctccctccctcccgactcacaccactagcctcaggggtctgagctccagctcctttgggcttcagctgccagtgtcctgagccccagggagagggggctggtgggtgcctaggcctgggcagtggatggccgtgaatgggtgcccacagtgtcaggcactgggcatgaggggttcctcccctccagctccctgtgcccccagggtcctgggaggagagacactggtggggataggccagccgcgcatcagactgtgaaccccacgaaggagcccattgtggcctaagaggctgccctcctgtgctcagccctgaggacagatgcctccttcctcttttccttcccaaagcaagcaagaggccgtggctgctgtgggaaatggtactgtacagctggctctacttccccatggccctgagcgagtggagtctgccacccaggatccccaaggcacttgagggggaaggattctgctggcctctgcgagtggtttcttgtgcactggcaccaagtgcgggtccggcagcttctgccccctgcagaaccggagagccagctaaggggtggggctgcgggggttccgtgtccacccccatacatttatttctgtaaataatgtgcactgaataaattgtacagccggcaaaaaaaaaaaaaaaaaaaaa

SEQ ID NO: 2297 - DNA, 1400 bp, Homo sapiens
atgccctcttatctagaatttttgtttcattttgtttaattttctggggtgtttttgttgttgttggtttgttttttgtttttttttttaatcaagaccattgtttcatgttaatgcagctgctgagaagatttttttttaatgactgagaaaacttgtttacagctccagcatataaggaaagtgttcaaggccagatatgcctcagatatttaaccagtaagccttagttgtacataaatacttttgtgtcaacaaaaactttcagctctcacagaagacagttactcaacattttttgatgtgccacagtttcgagtttttcgatatttaaattttttggcttttcatctaagtttgggtttgtattttttccttctaaactcttcatgtggcagagtcttctatgttttcacggctttttcattacagaaaagaacacttgctcttctgtgattattgtcatgtattaggctaatgctgtgttgtctcccacctggaactgaattgcttggtggaacatatgctttcactgtttgtgcaatatgcatttatttcttatatgaatgctttaaagtcatttgaggttagatcttttaattcctattttctgcttcattggtcactttttttttattgtagtataagatgttagattctgtaatcttcacattcattttagcaggtactgagtgatgctgtatatacaaataagtgtattgttttgatttttagaccaccacatggcatgcttgactatttcttatttcaaatgtctgctaatgcagagtaggctactccatgatagtgttaaaaaacaaaatttgctaacaatgtgatataaagactttaaaagttacacattatgtggagccctatctttacaaaagtttcctactgtaaagtgcttttattttcagttttcatttgatagtactcaaccataattaaagttgcataagataattgctttacatttcacatacctatatttatctgagtgctgtctaaaactgttgtgctagccaaagtaatgctatgaaatcatttgcagaattaacccgtgagttaatgttaaatgcactgttattgccatgtgaagaggcatcgactttgataccaccatcatgttcagaccattttatacatttcagtggcctttttttttttaaggaaaaaaaagcgcaaaaccaagtacatagtgacgatggcttttatttggacaaatagcttttatattttcattaaaccatgcaaaaaatactacatctttctggcacataactgtctccttaaccactggaacagttcagccatttgaataaattgtacattgtaaagcttatagtagctgattgtattattgattgtattgtatactatattaaatgtgaatttgt

SEQ ID NO: 2298 - DNA, 600 bp, Homo sapiens
atgaattacatccaaagattcattcagtgctcattttcttggtctatttcctcataccacttgctattattagcatttattattatcatattgcaaagaccttaattaaaagcgcacacaatcttcctggagaatacaatgaacataccaaaaaacagatggaaacacggaaacgcctggctaaaattgtgcttgtctttgtgggctgtttcatcttctgttggtttccaaaccacatcctttacatgtatcggtctttcaactataatgagattgatccatctctaggccacatgattgtcaccttagttgcccgggttctcagttttggcaattcttgtgtcaacccatttgctctttacctactcagtgaaagcttcaggaggcatttcaacagccaactctgctgtgggaggaagtcctatcaagagagaggaaccagctacctactcagctcttcagcggtgcgtatgacatctctgaaaagcaatgctaagaacatggtgaccaattctgttttactaaatgggcacagcatgaagcaggaaatggcaatgtgattttggccattcaactcactacctggagagaacttagtaa

SEQ ID NO: 2299 - DNA, 1400 bp, Homo sapiens
tatatacgtttccatctaatttcaccgttgatacagaaatctgcagcaaatgtggtcctctttgatatctttgtcaatatccttacgcataaccttgcggaaccagcttatgaagcagatgtggcacagctggagtataaactggcagctggagaacatggtttaattattcgagtgaaaggatttaaccacaaactacctctactgtttcagctcattattgactacttagctgagttcaattccacaccagctgtctttacaatgataactgagcagttgaagaagacctactttaacatcctcatcaagcctgagactttggccaaagatgtacggcttttaatcttggaatatgcccgttggtctatgattgacaagtaccaggctttgatggacggcctttcccttgagtctctgctgagcttcgtcaaagaattcaaatcccagctctttgtggagggcctggtacaagggaatgtcacaagcacagaatctatggatttcctgaaatatgttgttgacaaactaaacttcaagcctctggagcaggagatgcctgtgcagttccaggtggtagagctgcccagtggccaccatctatgcaaagtgaaagctctgaacaagggtgatgccaactctgaagtcactgtgtactaccagtcaggtaccaggagtctaagagaatatacgcttatggagctgcttgtgatgcacatggaagaaccttgttttgacttccttcgaaccaagcagacccttgggtaccatgtctaccctacctgtaggaacacatccgggattctaggattttctgtcactgtggggactcaggcaaccaaatacaattctgaagttgttgataagaagatagaagagtttctttctagctttgaggagaagattgagaacctcactgaagaggcattcaacacccaggtcacagctctcatcaagctgaaggagtgtgaggatacccaccttggggaggaggtggataggaactggaatgaagtggttacacagcagtacctctttgaccgccttgcccacgagattgaagcactgaagtcattctcaaaatcagacctggtcaactggttcaaggctcatagagggccaggaagtaaaatgctcagcgttcatgttgttgggtatgggaagtatgaactggaagaggatggatccccttctagtgaggattcaaattcttcttgtgaagtgatgcagctgacctacctgccaacctctcctctgctggcagattgtatcatccccattactgatatcagggctttcacaacaacactcaaccttctcccctaccataaaatagtcaaataaataaactgcagtcacgttggcctgaaaaaaaaaaaaaaaaaaaaaaaaaaaaaaaa

SEQ ID NO: 2300 - DNA, 1400 bp, Homo sapiens; identical to SEQ ID NO: 2299

SEQ ID NO: 2301 - DNA, 1400 bp, Homo sapiens
cacagactcatttgtcaccttctggcggcggcagccctggccccggcctccaagcagttgaaaaagctggcgcctccttggtctctaggatccaggctccacagagcacatgactagccaggcccctggcttaagaaggtcgcctaagcctaagagaagacagtcccaggagaagctggccgggaccagccaggagctgggagccacaggaagcaaaagtcagccttttcttcaagggatttccctgtctcagagcagcctttgccccagggaaatgggctctgggctggctgcctgcaccggccatgtcgacccaggacccggacacctggtcttgggctgtgttcagccactttgccttctctggactcagtttccccgtctgagaaatgagagtcgaatgctacagtatctgcagtcgcttggatctggctgttgagttgacgggttccttgaaccccacaaaatccctctccaaccacaggacccttcggctcaccaagaacggggcccaggggagtcaggcctattcgctgcacttcctgccaaactttgcccccacaagcctggtcatcagccaggcagccctcccagtgcccaagggccaccaaccccagggaaacagggccagcacagaggggccttcctcccccacagagctcccatgacatagtctgctctgggcggaagagctttgctgccagccagggatgtccagaggtcggtgcagcccctatccctgctcaggagtgggctcagagtctagcaaatgctaaggcccctcaggctgggctctgaacgaggacctggactcagagccagacagggcagcctcagacccttctctggggctcctggaccttgggccataatttctgagcctcggtttccccatctaaggaacagatgtggtcgttccgccctctcagctggatgagactgtcctggaggatccaccccggaacagacagaacggtgtctctcaggatggtgctctgagagagggcagagtggatgccccactgccctagaccctcggtagacgtggggtctctggggcggggtctgtggctgtgactgaagtcggctttcccgttgatgtcttgatgctcctatctgtgcacttaccgtaggtagggacacgtgtccatgcaccacagacacacccacgacacctgatctcgtatcactagcttgcggccaggtcatgatgtggccccggaagctggccctgcgtgccatgagtgcgtcggtcatggagtccggagcccctgagccggcccctggtgacggcacagccctcacagctcaaacgcccacccccactcccaccatctgcaggtggtgaaaacaaaccccgtgtatctctcaataaaggtggccgaagggcctcgatgtgg

SEQ ID NO: 2302 - DNA, 600 bp, Homo sapiens
atccaggtcaactgggactgcaacctggacagagccgcctccctctgcttgcccaggtactccttccgccgcctcgatacacgggacgttgagcacaacgtatctcctggctacaatttcaggtttgccaagtactacagagacctggctggcaacgagcagcgcacgctcatcaaggcctatggcatccgcttcgacatcattgtgtttgggaaggcagggaaatttgacatcatccccactatgatcaacatcggctctggcctggcactgctaggcatggcgaccgtgctgtgtgacatcatagtcctctactgcatgaagaaaagactctactatcgggagaagaaatataaatatgtggaagattacgagcagggtcttgctagtgagctggaccagtgaggcctaccccacacctgggctctccacagccccatcaaagaacagagaggaggaggagggagaaatggccaccacatcaccccagagaaatttctggaatctgattgagtctccactccacaagcactcagggttccccagcagctcctgtgtgttgtgtgcaggatctgtttgcccactcggcccaggaggtca

SEQ ID NO: 2303 - DNA, 600 bp, Homo sapiens; identical to SEQ ID NO: 2302

SEQ ID NO: 2304 - DNA, 600 bp, Homo sapiens
aggatggtgaaccagcagctactagggagaagtctgcaagatgtcaagggccaagaagtcccaagacctgcgatggacttcacagatttgtccaggctgcccctggccctccatgacacacccccgattcctggacaaccagaggagatacagctgcttagaaaggaggcgactcctagatccagggatagccccgtctggtgccagtgtggaagctgcctcccatctcaactccctgagagccacaggtgcctggaggagctgtgctgccggaaaaagccgggggcctgcatcaccacctcagagctgttcaggaagctggtcctgtccagacacgtcctgcagttcctcctgctctaccaggagcccttgctggcgctggatgtggattccaccaacagccggctgcggcactgtgcctacaggtgctacgccacctggcgcttcggctcccaggacatggctgactttgccatcctgcccagctgctgccgctggaggatccggaaagagtttccgaagagtgaagggcagtacagtggcttcaagagtccttactgaagccaggcaccgtggctcacgtctgtaatcccacctttt

SEQ ID NO: 2305 - DNA, 600 bp, Homo sapiens; identical to SEQ ID NO: 2304

SEQ ID NO: 2306 - DNA, 600 bp, Homo sapiens
tttagggcattgaatagacaagtaaagctaatgaatttaaaagcctgaaaagtgattgttttccagttatttctggaaaaggtctcattatatattgggtgctaaatgtttgatggggaaagcctgcatatattatcgtactggtaaaatgcattcaaaataattaaagtgcatgtattttccttgtaaacaccatgagctctcttagacatcttgtgataaagagcatttacttgccccactgctgtgcaatgccttaggactttgtttgtgttccaggacaagtgttcactcacatctgtaaaaacaattttaagaattgcaaataaattacagaccaaagattgagtaaagtcaaataactgttagtaagttgaaggatattggacaggaggacagtatttcagaaaaggagaggttgacagtcatccacaaggcatagcctccaagtatactctcaaatgtatgaagcaactggggtgggcagaagacattttagaatgagggcctttagtttaaattaaagtcatggtggagaagactcttgcttccaccaagtgtttgaaaacacaaaatacgatataaaaaaaaaaaaaaaaa

SEQ ID NO: 2307 - DNA, 600 bp, Homo sapiens; identical to SEQ ID NO: 2306

SEQ ID NO: 2308 - DNA, 600 bp, Homo sapiens
aggaccaggacttgtgcagacgccacagtctccccagatatggaccatcagtgactcatgctggatgaccccatgctccgtcatttgacaggggctcaggatattcactctgtggtccagagtcaactgttcccataacccctagtcatcgtttgtgtgtataagttgggggaattaagtttcaagaaaggcaagagctcaaggtcaatgacacccctggcctgactcccatgcaagtagctggctgtactgccaaggtacctaggttggagtccagcctaatcaagtcaaatggagaaacaggcccagagaggaaggtggcttaccaagatcacataccagagtctggagctgagctacctggggtgggggccaagtcacaggttggccagaaaaccctggtaagtaatgagggctgagtttgcacagtggtctggaatggactgggtgccacggtggacttagctctgaggagtacccccagcccaagagatgaacatctggggactaatatcatagacccatctggaggctcccatgggctaggagcagtgtgaggctgtaacttatactaaaggttgtgttgcctgctaaaaaaaa

SEQ ID NO: 2309 - DNA, 600 bp, Homo sapiens
ctcgtgcccaacctgttctttgtcacaaccagcaacaaagggaccaccgtcctgtgccatgacaccactcggcctgaagagtttgaccactatgtgcacttcagctcggcggtcatggggctgctctttggcgtgccctgcctggtcactcttgtttgctatggactcatggctcgtcgcctgtatcagcccttgccaggctctgcacagtcgtcttctcgcctccgctctctccgcaccatagctgtggtgctgactgtctttgctgtctgcttcgtgcctttccacatcacccgcaccatttactacctggccaggctgttggaagctgactgccgagtactgaacattgtcaacgtggtctataaagtgactcggcccctggccagtgccaacagctgcctggatcctgtgctctacttgctcactggggacaaatatcgacgtcagctccgtcagctctgtggtggtggcaagccccagccccgcacggctgcctcttccctggcactagtgtccctgcctgaggatagcagctgcaggtgggcggccaccccccaggacagtagctgctctactcctagggcagatagattgtaa

SEQ ID NO: 2310 - DNA, 600 bp, Homo sapiens; identical to SEQ ID NO: 2309

SEQ ID NO: 2311 - DNA, 600 bp, Homo sapiens
ggggcgggcaactgcagcgtggccaggcccgaggcctgcatcaagtgtctggggacagcagaccacgggctggcggcctacagagcgtatagcctggtgctggcggggttgggctgcggcctgccgctgctgctcacgctggcagcctacggcgccctcgggcgggccgtgctacgcagcccaggcatgactgtggccgagaagctgcgtgtggcagcgttggtggccagtggtgtggccctctacgccagctcctatgtgccctaccacatcatgcgggtgctcaacgtggatgctcggcggcgctggagcacccgctgcccgagctttgcagacatagcccaggccacagcagccctggagctggggccctacgtgggctaccaggtgatgcggggcctcatgcccctggccttctgtgtccaccctctactctacatggccgcagtgcccagcctgggctgctgctgccgacactgccccggctacagggacagctggaacccagaggacgccaagagcactggccaagccctgcccctcaatgccacagccgcccctaaaccgtcagagccccagtcccgtgagctgagccaatga

SEQ ID NO: 2312 - DNA, 600 bp, Homo sapiens
gctcctccctggctgccctggccctgaggtgtgggggctgcagcatgttgctgaggagtgaggaatagttgagccccaagtcctgaagaggcgggccagccaggcgggctcaaggaaagggggtcccagtgggaggggcaggctgacatctgtgtttcaagtggggctcgccatgccgggggttcataggtcactggctctccaagtgccagaggtgggcaggtggtggcactgagcccccccaacactgtgccctggtggagaaagcactgacctgtcatgcccccctcaaacctcctcttctgacgtgccttttgcacccctcccattaggacaatcagtcccctcccatctgggagtccccttttcttttctaccctagccattcctggtacccagccatctgcccaggggtgccccctcctctcccatccccctgccctcgtggccagcccggctggttttgtaagatactgggttggtgcacagtgatttttttcttgtaatttaaacaggcccagcattgctggttctatttaatggacatgagataatgttagaggttttaaagtgattaaacgtgcagactatgcaaaccag

SEQ ID NO: 2313 - DNA, 1400 bp, Homo sapiens
ggtgaagtccaaccggctgtgcgaacggaagctcttcattcagttctgctgccgcacgtgcctcctggccgggtaagggtgcctagctgcccacagagggcaggcactcccatccatccatccgtccaccttcctccagactgtcggccagagtctgtttcaggagcggcgccctgcacctgacagctttatctccccaggagcagcatctctgagcacccaagccaggtgggtggtggctcttaaggaggtgttcctaaaatggtgatatcctctcaaatgctgcttgttggctccagtcttccgacaaactaacaggaacaaaatgaattctgggaatccacagctctggctttggagcagcttctgggaccataagtttactgaatcttcaagaccaaagcagaaaagaaaggcgcttggcatcacacatcactcttctccccgtgcttttctgcggctgtgtagtaaatctccccggcccagctggcgaaccctgggccatcctcacatgtgacaaagggccagcagtctacctgctcgttgcctgccactgagcagtctggggacggtttggtcagactataaataagataggtttgagggcataaaatgtatgaccactggggccggagtatctatttctacatagtcagctacttctgaaactgcagcagtggcttagaaagtccaattccaaagccagaccagaagattctatcccccgcagcgctctcctttgagcaagccgagctctccttgttaccgtgttctgtctgtgtcttcaggagtctcatggcctgaacgaccacctcgacctgatgcagagccttctgaggagaggcaacaggaggcattctgtggccagccaaaaggtaccccgatggccaagcaattcctctgaacaaaatgtaaagccagccatgcattgttaatcatccatcacttcccattttatggaattgcttttaaaatacatttggcctctgcccttcagaagactcgtttttaaggtggaaactcctgtgtctgtgtatattacaagcctacatgacacagttggatttattctgccaaacctgtgtaggcattttataagctacatgttctaatttttaccgatgttaattattttgacaaatatttcatatattttcattgaaatgcacagatctgcttgatcaattcccttgaatagggaagtaacatttgccttaaattttttcgacctcgtctttctccatattgtcctgctcccctgtttgacgacagtgcatttgccttgtcacctgtgagctggagagaacccagatgttgtttattgaatctacaactctgaaagagaaatcaatgaagcaagtacaatgttaaccctaaattaataaaagagttaacatccc

SEQ ID NO: 2314 - DNA, 600 bp, Homo sapiens
gaaccccacacgggtagagagagttgtctgcactgctggtctcaagtggtatcctcaccctgctctgattcactgtgtcaaaggctgtgagcccttcatgggagacaattattgtgatgccatcaacaaccgagccttttgcaactatgacggtggggattgctgcacctccacagtgaagaccaaaaaggtcaccccattccctatgtcctgtgacctacaaggtgactgtgcttgtcgggacccccaggcccaagaacacagccggaaagacctccggggatacagccatggctaaggaaggacaagaagttgtcaaagaattcccaacgccaggacccacatccctttggtattgatttcacagtcagctgctcaacggaatggcctctccacaccagggatccttagcacccaaccggtctgcctttaattttacccaggaaggactcacattggggcgaatgaaccaagtttcgccatgctggatgatgaaatggattcccatcccaaagtctgagatggattgcatatacagtgtgcagtcccagagcctcctaaaattctagccatttgtcacacaaccacagcaaaaaaaaa

SEQ ID NO: 2315 - DNA, 600 bp, Homo sapiens
gtcaacgcaaccagaagaggagacctgaacatcaacatgacttcccctatgggcaccaagtccattttgctgagccggcgtccaagggatgacgactccaaggtgggctttgacaagtggcctttcatgaccactcacacgtggggggaagacgcccgaggcacctggaccctggagctgggatttgtcggcagcgccccgcagaagggggtgctgaaggagtggaccctgatgctgcatggcactcagagtgccccgtacatcgaccaggtggtgcgggattaccagtccaagttggccatgtccaagaaagaggagctggaggaagagctggacgaagccgtggagagaagcctgaaaagcatccttaacaagaactagcgctgcacatccgcctttcccaccgccctccctccccagctccgcctctgtcctcgctccacgtttcaggcaggcacctagcaattccatcacccgtacaggcaattccgtcttcttaatctgaagcttcactcactgtcaatgattattttcattacaatggaaacaatcttttttactctatgccccaaatatagcgttcccaacaacccggaattc

SEQ ID NO: 2316 - DNA, 600 bp, Homo sapiens
ctgatgtgcttcttggttcctcggagtacttaacacagattgacatgtggggtgttggttgcattttctttgaaatggcttctggaagacctttatttccaggatcaaccgtggaagatgaactgcacttaattttccgactgctaggaactccatctcaggaaacttggccaggtatttcttcaaatgaggagttcaagaactacaactttccaaaatataaaccagagcctctaattaaccacgcacccaggttagactctgaaggaattgagttgataagaaaatttcttcagtatgaatctaagaaaagggtttcagctgaagaggccatgaaacatgtgtactttcgaagtctgggaccaagaatacatgctttaccagaaagtgtatcaatattcagtttgaaagagattcagttgcaaaaggacccgggttttcgaaattcttcttatccagagacaggacatgggaagaacagaagacagagcatgctcttttaagtctgataacatggtttcaagcccagcccccagcctttcttaccaatcaaggactcagaactgaaggcaattatttcttttggtggacttggaatct

SEQ ID NO: 2317 - DNA, 600 bp, Homo sapiens; identical to SEQ ID NO: 2316

SEQ ID NO: 2318 - DNA, 1366 bp, Homo sapiens
cgcagaactcagagctgctcttcctctgtggccagttggggaccagcatcatgaagtggatggtggtggtcttggtctgcctccagctcttggaggcagcagtggtcaaagtgcccctgaagaaatttaagtctatccgtgagaccatgaaggagaagggcttgctgggggagttcctgaggacccacaagtatgatcctgcttggaagtaccgctttggtgacctcagcgtgacctacgagcccatggcctacatggatgctgcctactttggtgagatcagcatcgggactccaccccagaacttcctggtcctttttgacaccggctcctccaacttgtgggtgccctctgtctactgccagagccaggcctgcaccagtcactcccgcttcaaccccagcgagtcgtccacctactccaccaatgggcagaccttctccctgcagtatggcagtggcagcctcaccggcttctttggctatgacaccctgactgtccagagcatccaggtccccaaccaggagttcggcttgagtgagaatgagcctggtaccaacttcgtctatgcgcagtttgatggcatcatgggcctggcctaccctgctctgtccgtggatgaggccaccacagctatgcagggcatggtgcaggagggcgccctcaccagccccgtcttcagcgtctacctcagcaaccagcagggctccagcgggggagcggttgtctttgggggtgtggatagcagcctgtacacggggcagatctactgggcgcctgtcacccaggaactctactggcagattggcattgaagagttcctcatcggcggccaggcctccggctggtgttctgagggttgccaggccatcgtggacacaggcacctctctgctaactgtgccccagcagtacatgagtgctcttctgcaggccacaggggcccaggaggatgagtatggacagtttctcgtgaactgtaacagcattcagaatctgcccagcttgaccttcatcatcaatggtgtggagttccctctgccaccttcctcctatatcctcagtaacaacggctactgcaccgtgggagtcgagcccacctacctgtcctcccagaacggccagcccctgtggatcctcggggatgtcttcctcaggtcctactattccgtctacgacttgggcaacaacagagtaggctttgccactgccgcctagacttgctgcctcgacacgtgggctcccctcttcctcttgaccctgcaccctcctagggcattgtatctgtctttccactctggattcagccttctttttctggactctggactttctctaataataaatagttcttctaaaaaaaaaaa

SEQ ID NO: 2319 - DNA, 1400 bp, Homo sapiens
gccttgctgaagatccgttccaaggagggcaggtgtgcgcagccatcccggactatacagaccatctgcctgccctcgatgtataacgatccccagtttggcacaagctgtgagatcactggctttggaaaagagaattctaccgactatctctatccggagcagctgaaaatgactgttgtgaagctgatttcccaccgggagtgtcagcagccccactactacggctctgaagtcaccaccaaaatgctatgtgctgctgacccccaatggaaaacagattcctgccagggagactcagggggacccctcgtctgttccctccaaggccgcatgactttgactggaattgtgagctggggccgtggatgtgccctgaaggacaagccaggcgtctacacgagagtctcacacttcttaccctggatccgcagtcacaccaaggaagagaatggcctggccctctgagggtccccagggaggaaacgggcaccacccgctttcttgctggttgtcatttttgcagtagagtcatctccatcagctgtaagaagagactgggaagataggctctgcacagatggatttgcctgtggcaccaccagggtgaacgacaatagctttaccctcacggataggcctgggtgctggctgcccagaccctctggccaggatggaggggtggtcctgactcaacatgttactgaccagcaacttgtctttttctggactgaagcctgcaggagttaaaaagggcagggcatctcctgtgcatgggctcgaagggagagccagctcccccgaccggtgggcatttgtgaggcccatggttgagaaatgaataatttcccaattaggaagtgtaagcagctgaggtctcttgagggagcttagccaatgtgggagcagcggtttggggagcagagacactaacgacttcagggcagggctctgatattccatgaatgtatcaggaaatatatatgtgtgtgtatgtttgcacacttgttgtgtgggctgtgagtgtaagtgtgagtaagagctggtgtctgattgttaagtctaaatatttccttaaactgtgtggactgtgatgccacacagagtggtctttctggagaggttataggtcactcctggggcctcttgggtcccccacgtgacagtgcctgggaatgtacttattctgcagcatgacctgtgaccagcactgtctcagtttcactttcacatagatgtccctttcttggccagttatcccttccttttagcctagttcatccaatcctcactgggtggggtgaggaccactccttacactgaatatttatatttcactatttttatttatatttttgtaattttaaataaaagtgatcaataaaatgtgatttttctga

SEQ ID NO: 2320 - DNA, 196 bp, Homo sapiens
gtgaaaaaataatcactacttaagctaattaatattggtcattaaatttaaaggatggaaatttatcatgtttaaaaattattcaagcactcttaaaaccacttaaacagcctccagtcataaaaatgtgttctttacaaatatttgcttggcaacacgacttgaaataaataaaactttgtttcttaggagaaaa

SEQ ID NO: 2321 - DNA, 196 bp, Homo sapiens; identical to SEQ ID NO: 2320

SEQ ID NO: 2322 - DNA, 1400 bp, Homo sapiens
agaagaaggacactgaaatcttctatcagtttacttcctttttatctccaggtatcatttatcactgtgatcttaccaaagaggagctggagccaagagttttccgagaggtgaccgtaaaaggaattgatgcttctgattaccagacagtccagattttctaccctagcaaggatggtacgaagattccaatgttcattgtgcataaaaaaggcataaaattggatggctctcatccagctttcttatatggctatggcggcttcaacatatccatcacacccaactacagtgtttccaggcttatttttgtgagacacatgggtggtatcctggcagtggccaacatcagaggaggtggcgaatatggagagacgtggcataaaggtggtatcttggccaacaaacaaaactgctttgatgactttcagtgtgctgctgagtatctgatcaaggaaggttacacatctcccaagaggctgactattaatggaggttcaaatggaggcctcttagtggctgcttgtgcaaatcagagacctgacctctttggttgtgttattgcccaagttggagtaatggacatgctgaagtttcataaatataccatcggccatgcttggaccactgattatgggtgctcggacagcaaacaacactttgaatggcttgtcaaatactctccattgcataatgtgaagttaccagaagcagatgacatccagtacccgtccatgctgctcctcactgctgaccatgatgaccgcgtggtcccgcttcactccctgaagttcattgccacccttcagtacatcgtgggccgcagcaggaagcaaagcaaccccctgcttatccacgtggacaccaaggcgggccacggggcggggaagcccacagccaaagtgatagaggaagtctcagacatgtttgcgttcatcgcgcggtgcctgaatgtcgactggattccataaacagttttcgtgcttcctcctgacagcgacagaaaacctcaagggctttcccacgttgacaccaagaaaccactgggcataatgcttccccacgggaacattattcctgcactcacaggctacagttgaacagaactgccgtgggaattttatcttttttaggcttctcctttttagcaaggccttggtgtttctttttccaccctgtctaggcacatgtggttttttggtgttttttttaagggcatgttgggataaatagctaaatggcaacaaacacattgtgaatattagattgctgaattaaggatcatagtcgggcatacttatttatatccataacctctatatctttaaataaatgtgagaactgttctcatggagaagacttctttgcaacaataataaatgttatttaagaatgaaaaa

SEQ ID NO: 2323 - DNA, 1400 bp, Homo sapiens
tctgtgactctgggcccacagcggggaggccaagaggggccctgtggactttcacccagcactgtgggggccttcagactctggggcagcagacatgctgcttcccatcagccagagggggtcagggctgccctgttgccaaacaactccctgaggcctctccgcaccacctcagcgggcaggaggtcccaccatgtggacagacatagcccaaggaggcaccacaggtctatgtgtgctgggggatgtcaggtgccacccaacgctgtcctggtggtatttacaatgacatcctcctcctccatcactccaggggtggtgtctcggccgcccctaccagctggctgagccccctggcctcctgcgctccctcacttccctcagttcccaaagctgcccagtccatggggacagaaccgtcactcagatccacattcaagtgtgcccaccctgcagtcttcatcctcactcagctgctgcctctggaggtgcctttggccacatgtgctgtgctgtttgtctcctcgacagggagcctgtccaccagcaggctgcggtcccagcgggtgcgtctgcagctcctccccttgggcaggctggttctcccggaggacctttccttggggccctgcttcatgacgatgctgcctgtgtcaccctctaccatctgtaaacaactgggtgccttccccgaccacaccccaatgccttcccagcttggaagccaaggcagctgatgaagggagctcaggagagccgtcttcagctgggctggggttggggctgctgtgaggaaaacctgccattgtggccctggagagtcaccagcagctcttgggaaggacttgctgggaggctgagagaggctttgggcacagcctgctgtcttttccatttcctaaagtttacttcattgtcttgaggcttccaggttttgtttttgtttttgccaaagtagaaaaggcaggtggtgggcggctggcagggagtgcgggtccccgcccctcttcagtcctgccctcccctcctcagtcctgcccaccccgtgcagcccatgctgaggctgcagtggtgtcgtgggtgttacgtgcaggaacgtggagaccctgacgtgggctcactgcatttggttttcttttcagaacttgggagcccccagggaggggctagtgttggtaggtcctagacgtggttccctccagcctccccaaaatcaaccctggtgttgagagaacgtccttctgtccatcgtgggtaacagccttggggagggtgcagagctctgcagagccatgggccaggtggggctgcctcagtcctgtccccttgggcactgaggagaggggcccattcacctttctcctagaatgctgttgtaaataaacaaatggatccctgga

SEQ ID NO: 2324 - DNA, 800 bp, Homo sapiens
accaccatgaatccactcctgatccttacctttgtggcagctgctcttgctgccccctttgatgatgatgacaagatcgttgggggctacaactgtgaggagaattctgtcccctaccaggtgtccctgaattctggctaccacttctgtggtggctccctcatcaacgaacagtgggtggtatcagcaggccactgctacaagtcccgcatccaggtgagactgggagagcacaacatcgaagtcctggaggggaatgagcagttcatcaatgcagccaagatcatccgccacccccaatacgacaggaagactctgaacaatgacatcatgttaatcaagctctcctcacgtgcagtaatcaacgcccgcgtgtccaccatctctctgcccaccgcccctccagccactggcacgaagtgcctcatctctggctggggcaacactgcgagctctggcgccgactacccagacgagctgcagtgcctggatgctcctgtgctgagccaggctaagtgtgaagcctcctaccctggaaagattaccagcaacatgttctgtgtgggcttccttgagggaggcaaggattcatgtcagggtgattctggtggccctgtggtctgcaatggacagctccaaggagttgtctcctggggtgatggctgtgcccagaagaacaagcctggagtctacaccaaggtctacaactacgtgaaatggattaagaacaccatagctgccaatagctaaagcccccagtatctcttcagtctctataccaataaagtgaccctgttctc

SEQ ID NO: 2325 - DNA, 802 bp, Homo sapiens
aacaccatgaatctactcctgatccttacctttgttgcagctgctgttgctgccccctttgatgatgatgacaagatcgttgggggctacatctgtgaggagaattctgtcccctaccaggtgtccttgaattctggctaccacttctgcggtggctccctcatcagcgaacagtgggtggtgtcagcaggtcactgctacaagtcccgcatccaggtgagactgggagagcacaacatcgaagtcctggaggggaatgaacagttcatcaatgcggccaagatcatccgccaccccaaatacaacagccggactctggacaatgacatcctgctgatcaagctctcctcacctgccgtcatcaattcccgcgtgtccgccatctctctgcccactgcccctccagctgctggcaccgagtccctcatctccggctggggcaacactctgagttctggtgccgactacccagacgagctgcagtgcctggatgctcctgtgctgagccaggctgagtgtgaagcctcctaccctggaaagattaccaacaacatgttctgtgtgggcttcctcgagggaggcaaggattcctgccagggtgattctggtggccctgtggtctccaatggagagctccaaggaattgtctcctggggctatggctgtgcccagaagaacaggcctggagtctacaccaaggtctacaactatgtggactggattaaggacaccatagctgccaacagctaaagcccccagtccctctgcagtctctataccaataaagtgaccctgctctcac

SEQ ID NO: 2326 - DNA, 600 bp, Homo sapiens
tctccccatggctcagcgagcactgagctggccctacttccaggatggatgcatcacactcaaggacaggagcctggtccttccctgatggcctttggacccagggcctgacttgagccactccttccttcaggactctgcgggaggctggggccccatcttgatctttgagcccattcttctgggtgtgctttttgggaccatcactgagagtcaggagttttactgcctgtagcaatggccagagcctctggcccctcacccaccatggaccagcccattggccgagctcctggggagctcctgggacccttggctatgaaaatgagccctggctcccacctgtttctggaagactgctcccggcccgcctgcccagactgatgagcacatctctctgccctctccctgtgttctgggctggggccacctttgtgcagcttcgaggacaggaaaggccccaatcttgcccactggccgctgagcgcccccgagccctgactcctggactccggaggactgagcccccaccggaactgggctggcgcttggatctggggtgggagtaacagggcagaaatgattaaaatgtttgagcac

SEQ ID NO: 2327 - DNA, 1400 bp, Homo sapiens
tgtctccccggctggctggctcgctctctcctggggacacagaggtcggcaggcagcacacagagggacctacgggcagctgttccttcccccgactcaagaatccccggaggcccggaggcctgcagcaggagcggccatgaagaagctgatggtggtgctgagtctgattgctgcagcctgggcagaggagcagaataagttggtgcatggcggaccctgcgacaagacatctcacccctaccaagctgccctctacacctcgggccacttgctctgtggtggggtccttatccatccactgtgggtcctcacagctgcccactgcaaaaaaccgaatcttcaggtcttcctggggaagcataaccttcggcaaagggagagttcccaggagcagagttctgttgtccgggctgtgatccaccctgactatgatgccgccagccatgaccaggacatcatgctgttgcgcctggcacgcccagccaaactctctgaactcatccagccccttcccctggagagggactgctcagccaacaccaccagctgccacatcctgggctggggcaagacagcagatggtgatttccctgacaccatccagtgtgcatacatccacctggtgtcccgtgaggagtgtgagcatgcctaccctggccagatcacccagaacatgttgtgtgctggggatgagaagtacgggaaggattcctgccagggtgattctgggggtccgctggtatgtggagaccacctccgaggccttgtgtcatggggtaacatcccctgtggatcaaaggagaagccaggagtctacaccaacgtctgcagatacacgaactggatccaaaaaaccattcaggccaagtgaccctgacatgtgacatctacctcccgacctaccaccccactggctggttccagaacgtctctcacctagaccttgcctcccctcctctcctgcccagctctgaccctgatgcttaataaacgcagcgacgtgagggtcctgattctccctggttttaccccagctccatccttgcatcactggggaggacgtgatgagtgaggacttgggtcctcggtcttacccccaccactaagagaatacaggaaaatcccttctaggcatctcctctccccaacccttccacacgtttgatttcttcctgcagaggcccagccacgtgtctggaatcccagctccgctgcttactgtcggtgtccccttgggatgtacctttcttcactgcagatttctcacctgtaagatgaagataaggatgatacagtctccatcaggcagtggctgttggaaagatttaagatttcacacctatgacatacatgggatagcacctgggccgccatgcactcaataaagaatgtatttt

SEQ ID NO: 2328 - DNA, 600 bp, Homo sapiens
caggggtaatgaagatatcatgatcacagtgattcccgaagaaattgacccataggcagaggcatgagctggacttcatgtttccctcaaagactctcccgtggatgacggatgaggactctgggctgctggaataggacactcaagacttttgactgccattttgtttgttcagtggagactccctggccaacagaatccttcttgatagtttgcaggcaaaacaaatgtaatgttgcagatccgcaggcagaagctctgcccttctgtatcctatgtatgcagtgtgctttttcttgccagcttgggccattcttgcttagacagtcagcatttgtctcctcctttaactgagtcatcatcttagtccaactaatgcagtcgatacaatgcgtagatagaagaagccccacgggagccaggatgggactggtcgtgtttgtgcttttctccaagtcagcacccaaaggtcaatgcacagagaccccgggtgggtgagcgctggcttctcaaacggccgaagttgcctcttttaggaatctctttggaattgggagcacgatgactctgagtttgagctattaaagtacttcttacaaa

SEQ ID NO: 2329 - DNA, 600 bp, Homo sapiens
ctacacccagatctgcaaatacatgtcctggatcaataaagtcatacgctccaactgatccagatgctacgctccagctgatccagatgttatgctcctgctgatccagatgcccagaggctccatcgtccatcctcttcctccccagtcggctgaactctccccttgtctgcactgttcaaacctctgccgccctccacacctctaaacatctcccctctcacctcattcccccacctatccccattctctgcctgtactgaagctgaaatgcaggaagtggtggcaaaggtttattccagagaagccaggaagccggtcatcacccagcctctgagagcagttactggggtcacccaacctgacttcctctgccactccccgctgtgtgactttgggcaagccaagtgccctctctgaacctcagtttcctcatctgcaaaatgggaacaatgacgtgcctacctcttagacatgttgtgaggagactatgatataacatgtgtatgtaaatcttcatgtgattgtcatgtaaggcttaacacagtgggtggtgagttctgactaaaggttacctgttgtcgtgaaaaaaaaaaaaaa

SEQ ID NO: 2330 - DNA, 600 bp, Homo sapiens; identical to SEQ ID NO: 2329

SEQ ID NO: 2331 - DNA, 600 bp, Homo sapiens
ggagcccacaacgtgcggacgcaggagcccacccagcagcacttctcggtggctcaggtgtttctgaacaactacgacgcggagaacaaactgaacgacattctcctcatccagctgagcagcccagccaacctcagtgcgtccgtcacctcagtccagctgccacagcaggaccagccagtgccccacggcacccagtgcctggccatgggctggggccgcgtgggtgcccacgaccccccagcccaggtcctgcaggagctcaatgtcaccgtggtgaccttcttctgccggccacataacatttgcactttcgtccctcgccgcaaggccggcatctgcttcggagactcaggtggccccctgatctgtgatggcatcatccaaggaatagactccttcgtgatctggggatgtgccacccgccttttccctgacttcttcacgcgggtagccctctacgtggactggatccgttctacgctgcgccgtgtggaggccaagggccgcccctgaaccgcccctcccacagcgctggccgggaccccgagcctggctccaaaccctcgaggcggatctttggacagaagcagctcttgt

SEQ ID NO: 2332 - DNA, 600 bp, Homo sapiens
gggggagcccaggtatgagaaagaaaaaaccactaagaaaatacctccctgggaggatgagctggggccctttttcttttgctggatggttcctttatgcagcttggccctgtctaccgagatgcccatctcttcctgcctgctagcctgctagaccctcaaactgggtgggttctgtgtcaataaaaagcttcaccccctggctgagtgaggtggtcccctgcaatcactgtttgtcccctacccacccaacctgtccctgcctgctcccagcccactcatccttatgtgctagggataaatcaagagtcctcagcactccacattcccaaaaaatcccaggaactcctaaaccttcccctgtgacagaagatgaggttggcagctgatcagacctcaataattttatactgtaataagctctttgaatgtgtatattattatcttttacaatcatttcattttgtatttaatatcaatggactgagtctgattcagaaaataattgtaatgttcatattcaatatcttacagtgatacagttttgtatttacatataaatataccgacatgatcaaaaccaaaaaaaaaaaaaaaaaa

SEQ ID NO: 2333 - DNA, 600 bp, Homo sapiens; identical to SEQ ID NO: 2332

SEQ ID NO: 2334 - DNA, 600 bp, Homo sapiens
atcaatgccatcaactatgccctgggcaatgagatggtctgcaggggaatctggcagtgcctctcaccgcagaagagggagaaggaccgaaccaagtgagcctgccaccctggagtgagccccaggccaggaggctgttccaggagtcctgcccagcagcctcggtggccaagcccagacactcacccaccttccccagtggccccgtggatcctggtcctaggctggacacaggattcagaaagacaccaggctgcacagaaagagccagatggacctgagtgtcggtcacagccccctacactcaaggctgagaggcctcaggaaagtcattcctttttaaaaataataataaatgtaagggggtacagtgcagttttgttacatggatagattgcctagtggtgaagtctgggcttttagtgtaaccatcaccctaataatatacgttgtacccattaagttatttctcatccctcaccccctcccaccttgtcacccttctgagtctccaatgtctattattccacactccatgtccacgtgtacacattatttagctcccacttacaagtgagaacatgtggtatttgactttca

SEQ ID NO: 2335 - DNA, 600 bp, Homo sapiens
ccctgataagttcagccaggccagcaaggacttctgcgaggcgctgctggagaaggacccggagaagcgcctggggttcagagatgagacctgcgacaagctccgtgcccaccccctcttcaaggaccttaactggaggcagctggaggctgggatgctgatgccccctttcatcccagactccaaaactgtctacgcaaaggatattcaggacgtgggtgccttttccaccgtcaaaggtgtggcctttgacaaaacagacacagaattctttcaggaatttgccactggcaactgccccatcccctggcaggaggagatgatcgagacgggcatctttggcgagctgaacgtgtggcgctcggacggtcagatgccggacgacatgaagggcatctccgggggctccagctcctcgtccaagtcagggatgtgtctggtttcctaggtgacgccccagagtccacgtggaggaaaaggacccatacggctcgatgggggccgcctgcctccgtggtgccagcctggggtctgctagcaaggggacacgtggttccctccacccaggtccccatcacgccatctccttgcggcccaagg

SEQ ID NO: 2336 - DNA, 600 bp, Homo sapiens; identical to SEQ ID NO: 2335

SEQ ID NO: 2337 - DNA, 1400 bp, Homo sapiens
tagaaaccgctgccaacactgtcgattacagaaatgccttgccgtagggatgtctcgagatgctgtaaaatttggccgaatgtcaaaaaagcagagagacagcttgtatgcagaagtacagaaacaccggatgcagcagcagcagcgcgaccaccagcagcagcctggagaggctgagccgctgacgcccacctacaacatctcggccaacgggctgacggaacttcacgacgacctcagtaactacattgacgggcacacccctgaggggagtaaggcagactccgccgtcagcagcttctacctggacatacagccttccccagaccagtcaggtcttgatatcaatggaatcaaaccagaaccaatatgtgactacacaccagcatcaggcttctttccctactgttcgttcaccaacggcgagacttccccaactgtgtccatggcagaattagaacaccttgcacagaatatatctaaatcgcatctggaaacctgccaatacttgagagaagagctccagcagataacgtggcagacctttttacaggaagaaattgagaactatcaaaacaagcagcgggaggtgatgtggcaattgtgtgccatcaaaattacagaagctatacagtatgtggtggagtttgccaaacgcattgatggatttatggaactgtgtcaaaatgatcaaattgtgcttctaaaagcaggttctctagaggtggtgtttatcagaatgtgccgtgcctttgactctcagaacaacaccgtgtactttgatgggaagtatgccagccccgacgtcttcaaatccttaggttgtgaagactttattagctttgtgtttgaatttggaaagagtttatgttctatgcacctgactgaagatgaaattgcattattttctgcatttgtactgatgtcagcagatcgctcatggctgcaagaaaaggtaaaaattgaaaaactgcaacagaaaattcagctagctcttcaacacgtcctacagaagaatcaccgagaagatggaatactaacaaagttaatatgcaaggtgtctacattaagagccttatgtggacgacatacagaaaagctaatggcatttaaagcaatatacccagacattgtgcgacttcattttcctccattatacaaggagttgttcacttcagaatttgagccagcaatgcaaattgatgggtaaatgttatcacctaagcacttctagaatgtctgaagtacaaacatgaaaaacaaacaaaaaaattaaccgagacactttatatggccctgcacagacctggagcgccacacactgcacatcttttggtgatcggggtcaggcaaaggaggggaaacaatgaaaacaaataaagttgaacttgtttttctca

SEQ ID NO: 2338 - DNA, 600 bp, Homo sapiens
ttcccaatccttagcaatgccttagctgggacgcatagctaatactttagagaggatgacagatccataaagagagtaaagataagagaaaatgtctaaagcatctggaagggtaaaaaaaaaaatctatttttgtacaaatgtaattttatccctcatgtatacttggatatggcggggggagggctgggactgtttcgtttctgcttctagagattgaggtgaaagcttcgtccgagaaacgccaggacagacgatggcagaggagagggctcctgtgacggcggcgaggcttgggaggaaaccgccgcaatgggggtgtcttccctcggggcaggagggtgggcctgtggctttcaagggttttcttccctttcgagtaatttttaaagccttgctctgttgtgtcctgttgccggctctggcctttctgtgactgactgtgaagtggcttctccgtacgattgtctctgaaacatcgtggccgcaggtgcagggtttgatggacagtagcattagaattgtggaaaaggaacacgcaaagggagaagtgtgagaggagaaacaaaatatgagcgtttaaaatacatcgccattcag

SEQ ID NO: 2339 - DNA, 1400 bp, Homo sapiens
ctggtcatgttcatctacgccatctttggaatgtccaactttgcctatgttaaaaaggaagatggaattaatgacatgttcaattttgagacctttggcaacagtatgatttgcctgttccaaattacaacctctgctggctgggatggattgctagcacctattcttaacagtaagccacccgactgtgacccaaaaaaagttcatcctggaagttcagttgaaggagactgtggtaacccatctgttggaatattctactttgttagttatatcatcatatccttcctggttgtggtgaacatgtacattgcagtcatactggagaattttagtgttgccactgaagaaagtactgaacctctgagtgaggatgactttgagatgttctatgaggtttgggagaagtttgatcccgatgcgacccagtttatagagttctctaaactctctgattttgcagctgccctggatcctcctcttctcatagcaaaacccaacaaagtccagctcattgccatggatctgcccatggttagtggtgaccggatccattgtcttgacatcttatttgcttttacaaagcgtgttttgggtgagagtggggagatggattctcttcgttcacagatggaagaaaggttcatgtctgcaaatccttccaaagtgtcctatgaacccatcacaaccacactaaaacggaaacaagaggatgtgtctgctactgtcattcagcgtgcttatagacgttaccgcttaaggcaaaatgtcaaaaatatatcaagtatatacataaaagatggagacagagatgatgatttactcaataaaaaagatatggcttttgataatgttaatgagaactcaagtccagaaaaaacagatgccacttcatccaccacctctccaccttcatatgatagtgtaacaaagccagacaaagagaaatatgaacaagacagaacagaaaaggaagacaaagggaaagacagcaaggaaagcaaaaaatagagcttcatttttgatatattgtttacagcctgtgaaagtgatttatttgtgttaataaaactcttttgaggaagtctatgccaaaatcctttttatcaaaatattctcgaaggcagtgcagtcactaactctgatttcctaagaaaggtgggcagcattagcagatggttatttttgcactgatgattctttaagaatcgtaagagaactctgtaggaattattgattatagcatacaaaagtgattgattcagttttttggtttttaataaatcagaagaccatgtagaaaacttttacatctgccttgtcatcttttcacaggattgtaattagtcttgtttcccatgtaaataaacaacacacgcatacagaaaaaaaaaaaaaaa

SEQ ID NO: 2340 - DNA, 600 bp, Homo sapiens
ctggagacccaccggctcccctgtacctcccgctgccccaggccctgcagggagtctgcattcaagctctccactgggacctccaggtggccttccgccaagtcagctggatggactctggccacgctaggtgaacaggggctgccgcatcagagccacagacagaggagcagcctggccaaaatcaacatcgtctaccaggagctcaactaccgctcagtggaggaggcgcccgtgtactcggtgccgcagctgctctccgccatgggcagcctctacagcctgtggtttggggcctccgtcctctccctcctggagctcctggagctgctgctcgatgcttctgccctcaccctggtgctaggcggccgccggctccgcagggcgtggttctcctggcccagagccagccctgcctcaggggcgtccagcatcaagccagaggccagtcagatgcccccgcctgcaggcggcacgtcagatgacccggagcccagcgggcctcatctcccacgggtgatgcttccaggggttctggcgggagtctcagccgaagagagctgggctgggccccagccccttgagactctggacacctga

SEQ ID NO: 2341 - DNA, 1400 bp, Homo sapiens
tgtgaggggatgtgggacaacataagctgctggccctcttctgtgccgggccggatggtggaggtggaatgcccgagattcctccggatgctcaccagcagaaatggttccttgttccgaaactgcacacaggatggctggtcagaaaccttccccaggcctaatctggcctgtggcgttaatgtgaacgactcttccaacgagaagcggcactcctacctgctgaagctgaaagtcatgtacaccgtgggctacagctcctccctggtcatgctcctggtcgcccttggcatcctctgtgctttccggaggctccactgcactcgcaactacatccacatgcacctgttcgtgtccttcatccttcgtgccctgtccaacttcatcaaggacgccgtgctcttctcctcagatgatgtcacctactgcgatccgcacagggcgggctgcaagctggtcatggtgctgttccagtactgcatcatggccaactactcctggctgctggtggaaggcctctaccttcacacactcctcgccatctccttcttctctgaaagaaagtacctccagggatttgtggcattcggatggggttctccagccatttttgttgctttgtgggctattgccagacactttctggaagatgttgggtgctgggacatcaatgccaacgcatccatctggtggatcattcgtggtcctgtgatcctctccatcctgattaatttcatccttttcataaacattctaagaatcctgatgagaaaacttagaacccaagaaacaagaggaaatgaagtcagccattataagcgcctggccaggtccactctcctgctgatccccctctttggcatccactacatcgtcttcgccttctccccagaggacgctatggagatccagctgttttttgaactagcccttggctcattccagggactggtggtggccgtcctctactgcttcctcaatggggaggtgcagctggaggttcagaagaagtggcagcaatggcacctccgtgagttcccactgcaccccgtggcctccttcagcaacagcaccaaggccagccacttggagcagagccagggcacctgcaggaccagcatcatctgagaggctggagcagggtcacccacggacagagaccaagagaggtcctgcgaaggctgggcactgctgtgggacagccagtcttcccagcagacaccctgtgtcctccttcagctgaagatgcccctccccaggccttggactcttccgaagggatgtgaggcactgtggggcaggacaagggcctgggatttggttcgtttgctcttctgggaagagaagttcaggggtcccagaaagggacagggaaataaatggtgcctgggatgagattc

SEQ ID NO: 2342 - DNA, 600 bp, Homo sapiens
acatgctactgaagtttattttaccattgactgctgccctcaatctagaacgctacacaagaaatattttgtttttactcagcaggtgtgccttaacctccctattcagaaagctccacatcaataaacatgacactctgaagtgaaagtagccacgagaattgtgctacttatactggaacataatctggaggcaaggttcgactgcagtcgaaccttgcctccagattatgaaccagtataagtagcacaattctcgtggctactttcacttcagagtgtcatgtttattgatgtggagctttctgaatagggaggttaaggcacacctgctgagtaaaacaaatatttcttgtgtagcgttcttaggaatctggtgtctgtccggccccggtaggcctgttgggtttctagtcctccttaccatcatctccatatgagagtgtgaaaataggaacacgtgctctacctccatttagggatttgcttgggatacagaagaggccatgtgtctcagagctgttaagggcttatttttttaaaacattggagtcatagcatgtgtgtaaactttaaatatgcaggccttcgtggctcgag

SEQ ID NO: 2343 - DNA, 600 bp, Homo sapiens; identical to SEQ ID NO: 2342

SEQ ID NO: 2344 - DNA, 600 bp, Homo sapiens
atgaatatttacgtttttgtaaattaatcttttatattgataacagcactgactagggaaatgatcagtttttttttatacactgtaatgaaccgctgaatatgaagcatttggcatttatttgtgagaaaagtggaatagttttttttttttttttttttttttgccttcaactaaaaacaaaggagataaatttagtatacattgtatctaaattgtgggtctatttctagttattacccagagtttttatgtagcagggaaaatatatatctaaatttagaaatcatttgggttaatatggctcttcataattctaagactaatgctcagaacctaaccactaccttacagtgagggctatacatggtagccagttgaatttatggaatctaccaactgtttagggccctgatttgctgggcagtttttctgtattttataagtatcttcatgtatccctgttactgatagggatacatgtcttagaaaattcactattggctgggagtggtggctcatgcctgtaatcccagcacttggagaggctgaggttgcgccactacactccagcctgggtgacagagtgagatctgcctc

SEQ ID NO: 2345 - DNA, 600 bp, Homo sapiens; identical to SEQ ID NO: 2344

SEQ ID NO: 2346 - DNA, 600 bp, Homo sapiens
accttcggccatctggcaggtggctacgacgcccagtactacgggtacctgtggagcgaggtgtattccatggacatgttccacacgcgcttcaagcaggagggtgtcctgaacagcaaggttggcatggattacagaagctgcatcctgagacccggcggttccgaggatgccagcgccatgctgaggcgcttcctgggccgtgaccccaagcaggacgccttcctcctgagcaaggggctgcaggtcgggggctgcgagcccgagccgcaggtctgctgaggcctggcactgcgactgcccagtctggcctgcgctcccgccgccctggtgccttagcccccggcacaggatggggcaagctctggcacagtgccttgggactggactggcagggtggctgagcggctgtcttgcctcttgtcattgtctgtccccacccggtcgtggcccacccggctagacggcgtcctcaaggcatctggagggctttcgtggctgccagggcctggtctttgttgcactaacacgtctcctctctgggaaacgtcccttgtcaggagacggctcttctttgaaatgaggtcattaaaaggaaac

SEQ ID NO: 2347 - DNA, 600 bp, Homo sapiens; identical to SEQ ID NO: 2346

SEQ ID NO: 2348 - DNA, 600 bp, Homo sapiens
ggcgtccacccggaaggacagcagcttctcggaatgcatgttgttcagggtccgcaggtccggcagcttgagcagcagcttggtgaagcgggaagtctccaagggccggttcttcagcaccagagcccgaagagcccgcagcagcgtctcctggagctgctccaccgaagcggaattctccatgcccgagcggtctgtggggaagacgacagcagtgaggcggactccccgagctcctctgaggaggaaccggaggtctgcgaggacctggcaggcaatgcagcctctccctgaagccccccagaaggccgatggggaaggagaaggagtgccataccttctcccaggcctctgccccaagagcaggaggtgcctgaaagctgggagcgtgggctcagcagggctggtcacctcccatcccgtaagaccaccttcccttcctcagcagccaaacatggccagactcccttgctttttgctgtgtagttccctctgcctgggatgcccttccccctttctctgcctggcaacatcttacttgtcctttgaggccccaactcaagtgtcacctccttccccagctcccccaggcagaaatag

SEQ ID NO: 2349 - DNA, 600 bp, Homo sapiens
agacaactccggttagatgctactgaatttgcctgtctaaaatgcatcgtcactttcaaagccgttcctacacatagtggttctgaactgagaagtttccggaatgctgccgccattgcagcccttcaagatgaggctcagctaacgctcaacagctacatccataccagatatcccactcaaccctgtcgctttggaaaactcctgttgcttttgccagctttacgttctattagcccatcaactatagaagaagtgtttttcaaaaaaaccatcggcaatgtgccaattacaagactgctttcagatatgtacaaatccagtgatatctaagctcacaagatacccacttttcaggatgggacagtatcagatcaacttcaacccatggagaacaagcctcaactaacaaacccttcaggaagcatataccggggaatgtgtagccttcaggaaaaaaatgccaattgacacaaagcattccagtagctatgacctgccgccctgaccaggatagggcgggtgggaaggagaggggtgcaacaggaccgcctgcactgaaaactcactgctgccatgccctgggagggggcaaactgg

SEQ ID NO: 2350 - DNA, 600 bp, Homo sapiens
aataatgtagactgataaacccttattttagtactaaagagggagccttgctatttcagtgggtataatttaaactttttaaagaaaatctgtacttttataaagatgtattttgtataacttaaataataatgctaaagtatactagggtttttttttcttgagaatgttactgcaatcatgttgtagtttgcacagacttttatgcataattcactttaaaaatatagaatatatggtctaatagttttttaaagcttttggactaaagtattccacaaatcttacctctttaggtcactgatggtcactccgattctgagtgccacattggtagactcctaaaatacagttgacaacttagccaattgcaactccagtgttgataattaaaatgaaatggtaaagcagcagactgtaaggtctttagagatttttttttaaggttcaggccgtaggttcctcaaggaatctcttaagttttgcccaaagactggtacttcctttcagtagggcgctaatgtatacacattaatgataagttgataacattaaaaatgtagctgacttatcctattaaacctcctctgctatgttcac

SEQ ID NO: 2351 - DNA, 600 bp, Homo sapiens; identical to SEQ ID NO: 2350

SEQ ID NO: 2352 - DNA, 1400 bp, Homo sapiens
acgaatgaaaagacttaatgaaattgttgatgcggcaaatgctgttatttctcatatagatcaaacagccctagcagtttatattgcaatgaagactgatcccaggcctgatgcagctactataaaaaatgacatggacaaacaaaaatccaccctcgtagatgccctttgtaggaaaggttgtgccctggcagaccatcttcttcacacccaggctcaagacggagccatttccactgatgcagaaggaaaggaggaggaaggagaaagtcctttggattctctggcagaaacattttgggaaactactaaatggactgatctctttgacaataaggttttgacatttgcatataaacatgcattagtaaataaaatgtatgggagaggccttaaatttgcaactaaacttgtggaagaaaaaccaacaaaagaaaactggaaaaattgtattcaactgatgaagttacttggatggacccattgtgcatcttttactgaaaactggctccccatcatgtatcctcccgattattgcgtattctaaaataggaaacaagactttaaattttaaaaaaggaagttttatagtgaatgggtataaaaacaaatttgtggcatttttagtctaatgcatgttttcatccactatccagtactgattattaaaatgacatgtatttatcagagaattcactgacgtgtggcttaatacatgtaaatctagacctctgacatcatggtgttttcttaatgcctcacattgctggcacggggatgtgccctgcctgccagcacctaggacttcgagttgggttgcagcttatgacatgcatgataggttttggaaggtaacttttaactgcaaacctataaagtactattttttattttataaatgaacagggttttaacgtgctcaactttaatttttttcaattgtatgaaggccttaaaaaagctacattaagcgtagctaaaattatttattggactaaaaactaacagaacttcatttccagaattttttttttttttttttttttggcaaatgtttacattcaattaaggggaaaaagtagaaccagcacaaatgagtggcagttgctggagcataactgcttcaataaatcttcatcttggggtaattacaggcaagtcattttcacatcctcttgaggttcagagcatcagaatgaactctatgaatacatgtgtaagtgccagacagctgaatctttatcaggtattgtaaagatacacatatgatatgtttattaaaattgaaataatgtaaaacacatgaataaatttgcaaaaccaagatcacagtacaccatatgcactctggtaccttaatttttttttataaataataaaagtgaatattgaagcttctt

SEQ ID NO: 2353 - DNA, 600 bp, Homo sapiens
ccataatggaaaaccacatttgtgacgcaaaataccaccttggcgcctacacgggagacgacgtccgcatcgtccgtgacgacatgctgtgtgccgggaacacccggagggactcatgccagggcgactccggagggcccctggtgtgcaaggtgaatggcacctggctgcaggcgggcgtggtcagctggggcgagggctgtgcccagcccaaccggcctggcatctacacccgtgtcacctactacttggactggatccaccactatgtccccaaaaagccgtgagtcaggcctgggttggccacctgggtcactggaggaccaacccctgctgtccaaaacaccactgcttcctacccaggtggcgactgccccccacaccttccctgccccgtcctgagtgccccttcctgtcctaagccccctgctctcttctgagccccttcccctgtcctgaggacccttccctatcctgagcccccttccctgtcctaagcctgacgcctgcaccgggccctccagccctcccctgcccagatagctggtggtgggcgctaatcctcctgagtgctggacctcattaaagtgcatggaaatc

SEQ ID NO: 2354 - DNA, 1400 bp, Homo sapiens
aaaaactgagtcagctgtgctgatgacatcagataaggctgaatcatgtcagggagatttaagtacattggccaatgtggttacatcattagcgaatcttggaaaaactaaagatctttctcaaaatagtaatgaaatgtctatgattgaaagcttaagcaatgatgatacctctttgtgtgaatttcaagaaatgcagaccaacggtgatgtttcaagggcatttgacactcttgcaaaagcattgaatcctggagagagcacagcctgccagagctcagtagcgggcatggaaggaagtgtacacctaatcactggagattcaagcataaattacaccgaaaaagaggggccacttctcagcgattcacatgtagctttcaggctcaccatgccttctcctatgcctgagtacctgaatgtgcactacattggggagtctgcctccagactgctgttcttatcaatgcactgggcactttcgattccttctttccaggctctagggcaagaaaacagcatatcactggtgaaagcttactggaatgaactttttactcttggtcttgcccagtgctggcaagtgatgaatgtagcaactatattagcaacatttgtcaattgtcttcacaatagtcttcaacaagataaaatgtcaacagaaagaagaaaattattgatggagcacatcttcaaactacaggagttttgtaacagcatggttaaactctgcattgatggatacgaatatgcctacctgaaggcaatagtactcttcagtccagatcatccaagcctagaaaacatggaactgatagagaaatttcaggaaaaggcttatgtggaattccaagattatataaccaaaacatatccagatgacacctacaggttatccagactactactcagattgccagctttaagactgatgaatgctaccatcactgaagaattgtttttcaaaggtctcattggcaatatacgaattgacagtgttatcccacatattttgaaaatggagcctgcagattataactctcaaataattggtcacagcatttgaaaactgtgactgcagtgctgtaaacttaactgttctttgccagaacacaagacaccaaattgaactcactgcttttgaggcatctggaaatttttactttaaaaagtaaccagaatccaaggtatttttattttagcttcccttaagaatttttgaagtgactgggcaggcagcagaaattaaatgaatttttcttcctgattcctttaaatgaatatgaaacactacaaatttattcttggtgaagatgatacctgaagctgtcacctcttgattatctaaactaagcgctcattctattttataaaacaaataaattagtctcttttttctg

SEQ ID NO: 2355 - DNA, 1400 bp, Homo sapiens; identical to SEQ ID NO: 2354

SEQ ID NO: 2356 - DNA, 600 bp, Homo sapiens
aactttctggtgaccggataaagcaagtcatggagcacatctggaagctgcaggagttctgtaacagcatggcgaactgggatatagatggctatgagtatgcataccttaaagctatagttctctttagccccgatcatccaggtttgaccagcacaagccagattgaaaaattccaagaaaaggcacagatggagttgcaggactatgttcagaaaacctactcagaagacacctaccgattggcccggatcctcgttcgcctgccggcactcaggctgatgagctccaacataacagaagaacttttttttactggtctcattggcaatgtttcgatagacagcataatcccctacatcctcaagatggagacagcagagtataatggccagatcaccggagtcagtctatagcgcaaaccacacacctgccaaggagcaacagaatccttccaggaccgttcacatacaaagaaaagtagtggtattttggtatgtgcaaatatttccatatgttagccatttcctgtctggtttctccttatctgttaatcccagacaatagcaattaaaagactagtagggatcctttcctgac

SEQ ID NO: 2357 - DNA, 600 bp, Homo sapiens; identical to SEQ ID NO: 2356

SEQ ID NO: 2358 - DNA, 600 bp, Homo sapiens
aatctgaatgtaaatacctctaatagatgtttcaacagcacagtatcttcaaggaagcaggtcaccaagatgctggcagtggttgtaattctgtttgcccttttatggatgccctacaggactctagtggttgtcaactcatttctctccagtcctttccaagaaaattggtttttgctcttttgcagaatttgcatttatctcaacagtgccatcaacccggtgatttacaatctcatgtcccagaaattccgtgcagccttcagaaagctctgcaactgcaagcagaagccaacagagaaacctgctaactacagtgtggccctaaattacagcgtcatcaaggagtcagaccatttcagcacagagcttgatgatatcactgtcactgacacttacctgtctgccacaaaagtgtcttttgatgacacctgcttggcttctgaggtatcctttagccaaagttgattcatgaattagaagaaaatggatgacaaagaaattgagaatctgtgcagtcatcaacaaaagggagaacatggccaatagtcatatgtgaagacagagcagatcagtctttgtcaatgctctaacaaaccg

SEQ ID NO: 2359 - DNA, 600 bp, Homo sapiens; identical to SEQ ID NO: 2358

SEQ ID NO: 2360 - DNA, 1400 bp, Homo sapiens
gctttaaaatgtttttttttatgtttaagaggggcagttataaatggacacattgcccagaatgttttgtaaaatgaagaccagcaaatgtaggctgatctccttcacaggatacacttgaaatatagaagttatgttttaaatatctctgttttaggagttcacatatagttcagcatttattgtttaggagtataattttattttatctaaaataatagtctattttttcttttgtattttgttataatcttaagcaacaaagaaaaaaccctaatatttgaatctatttatgtctttcaatttaaattcacttcagtttttgttattgtaatatatttacttttacatggttataatcactttatatttttaatgtttttttcacttaatattttatatatacatttccatgtattgatgtagttagtccacatttaaatttttatagaattatatagtttttgaaaaatacagtcagtagatgttttattttttagctattcagttatgtttataagtttgcatagctacttctcgacatttggtttgttttaatttttttgtatcataatagtcctatttttttttcaagttggagtgaatgtttttagttttaagatagataggagacacttttttatcacatgtagtcacaacctgttttgtttttgtaaaacataggaagtctctttaatgcaatgatttgttttatatttggactaaggttcttgagcttatctcccaaggtactttccataatttaacacagcttctataaaagtgacttcatgcttacttgtggatcattcttgctgcttaagatgaaaagcattggttttttaaaattagagaataaaatatgtatttaaatttttggtgtgttcacataaagggatgtagctaaaatgttttcataggctattatatattctcgcagcatttccagttaagaggatattaggtatataattctcttcttaaccgaatgtcagatggtcttacgccacagggtgcaggtaacccttggtctgtaagcaccaccgatccagggatcattgtctaaataggttactattgtttgtttcatcttgcttttgcatttttattttttaatttccaaattttaagtgttccctctttggggcaaattcttataaaaatgtttattgtaaagttatatattttgtctacgatgggattatgcacttcccaattgggattttacatctggatttttagtcattctaaaaaacacctaattattaaaacatttatagagtgcctactgtatgcatgagttgagttgcttctgaggtacattttgaatgacagcatattgtaagaaaaaaaaaggtgaataaaatttgacattagattataaaaaaaaaaaggaattc

SEQ ID NO: 2361 - DNA, 1400 bp, Homo sapiens; identical to SEQ ID NO: 2360

SEQ ID NO: 2362 - DNA, 1400 bp, Homo sapiens
atgccatagctgttgtgctcagcttctctcggattgcgtacatcctccctgcaaatgagagctttggccccctgcagatctctcttggaaggactgtaaaggacatattcaagttcatggtcctctttattatggtgttttttgcctttatgattggcatgttcatactttattcttactaccttggggctaaagttaatgctgcttttaccactgtagaagaaagtttcaagactttattttggtcaatatttgggttgtctgaagtgacttccgttgtgctcaaatatgatcacaaattcatagaaaatattggatacgttctttatggaatatacaatgtaactatggtggtcgttttactcaacatgctaattgctatgattaatagctcatatcaagaaattgaggatgacagtgatgtagaatggaagtttgctcgttcaaaactttggttatcctattttgatgatggaaaaacattacctccacctttcagtctagttcctagtccaaaatcatttgtttatttcatcatgcgaattgttaactttcccaaatgcagaaggagaaggcttcagaaggatatagaaatgggaatgggtaactcaaagtccaggttaaacctcttcactcagtctaactcaagagtttttgaatcacacagttttaacagcattctcaatcagccaacacgttatcagcagataatgaaaagacttataaagcggtatgttttgaaagcacaagtagacaaagaaaatgatgaagttaatgaaggtgaattaaaagaaatcaagcaagatatctccagccttcgttatgaacttttggaagacaagagccaagcaactgaggaattagccattctaattcataaacttagtgagaaactgaatcccagcatgctgagatgtgaatgatgcagcaacctggatttggctttgactatagcacaaatgtgggcaataatatttctaagtatgaaatacttgaaaaactatgatgtaaatttttagtattaactacctttatcatgtgaacctttaaaagttagctcttaatggttttattgttttatcacatgaaaatgcattttatttgtctgctttgacattacagtggcataccattgtgttgaaaagcccaatattactatattattgaaacttttattcattttagagtaaactccacatctttgcactacctgtttgcctccaagagactatcagttccttggggacagggaccatgtcttattcatctttgtgtctccagcatctagtacagtgcctggtatatagtaggtgctcaataaatgttgaaaccaactgaactgccaacaaaataaaaataaaaagtcttcactatgtagcataaaaaaaaaaaaaaaaaaa

SEQ ID NO: 2363 - DNA, 600 bp, Homo sapiens
ctgggagccacgtgctggccatgtggccagggacggcatgagcaggaggcggggacgtgggggccttctggtttggtgtcaacagctcacaggagcgtgaaccatgagggccctcaggaggggaacgtggtaaaacccaagacattaaatctgccatctcaggcctggctggctcttctgtgctttccacaaataaagttcctgacacgtccagggccaggggctgtgtgacggctgcctgaagttctcctcgatcccccggtgagcttcctgcagcctgtggatgtcctgcagcccctcagccctacccccaagtttctcctctgacccatcagctccctgtcttcattttcctaaacctgggctccagcatcgtccccaagcccaccaggccaggatgcaggcatccacatgccctcctccttggcttcccctgcgtggtggtgccaatgtgccctggcacccctgcagaggctccggatggagcctggggctgcctggccactgagcactggccgaggtgatgcccacccttccctggacaggcctctgtcttccacctgacccaaagctctctagccacccccttgtccccagtat

SEQ ID NO: 2364 - DNA, 600 bp, Homo sapiens; identical to SEQ ID NO: 2363

SEQ ID NO: 2365 - DNA, 600 bp, Homo sapiens
tggtggtccacctcaaacgtttctcctacaacagatactggagggataagctcgacacagtcgtagaattcccaatcagagggctgaacatgtccgagtttgtctgtaacctgtcagcaaggccttatgtgtacgacctcattgccgtgtccaatcattatggagccatgggggttggccactacactgcatatgcgaagaacaaactgaatggtaaatggtattactttgatgatagcaacgtgtccctggcctctgaggatcagatagtgactaaagcagcttatgtgctattttaccaacgtcgagatgatgaattttataagacaccttcacttagcagttctggttcctctgatggagggacacgaccaagcagctctcagcagggctttggggatgatgaggcttgcagcatggacaccaactaatgctgactccacgatcctgccaccctgtagcgccagtgtaatcccccaggagaacatctttgacactctgcagactgctagtgttctgtctaaaaaccagacaaggaaatacccttcttttatgagcagaaggaaacaaaaaaaaaaagaagaccgtttacctagaaag

SEQ ID NO: 2366 - DNA, 600 bp, Homo sapiens; identical to SEQ ID NO: 2365

SEQ ID NO: 2367 - DNA, 1400 bp, Homo sapiens
aactaacgacagctatggattatttgcggttgtgatgcatagtggcattacaattagtagtgggcattacactgcttctgttaaagtcactgaccttaacagtttagaactagataaaggaaattttgtggttgaccaaatgtgtgaaataggtaagccagaaccattgaatgaggaggaagcaaggggtgtggttgagaattataatgatgaagaagtgtcaattagagttggtggaaatacacagccaagtaaagttttgaacaaaaaaaatgtagaagctattggacttcttggaggacaaaagagcaaagcagattatgagctatacaacaaagcctctaatcctgataaggttgctagtacagcgtttgctgaaaatagaaattctgagactagtgatactactgggacccatgaatctgatagaaacaaggaatccagtgaccaaacaggcattaatattagtggatttgagaacaaaatttcatacgtagtgcaaagcttaaaggagtatgaggggaagtggttgctttttgatgattctgaagtcaaagttactgaagagaaggactttctgaattctctttccccttctacatctcctacttctactccttacttgctattttataagaaattatagagtgagtgtattttccttgtgtatatattaaacacacccatacaaacattggtaaagttgattacatcaaagaatctttagcttatcttttgaagctactggatattattggtctctctaggtttttatataaatagtgaaatttgaattactgaaaaccatgttaatttttagaactcattttcctcagtagagactagtgatgcattagcttctgggaacaaacttgtatcggttcttaattaaattatccaaaacggaggcatttaaacacttggatttacaccagtcttttgtgtttgctttttaaaataaagtgctcgtatttgtattctccatattttggagtaattatctacatgatgtttatagttcctgtggtttttcacccaagaagcagaatctcattcagtacatttagttttataagagtcatgaagctaaatccttgggctatgtcagaggcacaaagtctagaatgtgtgtattcacaatggtgtatgtacattttgtgccttgattcacttagaagtgtctcagaaaacctggacagttcgcttctacacaagaattttatatgtatttatgaagatgattctgtaccctagtatatctttttgggcatggactaatttgtatctgtttaactcatattctgcacgatctgtatatagtacatcaaacttagaggtgtgaccttaaatttaactttttttaaaaactgggaggtcaataaaatttaaactgcttaact

SEQ ID NO: 2368 - DNA, 600 bp, Homo sapiens
cgtcaattttgtccttttcattagtattatacgaattttgctgcagaagttaacatccccagatgtcggcggcaacgaccagtctcagtacaagaggctggccaagtccacgctcctgcttatcccgctgttcggcgtccactacatggtgtttgccgtgtttcccatcagcatctcctccaaataccagatactgtttgagctgtgcctcgggtcgttccagggcctggtggtggccgtcctctactgtttcctgaacagtgaggtgcagtgcgagctgaagcgaaaatggcgaagccggtgcccgaccccgtccgcgagccgggattacagggtctgcggttcctccttctcccacaacggctcggagggcgccctgcagttccaccgcgcgtcccgagcccagtccttcctgcaaacggagacctcggtcatctagccccacccctgcctgtcggacgcggcgggaggcccacggttcggggcttctgcggggctgagacgccggcttcctccttccagatgcccgagcaccgtgtcgggcaggtcagcgcggtcctgactccgtcaagctggttgtccactaaaccccatacctgg

SEQ ID NO: 2369 - DNA, 600 bp, Homo sapiens; identical to SEQ ID NO: 2368

SEQ ID NO: 2370 - DNA, 600 bp, Homo sapiens
gggatgaaaaatcaacccccgacatggaacccatgattcctaaacccggggtaggttccatgccaagtaacagcagagggagttaagccataggaatttggctgtggagtaagagggaatgcggtgaggcagtgtggaatatgaccctaccagaggttggagaacaaacttgggcagccggaacccgtcactattttagattcctggcattcgaggagccctttgaactttccaaagtgcagccacagctacaatgctgttaaatcctcccacatttcttggatgccccttcaccttgtgtggacagtgtctggtttccccattttacagacaggaaaactgagcttcagacagggggtgggctttgcctaaggacacacaaatttggttgggagttgatggggccagatgagccagcattccagctgtttcacccttcagcaacatgcagagtccctgagcccacctcccagccctctcctcattctctgaacccactgtggtgagaagaatttgctccggccaaattggccgttagccacctgggtccacatcctgctaagacgtttaaaacagcctaacaaagacacttgcctgtgg

SEQ ID NO: 2371 - DNA, 1400 bp, Homo sapiens
ttaccagaagaaactgagaagcatgacggacaagtacaggctgcacctgtcagtggccgacctcctctttgtcatcacgcttcccttctgggcagttgatgccgtggcaaactggtactttgggaacttcctatgcaaggcagtccatgtcatctacacagtcaacctctacagcagtgtcctcatcctggccttcatcagtctggaccgctacctggccatcgtccacgccaccaacagtcagaggccaaggaagctgttggctgaaaaggtggtctatgttggcgtctggatccctgccctcctgctgactattcccgacttcatctttgccaacgtcagtgaggcagatgacagatatatctgtgaccgcttctaccccaatgacttgtgggtggttgtgttccagtttcagcacatcatggttggccttatcctgcctggtattgtcatcctgtcctgctattgcattatcatctccaagctgtcacactccaagggccaccagaagcgcaaggccctcaagaccacagtcatcctcatcctggctttcttcgcctgttggctgccttactacattgggatcagcatcgactccttcatcctcctggaaatcatcaagcaagggtgtgagtttgagaacactgtgcacaagtggatttccatcaccgaggccctagctttcttccactgttgtctgaaccccatcctctatgctttccttggagccaaatttaaaacctctgcccagcacgcactcacctctgtgagcagagggtccagcctcaagatcctctccaaaggaaagcgaggtggacattcatctgtttccactgagtctgagtcttcaagttttcactccagctaacacagatgtaaaagacttttttttatacgataaataacttttttttaagttacacatttttcagatataaaagactgaccaatattgtacagtttttattgcttgttggatttttgtcttgtgtttctttagtttttgtgaagtttaattgacttatttatataaattttttttgtttcatattgatgtgtgtctaggcaggacctgtggccaagttcttagttgctgtatgtctcgtggtaggactgtagaaaagggaactgaacattccagagcgtgtagtgaatcacgtaaagctagaaatgatccccagctgtttatgcatagataatctctccattcccgtggaacgtttttcctgttcttaagacgtgattttgctgtagaagatggcacttataaccaaagcccaaagtggtatagaaatgctggtttttcagttttcaggagtgggttgatttcagcacctacagtgtacagtcttgtattaagttgttaataaaagtacatgttaaacttacttagtgttatg

SEQ ID NO: 2372 - DNA, 1400 bp, Homo sapiens; identical to SEQ ID NO: 2371

SEQ ID NO: 2373 - DNA, 600 bp, Homo sapiens
agcactaccgcgagagctgggaggcggcgctcacctgcgcctgcccgggccacgacaccggccagccgcgcgccaagcccgagtactgggtgctcatgctcaagtacttcatgtgcctggtggtgggcatcacgtcgggcgtctggatctggtcgggcaagacggtggagtcgtggcggcgtttcaccagccgctgctgctgccgcccgcggcgcggccacaagagcgggggcgccatggccgcaggggactaccccgaggcgagcgccgcgctcacaggcaggaccgggccgccgggccccgccgccacctaccacaagcaggtgtccctgtcgcacgtgtaggaggctgccgccgagggactcggccggagagctgaggggaggggggcgttttgtttggtagttttgccaaggtcacttccgtttaccttcatggtgctgttgccccctcccgcggcgacttggagagagggaagaggggcgttttcgaggaagaacctgtcccaggtcttctccaaggggcccagctcacgtgtattctattttgcgtttcttacctgccttctttatgggaaccctctttttaatttatatgtat

SEQ ID NO: 2374 - DNA, 1400 bp, Homo sapiens
atttgtggttacgttatcaaatagaatgaattattttcaggttgcaaagacagttgcacagaggctcaacacagatccaatgttgctgcagtttttcaagtctcaaggttatagggatggcccaggtaatcctcttagacataattatgaaggtactttaagagatcttctacagttcttcaagcctagacaacctaagaaactttactatcagcagcttaagatgaaaatcacagactttgagaacaggcgaagttttaaatgtatatggttaaacagccaatttagggaagaggaaataacactatatccagacaagcatgggtgtgtccgggacctgttagaagaatgtaaaaaggccgtggagcttggggagaaagcatcagggaaacttaggctgctagaaattgtaagctacaaaatcattggtgttcatcaagaagatgaactattagaatgtttatctcctgcaacgagccggacgtttcgaatagaggaaatccctttggaccaggtggacatagacaaagagaatgagatgcttgtcacagtggcgcatttccacaaagaggtcttcggaacgttcggaatcccgtttttgctgaggatacaccagggcgagcattttcgagaagtgatgaagcgaatccagagcctgctggacatccaggagaaggagtttgagaagtttaaatttgcaattgtaatgacgggccgacaccagtacataaatgaagacgagtatgaagtaaatttgaaagactttgagccacagcccggtaatatgtctcatcctcggccttggctagggctcgaccacttcaacaaagccccaaagaggagtcgctacacttaccttgaaaaggccattaaaatccataactgatttccaagctggtgtgttcaaggcgaggacggtgtgtgggtggccccttaacagcctagaactttggtgcacgtgccctctagccgaagtcttcagcaagaggattcgctgctggtgttaattttattttattgaggctgttcagtttggcttctctgtatctattgactgccctttttgagcaaaatgaagatgtttttataaagcttggatgccaatgagagttattttatggtaaccacagtgcaaggcaactgtcagcgcaatgggggagaagaggttagtggatcgggggtccctggctcaaggtctctgggctgtccctagtgggcacgagtggctcggctgccttcctggggtcccgtgcaccagccctgcagctagcaagtcttgtgtttaggctcgtctgacctatttccttcagttatactttcaatgaccttttgtgcatctgttaaggcaaaacagagaaactcacaacctaataaatagcgctcttcccttcaaaaaaaaa

SEQ ID NO: 2375 - DNA, 600 bp, Homo sapiens
aaatacggaaacggggtgcctgaaagttccagggcttcactgaagtgctaccagtggttgaaagaaagaattgtaagtgaagaagggagaaaacagcaaaacaagctaaaagacctttccccaattgcggagcgtctgggatgcacactacctcagctagctgttgcgtggtgcctgagaaacgaaggtgtgagttctgtgctcctgggatcatccactcctgaacaactcattgaaaaccttggtgccattcaggttctcccaaagatgacatcacatgtggtaaatgagattgataacatactgcgcaacaagccctacagcaagaaggactatagatcataaggcaatgcatgaaccacagaagctgcatggttaaaatagcggcctgtgcccagtacagaaaggtgttactaaccagtcttttgaatcacttagcagcttgctgctcaacctctagtgtccctccctgggttcatccaggttgttcccagccctttgtccttgtctgttagggcctctttcttccatggggcgtggcaagggaatagcgacttagtgttctaaataataacatggtcatttccggagtacttgcca

SEQ ID NO: 2376 - DNA, 600 bp, Homo sapiens; identical to SEQ ID NO: 2375

SEQ ID NO: 2377 - DNA, 600 bp, Homo sapiens
tactcagataaggtaaaatgccatgatgcctctgtcttctggactggttttcacattagaagacaattgacaacagttacataattcactctgagtgttttatgagaaagccttcttttggggtcaacagttttcctatgctttgaaacagaaaaatatgtaccaagaatcttggtttgccttccagaaaacaaaactgcatttcactttcccggtgttccccactgtatctaggcaacatagtattcatgactatggataaactaaacacgtgacacaaacacacacaaaagggaacccagctctaatacattccaactcgtatagcatgcatctgtttattctatagttattaagttctttaaaatgtaaagccatgctggaaaataatactgctgagatacatacagaattactgtaactgattacacttggtaattgtactaaagccaaacatatatatactattaaaaaggtttacagaattttatggtgcattacgtgggcattgtctttttagatgcccaaatccttagatctggcatgttagcccttcctccaattataagaggatatgaaccaaaaaaaaaaaaaaaaaaa

SEQ ID NO: 2378 - DNA, 600 bp, Homo sapiens; identical to SEQ ID NO: 2377

SEQ ID NO: 2379 - DNA, 1400 bp, Homo sapiens
tcagtagctgtcaagaccacacgatttgcctcattccctgactacctggtcatccagatcaagaagttcaccttcggcttagactgggtgcccaagaaactggatgtgtccatcgagatgccagaggagctcgacatctcccagttgaggggcacagggctgcagcccggagaggaggagctgccagacattgccccacccctggtcactccggatgagcccaaagcgcccatgctggatgaatcagtcatcatccagctggtggagatgggattccctatggacgcctgccgcaaagctgtctactacacggacaacagcggggctgaggccgccatgaactgggtcatgtcacacatggatgatccagattttgcaaaccccctcatcctgcctggctctagtgggccgggctccacaagcgcagcagccgacccccctcctgaggactgtgtgaccaccattgtctccatgggcttctcccgggaccaggccttgaaagcgctgcgggccacgaacaatagtttagaacgggctgtggactggatcttcagtcacattgacgacctggatgctgaagctgccatggacatctcagagggccgctcagctgccgactccatctctgagtctgtgccagtgggacctaaagtccgggatggtcctggaaagtatcagctctttgccttcattagtcacatgggcacctctaccatgtgtggtcactacgtctgccacatcaagaaagaaggcagatgggtgatctacaatgaccagaaagtgtgtgcctccgagaagccgcccaaggacctgggctacatctacttctaccagagagtggccagctaagagcctgcctcaccccttaccaatgagggcaggggaagaccacctggcatgagggagaggggctgagggatggacttcagcccctctgctctgtaccctttttccttttgtccccggcagcagggaagaagctggaggccgtgggagaatggctgggcagagcagaggggcagcgatagactctggggatggagcaggacggggacgggaggggccggccacctgtctgtaaggagactttgttgcttcccctccccccggaatccacagtgctctgcttctctgtgtcgccccgcccagccccctggtgtggagggaggggtctcgtttgtgcgcgtgggtgtagctttgtgcatcctctcccagtggagcgatcacctgtgcctcccctccccctttgtttgcccctgtgtggttggtcaaggagggatgtgagggaaatagggaccccccgacttgccctcctgcctcagtctttcccccaccctgtctcttccttgtccttctctggaaatgccaaaatacacgatgtgaataaaagtacaacggct

SEQ ID NO: 2380 - DNA, 600 bp, Homo sapiens
aaccagcaccgcgtgtgctttgagcactaccccatccaggcatggcagcgcgccatcaactactaccgcttcctggtgggcttcctcttccccatctgcctgctgctggcgtcctaccagggcatcctgcgcgccgtgcgccggagccacggcacccagaagagccgcaaggaccagatccagcggctggtgctcagcaccgtggtcatcttcctggcctgcttcctgccctaccacgtgttgctgctggtgcgcagcgtctgggaggccagctgcgacttcgccaagggcgttttcaacgcctaccacttctccctcctgctcaccagcttcaactgcgtcgccgaccccgtgctctactgcttcgtcagcgagaccacccaccgggacctggcccgcctccgcggggcctgcctggccttcctcacctgctccaggaccggccgggccagggaggcctacccgctgggtgcccccgaggcctccgggaaaagcggggcccagggtgaggagcccgagctgttgaccaagctccacccggccttccagacccctaactcgccagggtcgggcgggttccccacgggcaggttggcctag

SEQ ID NO: 2381 - DNA, 1400 bp, Homo sapiens
tgtcccctccctttctttcctggcttgaggtaggggctcttaaggtacagaactccacaaaccttccaaatctggaggagggcccccatacattacaattcctcccttgctcggcggtggattgcgaaggcccgtcccttcgacttcctgaagctggatttttaactgtccagaactttcctccaacttcatgggggcccacgggtgtgggcgctggcagtctcagcctccctccacggtcaccttcaacgcccagacactcccttctcccaccttagttggttacagggtgagtgagataaccaatgccaaactttttgaagtctaatttttgaggggtgagctcatttcattctctagtgtctaaaacctggtatgggtttggccagcgtcatggaaagatgtggttactgagatttgggaagaagcatgaagctttgtgtgggttggaagagactgaagatatgggttataaaatgttaattctaattgcatacggatgcctggcaaccttgcctttgagaatgagacagcctgcgcttagattttaccggtctgtaaaatggaaatgttgaggtcacctggaaagctttgttaaggagttgatgtttgctttccttaacaagacagcaaaacgtaaacagaaattgaaaacttgaaggatatttcagtgtcatggacttcctcaaaatgaagtgctattttcttatttttaatcaaataactagacatatatcagaaactttaaaatgtaaaagttgtacactttcaacattttattacgattattattcagcagcacattctgaggggggaacaattcacaccaccaataataacctggtaagatttcaggaggtaaagaaggtggaataattgacggggagatagcgcctgaaataaacaaaatatgggcatgcatgctaaagggaaaatgtgtgcaggtctactgcattaaatcctgtgtgctcctcttttggatttacagaaatgtgtcaaatgtaaatctttcaaagccatttaaaaatattcactttagttctctgtgaagaagaggagaaaagcaatcctcctgattgtattgttttaaactttaagaatttatcaaaatgccggtacttaggacctaaatttatctatgtctgtcatacgctaaaatgatattggtctttgaatttggtatacatttattctgttcactatcacaaaatcatctatatttatagaggaatagaagtttatatatatataataccatatttttaatttcacaaataaaaaattcaaagttttgtacaaaattatatggattttgtgcctgaaaataatagagcttgagctgtctgaactattttacattttatggtgtctcatagccaatcccacagtgtaaaaattca

SEQ ID NO: 2382 - DNA, 600 bp, Homo sapiens
tatttaaatcttatccttgtatctttttatacatatttgaaaataagcttatatgtatttgaacttttttgaaatcctattcaagtatttttatcatgctattgtgatattttagcactttggtagcttttacactgaatttctaagaaaattgtaaaatagtcttcttttatactgtaaaaaaagatataccaaaaagtcttataataggaatttaactttaaaaacccacttattgataccttaccatctaaaatgtgtgatttttatagtctcgttttaggaatttcacagatctaaattatgtaactgaaataaggtgcttactcaaagagtgtccactattgattgtattatgctgctcactgatccttctgcatatttaaaataaaatgtcctaaagggttagtagacaaaatgttagtcttttgtatattaggccaagtgcaattgacttcccttttttaatgtttcatgaccacccattgattgtattataaccacttacagttgcttatattttttgttttaacttttgtttcttaacatttagaatattacattttgtattatacagtacctttctcagacattttgtag

SEQ ID NO: 2383 - DNA, 600 bp, Homo sapiens; identical to SEQ ID NO: 2382

SEQ ID NO: 2384 - DNA, 1400 bp, Homo sapiens
taatgtgaggatgcaaaagaaatgatgataacattttgagataaggccaaggagacgtggagtaggtatttttgctactttttcattttctggggaaggcaggaggcagaaagacgggtgttttatttggtctaataccctgaaaagaagtgatgacttgttgcttttcaaaacaggaatgcatttttccccttgtctttgttgtaagagacaaaagaggaaacaaaagtgtctccctgtggaaaggcataactgtgacgaaagcaacttttataggcaaagcagcgcaaatctgaggtttcccgttggttgttaatttggttgagataaacattcctttttaaggaaaagtgaagagcagtgtgctgtcacacaccgttaagccagaggttctgacttcgctaaaggaaatgtaagaggttttgttgtctgttttaaataaatttaattcggaacacatgatccaacagactatgttaaaatattcagggaaatctctcccttcatttactttttcttgctataagcctatatttaggtttcttttctatttttttctcccatttggatcctttgaggtaaaaaaacataatgtcttcagcctcataataaaggaaagttaattaaaaaaaaaaagcaaagagccattttgtcctgttttcttggttccatcaatctgtttattaaacatcatccatatgctgaccctgtctctgtgtggttgggttgggaggcgatcagcagataccatagtgaacgaagaggaaggtttgaaccatgggccccatctttaaagaaagtcattaaaagaaggtaaacttcaaagtgattctggagttctttgaaatgtgctggaagacttaaatttattaatcttaaatcatgtactttttttctgtaatagaactcggattcttttgcatgatggggtaaagcttagcagagaatcatgggagctaacctttatcccacctttgacactaccctccaatcttgcaacactatcctgtttctcagaacagtttttaaatgccaatcatagagggtactgtaaagtgtacaagttactttatatatgtaatgttcacttgagtggaactgctttttacattaaagttaaaatcgatcttgtgtttcttcaaccttcaaaactatctcatctgtcagatttttaaaactccaacacaggttttggcatcttttgtgctgtatcttttaagtgcatgtgaaatttgtaaaatagagataagtacagtatgtatattttgtaaatctcccatttttgtaagaaaatatatattgtatttatacatttttactttggatttttgttttgttggctttaaaggtctaccccactttatcacatgtacagatcacaaataaatttttttaaatac

SEQ ID NO: 2385 - DNA, 1400 bp, Homo sapiens
ttgctggagccccaccgcttccagtaccccgagcgccccatcatcttcctctccatgtgctacaacgtctactcgctggccttcctgatccgtgcggtggccggagcgcagagcgtggcctgtgaccaggaggcgggcgcgctctacgtgatccaggagggcctggagaacacgggctgcacgctggtcttcctactgctctactacttcggcatggccagctcgctctggtgggtggtcctgacgctcacctggttcctggctgccgggaagaaatggggccacgaggccatcgaggcccacggcagctatttccacatggctgcctggggcctgcccgcgctcaagaccatcgtcatcctgaccctgcgcaaggtggcgggtgatgagctgactgggctttgctacgtggccagcacggatgcagcagcgctcacgggcttcgtgctggtgcccctctctggctacctggtgctgggcagtagtttcctcctgaccggcttcgtggccctcttccacatccgcaagatcatgaagacgggcggcaccaacacagagaagctggagaagctcatggtcaagatcggggtcttctccatcctctacacggtgcccgccacctgcgtcatcgtttgctatgtctacgaacgcctcaacatggacttctggcgccttcgggccacagagcagccatgcgcagcggccgcggggcccggaggccggagggactgctcgctgccagggggctcggtgcccaccgtggcggtcttcatgctcaaaattttcatgtcactggtggtggggatcaccagcggcgtctgggtgtggagctccaagactttccagacctggcagagcctgtgctaccgcaagatagcagctggccgggcccgggccaaggcctgccgcgcccccgggagctacggacgtggcacgcactgccactataaggctcccaccgtggtcttgcacatgactaagacggacccctctttggagaaccccacacacctctagccacacaggcctggcgcggggtggctgctgccccctccttgccctccacgccctgccccctgcatcccctagagacagctgactagcagctgcccagctgtcaaggtcaggcaagtgagcaccggggactgaggatcagggcgggaccccgtgaggctcattaggggagatgggggtctcccctaatgcgggggctggaccaggctgagtccccacagggtcctagtggaggatgtggaggggcggggcagaggggtccagccggagtttatttaatgatgtaatttattgttgcgttcctctggaagctgtgactggaataaacccccgcgtggcactgctgatcctctctggctgggaagggggaaggtaggaggtgaggc

SEQ ID NO: 2386 - DNA, 1157 bp, Homo sapiens
tcccaggtgcccgtctgatggggagatggctgatgcccagaacatttcactggacagcccagggagtgtgggggccgtggcagtgcctgtggtctttgccctaatcttcctgctgggcacagtgggcaatgggctggtgctggcagtgctcctgcagcctggcccgagtgcctggcaggagcctggcagcaccacggacctgttcatcctcaacctggcggtggctgacctctgcttcatcctgtgctgcgtgcccttccaggccaccatctacacgctggatgcctggctctttggggccctcgtctgcaaggccgtgcacctgctcatctacctcaccatgtacgccagcagctttacgctggctgctgtctccgtggacaggtacctggccgtgcggcacccgctgcgctcgcgcgccctgcgcacgccgcgtaacgcccgcgccgcagtggggctggtgtggctgctggcggcgctcttctcggcgccctacctcagctactacggcaccgtgcgctacggcgcgctggagctctgcgtgcccgcctgggaggacgcgcgccgccgcgccctggacgtggccaccttcgctgccggctacctgctgcccgtggctgtggtgagcctggcctacgggcgcacgctgcgcttcctgtgggccgccgtgggtcccgcgggcgcggcggcggccgaggcgcggcggagggcgacgggccgcgcggggcgcgccatgctggcggtggccgcgctctacgcgctctgctggggtccgcaccacgcgctcatcctgtgcttctggtacggccgcttcgccttcagcccggccacctacgcctgccgcctggcctcacactgcctggcctacgccaactcctgcctcaacccgctcgtctacgcgctcgcctcgcgccacttccgcgcgcgcttccgccgcctgtggccgtgcggccgccgacgccgccaccgtgcccgccgcgccttgcgtcgcgtccgccccgcgtcctcgggcccacccggctgccccggagacgcccggcctagcgggaggctgctggctggtggcggccagggcccggagcccagggagggacccgtccacggcggagaggctgcccgaggaccggaataaaccctgccgcctggactccgcctgt

SEQ ID NO: 2387 - DNA, 600 bp, Homo sapiens
tgacaacaaatggcaagatctgtttttgctttgtgttgtggtaaaaaattgtgtaccccctgctgcttttgagaaatttgtgaacattttcagaggcctcagtgtagtggaagtgataatccttaaatgaacattttctaccctaatttcactggagtgacttattctaagcctcatctatcccctacctatttctcaaaatcattctatgctgattttacaaaagatcatttttacatttgaactgagaaccccttttaattgaatcagtggtgtctgaaatcatattaaatacccacatttgacataaatgcggtaccctttactacactcatgagtggcatatttatgcttaggtcttttcaaaagacttgacaagaaatcttcatattctctgtagcctttgtcaagtgaggaaatcagtggttaaagaattccactataaacttttaggcctgaataggagtagtaaagcctcaaggacatctgcctgtcacaatatattctcaaagtgatctgatatttggaaacaagtatccttgttgagtaccaagtgctacagaaaccataagataaaaatactttctacctacagcgtgc

SEQ ID NO: 2388 - DNA, 600 bp, Homo sapiens; identical to SEQ ID NO: 2387

SEQ ID NO: 2389 - DNA, 600 bp, Homo sapiens
ccgtgcagcttgggccggagggcaagggatgccagtaagtctgcaggtgcggggtgccacctacaggcccaggcctgtgtcccaagcagtacccaggctttgcagaccacgcggggcagggctccactgaagccacccccacccctcgccagctagctccatagggaagcctgtgtctcctgcccccagggcgcaccctcagtgcaggcacctctgttcccgctttgcccctggaggagccactattccagaaggctccaccctgccgtcctgcgggagactgctgtccagtcctggccgggccaaggcctgggaaactgtgaaagtcagaaaggccagcggggagagcctggggcgaggggaggagggggatcagcttctgctattaccgaccccacttcatgctgcacctggcgcctagaactcttgcccctcctcatagaccaagtcccgggggtctccactcagtcctgctgcctgcttcaccagaagcagccctgtgagtgtggggtggggaagtcccttcccaacggaggtcccagcctatgccctgggcccaggtgggggtcgcctgcttccttcccggacagggtcctgcag

SEQ ID NO: 2390 - DNA, 600 bp, Homo sapiens
gtggagacggtgcaccggggcatcaaaggtgtggtgacagataaattcggcaagccagtcaaaaacgcccggatctcagtcaaaggcattcgccacgacatcaccacagccccagatggtgactactggagactgctgcccccaggtatccacattgtcattgcccaagcccctggctacgccaaagtcatcaagaaagtcatcatccccgcccggatgaagagggctggccgtgtggacttcattctgcaacctctggggatgggacccaagaactttattcatgggctgcggaggactgggccccacgacccgctgggaggtgccagctctttgggggaggccacggagcccgacccgctccgggcgcgcaggcagccctcggccgacgggagtaagccctggtggtggtcctacttcacatcgctgagcacccacaggccacgctggctgctcaagtactagccccggccccagcacccgccaggatgtggagaccgaggcccatctccgcatcccgggctcctggctcttgattttgtctgccacagacatcccacaaagccgctgccattttattaaagtgttttgatccacaaa

SEQ ID NO: 2391 - DNA, 600 bp, Homo sapiens; identical to SEQ ID NO: 2390

SEQ ID NO: 2392 - DNA, 600 bp, Homo sapiens
tcccctctctgcctgcctttgccttttggggagcccagcaccatgggctacatggtcgctctcatcttgctcaattccctttgcttcctcatgatgaccattgcctacaccaagctctactgcaatttggacaagggagacctggagaatatttgggactgctctatggtaaaacacattgccctgttgctcttcaccaactgcatcctaaactgccctgtggctttcttgtccttctcctctttaataaaccttacatttatcagtcctgaagtaattaagtttatccttctggtggtagtcccacttcctgcatgtctcaatccccttctctacatcttgttcaatcctcactttaaggaggatctggtgagcctgagaaagcaaacctacgtctggacaagatcaaaacacccaagcttgatgtcaattaactctgatgatgtcgaaaaacagtcctgtgactcaactcaagccttggtaacctttaccagctccagcatcacttatgacctgcctcccagttccgtgccatcaccagcttatccagtgactgagagctgccatctttcctctgtggcatttgtcccatgtctctaa

SEQ ID NO: 2393 - DNA, 600 bp, Homo sapiens; identical to SEQ ID NO: 2392

SEQ ID NO: 2394 - DNA, 600 bp, Homo sapiens
atggccatctgctatcttctccacaacccagtcattgtcagtggccggctgtgtgtgcagatggctgctggctcttgggctggaggttttggcatctccatggtcaaagtttttcttatttcgggcctctctaacggtggccccaacatcatcaaccactttttctgtgatgtctctccattgctcaacctctcatgcactgatatgtccacagcagagcttacagatttcatcctggccatttttattcttctagggccactctctgtcactggggcctcctatgtggccattactggtgctgtgatgcacattccttcggctgctggacggtataaggccttttccacctgtgcctctcatttcaatgttgtgataattttttatgcagccagtatcttcatttatgctcggccaaaggcactttcagcttttgacaccaacaagttggtctctgtactgtatgctgtcattgtaccattgctcaatcccatcatttactgcctgcgcaatcaagaggtcaagagagccctatgctgtattttgcacctgtaccagcaccaggatcctgaccccaagaaaggtagcagaaatgtatag

SEQ ID NO: 2395 - DNA, 1400 bp, Homo sapiens
gacaggtgggcaggactgaccctgaggaggccttgcctgcagggtctttgtctcaccatttggtggagtatcacacggttctctgaggtctggggcctcagctgtttaagtttaccggtattactgagctcggcatttggagagggagctctgaagtgtctggggaggtaccgctgtgcgtggggtcaggtgtttccgtaccacagcaggagcagggcccgcccgcatcccagctgtgggcctgccggtcaggtcgggcacctactacaaaccgtagtggggtggaggctgctggaggtgggagtgaggagatgagggcagggtctcaaacagtcctgactcacagggcctggaaacaagtcctatgtgggcctggggcctggggtcctcatcctccttgttggtctactcaggcccagcccagagctgtgttccctgtctcaggtcaagcagtggcagacgcaaggctttctgtgggcccccaagtggtaggagggagagtagcagagcatgggttactggaagccgggactgctagggctggtggccagggagctgcaagagtgaggctcagctctggctggttctgcccttacccctcctgcccgcctgagaactgcacaccctgcccgctggccccaggacctgcactcccaatcctgctgtcttctccttccctgtgccctgaacaaggacctcactgcccgccttcccctcccaccagccccctggggctggcccactgtgtcctgaatgtttttgttattttttgttttattttttaaacaaactgctgtttttatatacctggaatctgttgttggcttcagagccagtggttaaagagcagggtcccaaggattgggagatctagtgtctgccctcctgccctgcaactcaattgggcctttttcggtgacctcatccaaggccatgatgtcaagggccatgtccccaagcagaggtggagaaggggacactgaggtgagcaaaagcaggaaggggcatccactgcgggtgactggaggccgggcaggaagcaagtcatcagagccgctcagctccgttcactctctgccttctgccccactactgtggggcagtggggccagagcccacctccccaacatgtgaagacagtgatgggcacgtgcccacacccccacttctctagccgtttgcagaggccgccacccagcacgggcctgaaaaggagcagcctcgtatttttctgtgaaatgttttaatgaaccatgttgttgctggttgtcctggcatcccgcacactgtatgtacatactggcaacgatgtcaaatgtaatttattttaacatttttacaataaaacatgaggtggacaggcaaaaaaaaaaaaaaaaaaaaaaaaaaaaaaaaaaaaa

SEQ ID NO: 2396 - DNA, 600 bp, Homo sapiens
cagagccgtgctcagcttcctctgctgcgggtgtctccggctgggcatgcgagggcccggggactgcctggcccgggccgtcgaggctcactccggagcttccaccaccgacagctctctgaggccaagggacagctttcgcggctcccgctcgctcagctttcggatgcgggagcccctgtccagcatctccagcgtgcggagcatctgaagttgcagtcttgcgtgtggatggtgcagccaccgggtgcgtgccaggcaggccctcctggggtacaggaagctgtgtgcacgcagcctcgcctgtatggggagcagggaacgggacaggcccccatggtcttcccggtggcctctcggggcttctgacgccaaatgggcttcccatggtcaccctggacaaggaggtaaccaccccacctccccgtaggagcagagagcaccctggtgtgggggcgagtggttccccacaaccccgcttctgtgtgattctggggaagtcccggcccctctctgggcctcagtagggctcccaggctgcaaggggtggactgtgggatgcatgccctggcaacattgaagttcgatcatggtaaaaaa

SEQ ID NO: 2397 - DNA, 600 bp, Homo sapiens; identical to SEQ ID NO: 2396

SEQ ID NO: 2398 - DNA, 1400 bp, Homo sapiens
ttaaagcaggaaacagcagttgttgaaaacgtccccattttgggactttatcagattccagctgagggtggaggccggattgtactgtatggggactccaattgcttggatgacagtcaccgacagaaggactgcttttggcttctggatgccctcctccagtacacatcgtatggggtgacaccgcctagcctcagtcactctgggaaccgccagcgccctcccagtggagcaggctcagtcactccagagaggatggaaggaaaccatcttcatcggtactccaaggttctggaggcccatttgggagacccaaaacctcggcctctaccagcctgtccacgcttgtcttgggccaagccacagcctttaaacgagacggcgcccagtaacctttggaaacatcagaagctactctccattgacctggacaaggtggtgttacccaactttcgatcgaatcgccctcaagtgaggcccttgtcccctggagagagcggcgcctgggacattcctggagggatcatgcctggccgctacaaccaggaggtgggccagaccattcctgtctttgccttcctgggagccatggtggtcctggccttctttgtggtacaaatcaacaaggccaagagcaggccgaagcggaggaagcccagggtgaagcgcccgcagctcatgcagcaggttcacccgccaaagaccccttcggtgtgaccggcagcctggctgaccgtgagggccagagagagccttcacggacggcgctggtgggtgagccgagctgtggtggcggctggtttaaaagggatccagtttccagctgcaggtttgttagagtctgttctacatgggcctgccctcctgtgatgggcagaggctcctggtacatcgagaagattcctgtggatcccgtcaggagggacttagtggctctgccgccagtgagacttcccgccggcagctgtgcgcaccaaagactcgggagaactggaaaggctgtctggggtcttctgactgcaggggaaggatgtactttccaaacaaatgatacaaccctgaccaagctaaaagacgcttgttaaaggctattttctatatttattgttgggaaaagtcactttaaagacttgtgctatttggaagcaaagctattttttttgtcagtggaatgcagtttttttactattccatcatgaggaacaacatagattccatgatctttttaatgacagtacagactgagatttgaaggaaacatgcacaaatctgtaaaacatagaccttcgctttatttttgtaagtatcacctgccaccatgttttgtaatttgaggtcttgatttcaccattgtcggtgaagaaaattttcaataaatatgtattacccgtctgaagctt

SEQ ID NO: 2399 - DNA, 1400 bp, Homo sapiens; identical to SEQ ID NO: 2398

SEQ ID NO: 2400 - DNA, 1400 bp, Homo sapiens
gcttcaatcttcaagaactttgtcattacctataaccggacatatgagtcaaaggaagaagcccggtggcgcctgtccgtctttgtcaataacatggtgcgagcacagaagatccaggccctggaccgtggcacagctcagtatggagtcaccaagttcagtgatctcacagaggaggagttccgcactatctacctgaatactctcctgagaaaagagcctggcaacaagatgaagcaagccaagtctgtgggtgacctcgccccacctgaatgggactggaggagtaagggggctgtcacaaaagtcaaagaccagggcatgtgtggctcctgctgggccttctcagtcacaggcaatgtggagggccagtggtttctcaaccaggggaccctgctctccctctctgaacaggagctcttggactgtgacaagatggacaaggcctgcatgggcggcttgccctccaatgcctactcggccataaagaatttgggagggctggagacagaggatgactacagctaccagggtcacatgcagtcctgcaacttctcagcagagaaggccaaggtctacatcaatgactccgtggagctgagccagaacgagcagaagctggcagcctggctggccaagagaggcccaatctccgtggccatcaatgcctttggcatgcagttttaccgccacgggatctcccgccctctccggcccctctgcagcccttggctcattgaccatgcggtgttgcttgtgggctacggcaaccgctctgacgttcccttttgggccatcaagaacagctggggcactgactggggtgagaagggttactactacttgcatcgcgggtccggggcctgtggcgtgaacaccatggccagctcggcggtggtggactgaagaggggcccccagctcgggacctggtgctgatcagagtggctgctgccccagcctgacatgtgtccaggcccctccccgggaggtacagctggcagagggaaaggcactgggtacctcagggtgagcagagggcactgggctggggcacagcccctgcttccctgcaccccattcccaccctgaagttctgcacctgcacctttgttgaattgtggtagcttaggaggatgtcggggtgaagggtggtatcttggcagttgaagctggggcaagaactctgggcttgggtaatgagcaggaagaaaattttctgatcttaagcccagctctgttctgcccccgctttcctctgtttgatactataaattttctggttcccttggatttagggatagtgtccctctccatgtccaggaaacttgtaaccacccttttctaacagcaataaagaggtgtccttgtaaaaaaaaaaaaaaaaaaaaaaaaaaaaaa

SEQ ID NO: 2401 - DNA, 1400 bp, Homo sapiens
ttggagtatagagactttttacagagaggaggtggagcctgccttttcaacaggccaacaaagctatttgagcccacggaatgtggaaatggatacgtggaagctggggaggagtgtgattgtggttttcatgtggaatgctatggattatgctgtaagaaatgttccctctccaacggggctcactgcagcgacgggccctgctgtaacaatacctcatgtctttttcagccacgagggtatgaatgccgggatgctgtgaacgagtgtgatattactgaatattgtactggagactctggtcagtgcccaccaaatcttcataagcaagacggatatgcatgcaatcaaaatcagggccgctgctacaatggcgagtgcaagaccagagacaaccagtgtcagtacatctggggaacaaaggctgcagggtctgacaagttctgctatgaaaagctgaatacagaaggcactgagaagggaaactgcgggaaggatggagaccggtggattcagtgcagcaaacatgatgtgttctgtggattcttactctgtaccaatcttactcgagctccacgtattggtcaacttcagggtgagatcattccaacttccttctaccatcaaggccgggtgattgactgcagtggtgcccatgtagttttagatgatgatacggatgtgggctatgtagaagatggaacgccatgtggcccgtctatgatgtgtttagatcggaagtgcctacaaattcaagccctaaatatgagcagctgtccactcgattccaagggtaaagtctgttcgggccatggggtgtgtagtaatgaagccacctgcatttgtgatttcacctgggcagggacagattgcagtatccgggatccagttaggaaccttcacccccccaaggatgaaggacccaagggtcctagtgccaccaatctcataataggctccatcgctggtgccatcctggtagcagctattgtccttgggggcacaggctggggatttaaaaatgtcaagaagagaaggttcgatcctactcagcaaggccccatctgaatcagctgcgctggatggacaccgccttgcactgttggattctgggtatgacatactcgcagcagtgttactggaactattaagtttgtaaacaaaacctttgggtggtaatgactacggagctaaagttggggtgacaaggatggggtaaaagaaaactgtctcttttggaaataatgtcaaagaacacctttcaccacctgtcagtaaacgggggagggggcaaaagaccatgctataaaaagaactgttccagaatctttttttttccctaatggacgaaggaacaacacacacacaaaaattaaatgcaataaaggaatcattaaaaa

SEQ ID NO: 2402 - DNA, 1400 bp, Homo sapiens
ccaacactgtggcccatgagttaggtcatacgttgggtatgcagcatgatgaagaattctgtttttgtggggaaagaggttgcatcatgaatacttttagagtgccagcagagaaattcaccaattgcagttacgctgattttatgaagaccaccttaaaccagggatcatgtctgcataatcctccaagattgggggaaatctttatgctaaagcgctgtgggaatggtgtggttgaaagagaagagcagtgtgactgtggatccgtacagcagtgtgaacaagacgcctgttgtctgttgaactgcactctaaggcctggggctgcctgtgcttttgggctttgttgcaaagactgcaagttcatgccatcaggggaactctgtagacaagaggtcaatgaatgtgaccttccagaatggtgcaatggaacatctcatcagtgtccagaagatagatatgtgcaggacgggatcccctgtagtgacagtgcctactgctatcaaaagaggtgtaataaccatgaccagcattgcagggagatttttggtaaagatgcaaaaagtgcatctcagaattgctataaagaaatcaactctcagggaaaccgttttggtcactgtggtataaatggcacaacatacctaaaatgtcatatctctgatgtcttttgtgggagagttcaatgtgagaatgtgagagacattcctcttctccaagatcattttactttgcagcacactcatatcaatggtgtcacctgctggggtattgactatcatttaaggatgaacatatctgacattggtgaagtgaaagatggtactgtgtgtggcccaggaaagatctgcatccataagaagtgtgtcagtctgtctgtcttgtcacatgtctgccttcctgagacctgcaatatgaaggggatctgcaataacaaacatcactgccactgtggctatgggtggtccccaccctactgccagcacagaggctatgggggcagtattgacagtggcccagcatctgcaaagagaggagtttttttgccgctgattgtgattccttctttgtctgttttgactttcctgtttactgtcgggcttcttatgtatctacgacaatgttctggtcccaaagaaactaaggctcattcatcaggttaagaaaatgtctctaacttaatattccatgcattagtacactttagtctcttggcagtagaaacattagtacatccctgaaactgagcacatttctgaccatttccagaaagctgcaaagatcttcccttacattagtaccacaaacattgtcattaagttcaagttattcttaacatgtttctatctattgtttattgttttaagcagcaaataaagctacatccttccctcccttta

SEQ ID NO: 2403 - DNA, 600 bp, Homo sapiens
gctatacctgatattggtgaggtgaaagatggcacagtatgtggtccagaaaagatctgcatccgtaagaagtgtgccagtatggttcatctgtcacaagcctgtcagcctaagacctgcaacatgaggggaatctgcaacaacaaacaacactgtcactgcaaccatgaatgggcacccccatactgcaaggacaaaggctatggaggtagtgctgatagtggcccacctcctaagaacaacatggaaggattaaatgtgatgggaaagttgcgttacctgtcactattgtgccttcttcctttggttgcttttttattattttgcttacatgtgctttttaagaaacgcacaaaaagtaaagaagatgaagaaggataagagaaatgggaaaaagaaggagactaaactttatacttcatttttaatatccaattttttaatagaaaaatatgaagccatgtctcactgtttaaataaaacttcatggacatttcatgtcaggattgcaagcattagctatcacagcaaaggattcctagcctattcttacttactctacagtgtcttaagcaatattaaaggttccttttcccagaa

SEQ ID NO: 2404 - DNA, 600 bp, Homo sapiens; identical to SEQ ID NO: 2403

SEQ ID NO: 2405 - DNA, 1400 bp, Homo sapiens
atccctgctgtgattctttgacctgccagctgaggccaggtgcacagtgtgcatctgacggaccctgttgtcaaaattgccagctgcgcccgtctggctggcagtgtcgtcctaccagaggggattgtgacttgcctgaattctgcccaggagacagctcccagtgtccccctgatgtcagcctaggggatggcgagccctgcgctggcgggcaagctgtgtgcatgcacgggcgttgtgcctcctatgcccagcagtgccagtcactttggggacctggagcccagcccgctgcgccactttgcctccagacagctaatactcggggaaatgcttttgggagctgtgggcgcaaccccagtggcagttatgtgtcctgcacccctagagatgccatttgtgggcagctccagtgccagacaggtaggacccagcctctgctgggctccatccgggatctactctgggagacaatagatgtgaatgggactgagctgaactgcagctgggtgcacctggacctgggcagtgatgtggcccagcccctcctgactctgcctggcacagcctgtggccctggcctggtgtgtatagaccatcgatgccagcgtgtggatctcctgggggcacaggaatgtcgaagcaaatgccatggacatggggtctgtgacagcaacaggcactgctactgtgaggagggctgggcaccccctgactgcaccactcagctcaaagcaaccagctccctgaccacagggctgctcctcagcctcctggtcttattggtcctggtgatgcttggtgccggctactggtaccgtgcccgcctgcaccagcgactctgccagctcaagggacccacctgccagtacagggcagcccaatctggtccctctgaacggccaggacctccgcagagggccctgctggcacgaggcactaagtctcaggggccagccaagcccccacccccaaggaagccactgcctgccgacccccagggccggtgcccatcgggtgacctgcccggcccaggggctggaatcccgcccctagtggtaccctccagaccagcgccaccgcctccgacagtgtcctcgctctacctctgacctctccggaggttccgctgcctccaagccggacttagggcttcaagaggcgggcgtgccctctggagtcccctaccatgactgaaggcgccagagactggcggtgtcttaagactccgggcaccgccacgcgctgtcaagcaacactctgcggacctgccggcgtagttgcagcgggggcttggggaggggctgggggttggacgggattgaggaaggtccgcacagcctgtctctgctcagttgcaataaacgtgacatcttgggagcgttaaaaaaaaaaaaaaa

SEQ ID NO: 2406 - DNA, 1400 bp, Homo sapiens
agtatcatctcagggaaacttaattcctgcccgtcctgctcctgcacctcctttatatagttccctcacttgatttttttaaccttctttttgcaaatgtcttcagggaactgagctaatactttttttttttcttgatgttttcttgaaaagcctttctgttgcaactatgaatgaaaacaaaacaccacaaaacagacttcactaacacagaaaaacagaaactgagtgtgagagttgtgaaatacaaggaaatgcagtaaagccagggaatttacaataacatttccgtttccatcattgaataagtcttattcagtcatcggtgaggttaatgcactaatcatggattttttgaacatgttattgcagtgattctcaaattaactgtattggtgtaagatttttgtcattaagtgtttaagtgttattctgaattttctaccttagttatcattaatgtagttcctcattgaacatgtgataatctaatacctgtgaaaactgactaatcagctgccaataatatctaatatttttcatcatgcacgaattaataatcatcatactctagaatcttgtctgtcactcactacatgaataagcaaatattgtcttcaaaagaatgcacaagaaccacaattaagatgtcatattattttgaaagtacaaaatatactaaaagagtgtgtgtgtattcacgcagttactcgcttccatttttatgacctttcaactataggtaataactcttagagaaattaatttaatattagaatttctattatgaatcatgtgaaagcatgacattcgttcacaatagcactattttaaataaattataagctttaaggtacgaagtatttaatagatctaatcaaatatgttgattcatggctataataaagcaggagcaattataaaatcttcaatcaattgaacttttacaaaaccacttgagaatttcatgagcactttaaaatctgaactttcaaagcttgctattaaatcatttagaatgtttacatttactaaggtgtgctgggtcatgtaaaatattagacactaatattttcatagaaattaggctggagaaagaaggaagaaatggttttcttaaatacctacaaaaaagttactgtggtatctatgagttatcatcttagctgtgttaaaaatgaatttttactatggcagatatggtatggatcgtaaaattttaagcactaaaaattttttcataacctttcataataaagtttaataataggtttattaactgaatttcattagttttttaaaagtgtttttggtttgtgtatatatacatatacaaatacaacatttacaataaataaaatacttgaaattctcaaaaaaaaaaaaaaaaaaaaaaaaaa

SEQ ID NO: 2407 - DNA, 1400 bp, Homo sapiens; identical to SEQ ID NO: 2406

SEQ ID NO: 2408 - DNA, 600 bp, Homo sapiens
gatctccactatgaagaaatttaggaactaatcttgttaattaggcttatacagcgggggatttgagcttacaggattcctccatggtaaagctgaactgaaacaattctcaagaatgcatcagctgtacctacaatagcccctccctcttcctttgaaggcccgagcacctctgccctgtggtcaccgaatctgtactaaggacctgtgttcagccacaccagtggtagctccaccaaatcatgaacagcctaatttgagtgtctgtgtcttagacctgcaaacagctaataggaaattctattaatatgttagcttgccattttaaatatgttctgagggttgttttgtctcgtgttcatgatgttaagaaaatgcaggcagtatccctcatcttatgtaagtgtgaattaatattaagggaaatgactacaaactttcaaagcaaatgctccatagctaaagcaacttagaccttatttctgctactgttgctgaaatgtggctttggcattgttggatttcataaaaaatttctggcaggaagtcttgttagtatacatcagtctttttcatcatccaagtttgtagttcatttaa

SEQ ID NO: 2409 - DNA, 600 bp, Homo sapiens
gtccagcacagaaggaatctgtgcagatgagcagtcacactgttactccacagcggaggagaccagctcagaggcccaggaatcggagcgaagcagagaggtggagaactgggatttgaacccccgccatccttcaccagagcccatgctcaaccactgtggcgttctgctgcccctgcagttggcagaaaggatgttttgtcccatttccttggaggccaccgggacagacctggacactagggtcaggcggggtgctgtggtggggagaggcatggctggggtgggggtggggagacctggttggccgtggtccagctcttggcccctgtgtgagttgagtctcctctctgagactgctaagtaggggcagtgatggttgccaggacgaattgagataatatctgtgaggtgctgatgagtgattgacacacagcactctctaaatcttccttgtgaggattatgggtcctgcaattctacagtttcttactgttttgtatcaaaatcactatctttctgataacagaattgccaaggcagcgggatctcgtatctttaaaaagcagtcctcttattcctaaggtaatcctattaaaa

SEQ ID NO: 2410 - DNA, 600 bp, Homo sapiens; identical to SEQ ID NO: 2409

SEQ ID NO: 2411 - DNA, 600 bp, Homo sapiens
ctgcaccctctatgggatctcctggcagtttgacccttgctgcaagtaccaagtggagtacgacgcctataaactgtcgcgcctgcctctgcacacactcacctcctccaccccggtggtgctggtccggaaggacgacctgcacagaaagagactgcacaacacgatagcactggccgccctggtgtactgtgtaaagaagatttacgaactctatgccgtatgatttcagtagaacagggagcgaagcaaaaccacccggcccacaagagacaacagagtattcagatcgccacactctgtgaggcagcagagcctgggcaggtgtttggcttagtatttgttatttttaaaaaataacagatcacgggtgtacccagggtttttcagctcattacactaagatgtggatttccataacccaagaggggggtctgaggctgtggaagtccgactgggcagtggaatgctgatggaggcagacgctgccgagggggtgtggacgtgctttgggggaggtctttaagtctattgtttaactgtaccatccagagcccaccagaagctattgatcattaaaattatgagaatttcaactcc

SEQ ID NO: 2412 - DNA, 1280 bp, Homo sapiens
tgccgcagcccccgcccgcccgcagagcttttgaaaggcggcgggaggcggcgagcgccatggccagtccgggctgcctgctgtgcgtgctgggcctgctactctgcggggcggcgagcctcgagctgtctagaccccacggcgacaccgccaagaagcccatcatcggaatattaatgcaaaaatgccgtaataaagtcatgaaaaactatggaagatactatattgctgcgtcctatgtaaagtacttggagtctgcaggtgcgagagttgtaccagtaaggctggatcttacagagaaagactatgaaatacttttcaaatctattaatggaatccttttccctggaggaagtgttgacctcagacgctcagattatgctaaagtggccaaaatattttataacttgtccatacagagttttgatgatggagactattttcctgtgtggggcacatgccttggatttgaagagctttcactgctgattagtggagagtgcttattaactgccacagatactgttgacgtggcaatgccgctgaacttcactggaggtcaattgcacagcagaatgttccagaattttcctactgagttgttgctgtcattagcagtagaacctctgactgccaatttccataagtggagcctctccgtgaagaattttacaatgaatgaaaagttaaagaagtttttcaatgtcttaactacaaatacagatggcaagattgagtttatttcaacaatggaaggatataagtatccagtatatggtgtccagtggcatccagagaaagcaccttatgagtggaagaatttggatggcatttcccatgcacctaatgctgtgaaaaccgcattttatttagcagagttttttgttaatgaagctcggaaaaacaaccatcattttaaatctgaatctgaagaggagaaagcattgatttatcagttcagtccaatttatactggaaatatttcttcatttcagcaatgttacatatttgattgaaagtcttcaatttgttaacagagcaaatttgaataattccatgattaaactgttagaataacttgctactcatggcaagattaggaagtcacagattcttttctataatgtgcctggctctgattcttcattatgtatgtgactatttatataacattagataattaaatagtgagacataaatagagtgctttttcatggaaaagccttcttatatctgaagattgaaaaataaatttactgaaatacaaaaaaaaaaaaaaa

SEQ ID NO: 2413 - DNA, 600 bp, Homo sapiens
gcgccgaggtggccttcaactggatcattgttcacatggaagagccagattttgctgagccgctgaccatgcctggttatggaggggcagcttctgctggagcctctgtttttggtgcttctggactggataaccaacctccagaggaaatcgtagctatcatcacctccatgggatttcagcgaaatcaggctattcaggcactacgagcaacgaataataacctggaaagagcactggattggatctttagccaccctgagtttgaagaagacagtgattttgtgattgagatggagaataatgccaatgcaaacattatttctgaggccaagcccgaaggacctagagtcaaggatggatctggaacatatgagctatttgcattcatcagtcacatgggaacatccacaatgagtggtcattacatttgccatatcaaaaaggaaggaagatgggtgatttacaatgaccacaaagtttgtgcctcagaaaggccccctaaagacctgggctacatgtacttttaccgcaggataccaagctaaacctcaaatataaaaattggcgaaaagaagccatacgcctttttaatttgcc

SEQ ID NO: 2414 - DNA, 600 bp, Homo sapiens
gagacagagtctcgcgctgttgcccaggctggagtgcagtggcgtgatctcggctcactgcaagctcggcctcctgggttcaaatgattctcctgcctcagcctcccaagtagctgggataacaggcgcccaccaccgcaccctgctaattttttgtatttttgatcaagacggagtttcaccatgttggccaggctggtctccaactcctgccctcaagtgatccgcctcggtcccattttttattctttgggtccttccatcccactgggaaaacgtctcaggtggcctctgaaacaccactcctttttgtgtgtgtgcacgcatggctgagcatgtgtgggtgggagtcagcacattcacgatactgtgcaatcatcacctctgtctagttacaggacggtttctttctcccccaaagaaaccccatcgccatcagcactcactccccactcccccagcccctggcaaccacaaatctttccaactctacggatttgcctgttctgggcatttcatgtcaatggaatcatgtactctgtgaaaaaaaaaaaaaaaaaaaaaaaaaaaaaaaaaaaaaaaaaaaaaaaaaaaaaaaaa

SEQ ID NO: 2415 - DNA, 600 bp, Homo sapiens; identical to SEQ ID NO: 2414

SEQ ID NO: 2416 - DNA, 1400 bp, Homo sapiens
tcatagaaggtgaactggagagcgatgaggcagagcaatgtgacaagtatgacgcccaggcactctcagcccagctggtgccatcactctgctctgctgtgtttgtgatcggagtcctggacaatctcctggttgtgcttatcctggtaaaatataaaggactcaaacgcgtggaaaatatctatcttctaaacttggcagtttctaacttgtgtttcttgcttaccctgcccttctgggctcatgctgggggcgatcccatgtgtaaaattctcattggactgtacttcgtgggcctgtacagtgagacatttttcaattgccttctgactgtgcaaaggtacctagtgtttttgcacaagggcaactttttctcagccaggaggagggtgccctgtggcatcattacaagtgtcctggcatgggtaacagccattctggccactttgcctgaatacgtggtttataaacctcagatggaagaccagaaatacaagtgtgcatttagcagaactcccttcctgccagctgatgagacattctggaagcattttctgactttaaaaatgaacatttcggttcttgtcctccccctatttatttttacatttctctatgtgcaaatgagaaaaacactaaggttcagggagcagaggtatagccttttcaagcttgtttttgccataatggtagtcttccttctgatgtgggcgccctacaatattgcatttttcctgtccactttcaaagaacacttctccctgagtgactgcaagagcagctacaatctggacaaaagtgttcacatcactaaactcatcgccaccacccactgctgcatcaaccctctcctgtatgcgtttcttgatgggacatttagcaaatacctctgccgctgtttccatctgcgtagtaacaccccacttcaacccagggggcagtctgcacaaggcacatcgagggaagaacctgaccattccaccgaagtgtaaactagcatccaccaaatgcaagaagaataaacatggattttcatctttctgcattatttcatgtaaattttctacacatttgtatacaaaatcggatacaggaagaaaagggagaggtgagctaacatttgctaagcactgaatttgtctcaggcaccgtgcaaggctctttacaaacgtgagctccttcgcctcctaccacttgtccatagtgtggataggactagtctcatttctctgagaagaaaactaaggcgcggaaatttgtctaagatcacataactaggaagtggcagaactgattctccagccctggtagcatttgctcagagcctacgcttggtccagaacatcaaactccaaaccctggggacaaacgacatgaaataaatgtattttaaaacatct

SEQ ID NO: 2417 - DNA, 600 bp, Homo sapiens
cccctgctctatccctccaagttcacagtgagggtggctctcaggtacatcctggcaggatggggggtgcccgcagcatacacttcgttattcctctacacagatgtggtagagacaaggctcagccagtggctggaagagatgccttgtgtgggcagttgccagctgctgctcaataaattttggggctggttaaacttccctttgttctttgtcccctgcctcattatgatcagcttgtatgtgaagatctttgtggttgctaccagacaggctcagcagattaccacattgagcaaaagcctggctggggctgccaagcatgagagaaaagctgccaagaccctgggcattgttgtgggcatatacctcttgtgctggctgcccttcaccatagacacgatggtcgacagcctccttcactttatcacacccccactggtctttgacatctttatctggtttgcttacttcaactcagcctgcaaccccatcatctatgtcttttcctaccagtggtttcggaaggcactgaaactcacactgagccagaaggtcttctcaccgcagacacgcactgttgatttgtaccaagaatga

SEQ ID NO: 2418 - DNA, 1400 bp, Homo sapiens
cacaaagcaacgaaaccccatggattatcctgttgaggatgctttctgtaaacctcaactcgtgaagaagagctatggtgtggagaacagagcctactctcaagaggaaatcactcaaggttttgaagagacaggggacacgctctatgccccctattccacacattttcagctgcagaaccagcctccccaaaaggaattctccatcccacgggcccacgcttggccgagcccttacaaagactatgaagtaaagaaagagggcagctaactctgtcctgaagagtgggacaaatgcagccgggcggcagatctagcgggagctcaaagggatgtgggcgaaatcttgagtcttctgagaaaactgtacaagacactacgggaacagtttgcctccctcccagcctcaaccacaattcttccatgctggggctgatgtgggctagtaagactccagttcttagaggcgctgtagtatttttttttttttgtctcatcctttggatacttcttttaagtgggagtctcaggcaactcaagtttagacccttactctttttgtttgttttttgaaacaggatcttgctctgtcacccaggcttgagtgcagtggtgcgatcacagcccagtgcagcctcgaccacctgtgctcaagcaatcctcccatctccatctcccaaagtgctgggatgacaggcgtgagccacagctcccagcctaggcccttaatcttgctgttattttccatggactaaaggtctggtcatctgagctcacgctggctcacacagctctaggggcctgctcctctaactcacagtgggttttgtgaggctctgtggcccagagcagacctgcatatctgagcaaaaatagcaaaagcctctctcagcccactggcctgaatctacactggaagccaacttgctggcacccccgctccccaacccttcttgcctgggtaggagaggctaaagatcaccctaaatttactcatctctctagtgctgcctcacattgggcctcagcagctccccagcaccaattcacaggtcacccctctcttcttgcactgtccccaaacttgctgtcaattccgagatctaatctccccctacgctctgccaggaattctttcagacctcactagcacaagcccggttgctccttgtcaggagaatttgtagatcattctcacttcaaattcctggggctgatacttctctcatcttgcaccccaacctctgtaaatagatttaccgcatttacggctgcattctgtaagtgggcatggtctcctaatggaggagtgttcattgtataataagttattcacctgagtatgcaataaagatgtggtggccactctttcatggtggtggcagcaaaaaaaaaaaaaa

SEQ ID NO: 2419 - DNA, 600 bp, Homo sapiens
ctgtgcagaagggcacctccacaccagagtacaatgtgaaaggcatcttctaccgcaagaagctgagccagcccatcactgtacaggtctggaaccaccgagtgctgaaggatgaatttctgggccaggtgcacctaaaggctgacccggacaacctccaggccctgcataccctccacctccgggaccgaaatagccggcagcccagcaacctgccaggcactgtggccgtgcacattctcagcagcacctccctcatggctgtctgacacctgcccacctacctggctctgaccgttcccaccaccatctgcatgtccccactgggcctgagtctagcctgggagccaggatactggggtccttttcccactcttccactgacttgctgtgtgaccttaggaagtctctgcccctctctcagcctcagtgtcccgagggccccgaagcattccattctcgtggaggagtttccttgctgagatttcaaatagtcctccccacctcaactgtcaccactgctaagggactctatccattgagcacattttcctaaggccctgctgtctgccgaggagcgccaagaagatgtcacttgcc

SEQ ID NO: 2420 - DNA, 600 bp, Homo sapiens; identical to SEQ ID NO: 2419

SEQ ID NO: 2421 - DNA, 600 bp, Homo sapiens
tcatcattaccttcttcctctgctggtgcccctaccacacactcaacctcctagagctccaccacactgccatgcctggctctgtcttcagcctgggtttgcccctggccactgcccttgccattgccaacagctgcatgaaccccattctgtatgttttcatgggtcaggacttcaagaagttcaaggtggccctcttctctcgcctggtcaatgctctaagtgaagatacaggccactcttcctaccccagccatagaagctttaccaagatgtcatcaatgaatgagaggacttctatgaatgagagggagaccggcatgctttgatcctcactgtggaacccctcaatggactctctcaacccagggacacccaaggatatgtcttctgaagatcaaggcaagaacctctttagcatccaccaattttcactgcattttgcatgggatgaacagtgttttatgctgggaatctagggcctggaacccctttcttctagtggacagaacatgctgtgttccatacagccttggactagcaatttatgcttcttgggaggccagccttgactgactcaaagcaaaaaaggaagaattc

SEQ ID NO: 2422 - DNA, 600 bp, Homo sapiens; identical to SEQ ID NO: 2421

SEQ ID NO: 2423 - DNA, 600 bp, Homo sapiens
caaaatatcgtgctgccacatgttcaaagtacactgaacttccttatgggagagaagatgtcctgaaagaagctgtggccaataaaggcccagtgtctgttggtgtagatgcgcgtcatccttctttcttcctctacagaagtggtgtctactatgaaccatcctgtactcagaatgtgaatcatggtgtacttgtggttggctatggtgatcttaatgggaaagaatactggcttgtgaaaaacagctggggccacaactttggtgaagaaggatatattcggatggcaagaaataaaggaaatcattgtgggattgctagctttccctcttacccagaaatctagaggatctctcctttttataacaaatcaagaaatatgaagcactttctcttaacttaatttttcctgctgtatccagaagaaataattgtgtcatgattaatgtgtatttactgtactaatagaaaatatagtttgaggccgggcactgtctggctcacgcctgtaatcccagtacttgggaggccaaggaggcatatcaacttgaggccaggagttaaagagcagcctggctaactgtgaaaccctctctact

SEQ ID NO: 2424 - DNA, 600 bp, Homo sapiens; identical to SEQ ID NO: 2423

SEQ ID NO: 2425 - DNA, 600 bp, Homo sapiens
ctcatcttcctctgcatgcccctggacctcgttcgcctctggcagtaccggccctggaacttcggcgacctcctctgcaaactcttccaattcgtcagtgagagctgcacctacgccacggtgctcaccatcacagcgctgagcgtcgagcgctacttcgccatctgcttcccactccgggccaaggtggtggtcaccaaggggcgggtgaagctggtcatcttcgtcatctgggccgtggccttctgcagcgccgggcccatcttcgtgctagtcggggtggagcacgagaacggcaccgacccttgggacaccaacgagtgccgccccaccgagtttgcggtgcgctctggactgctcacggtcatggtgtgggtgtccagcatcttcttcttccttcctgtcttctgtctcacggtcctctacagtctcatcggcaggaagctgtggcggaggaggcgcggcgatgctgtcgtgggtgcctcgctcagggaccagaaccacaagcaaaccgtgaaaatgctgggtgggtctcagcgcgcgctcaggctttctctcgcgggtcctatcctctccctgtgccttctcccttctctctga

SEQ ID NO: 2426 - DNA, 960 bp, Homo sapiens
agcagctccaaccagggcagccttcctgagaagatgcaaccaatcctgcttctgctggccttcctcctgctgcccagggcagatgcaggggagatcatcgggggacatgaggccaagccccactcccgcccctacatggcttatcttatgatctgggatcagaagtctctgaagaggtgcggtggcttcctgatacaagacgacttcgtgctgacagctgctcactgttggggaagctccataaatgtcaccttgggggcccacaatatcaaagaacaggagccgacccagcagtttatccctgtgaaaagacccatcccccatccagcctataatcctaagaacttctccaacgacatcatgctactgcagctggagagaaaggccaagcggaccagagctgtgcagcccctcaggctacctagcaacaaggcccaggtgaagccagggcagacatgcagtgtggccggctgggggcagacggcccccctgggaaaacactcacacacactacaagaggtgaagatgacagtgcaggaagatcgaaagtgcgaatctgacttacgccattattacgacagtaccattgagttgtgcgtgggggacccagagattaaaaagacttcctttaagggggactctggaggccctcttgtgtgtaacaaggtggcccagggcattgtctcctatggacgaaacaatggcatgcctccacgagcctgcaccaaagtctcaagctttgtacactggataaagaaaaccatgaaacgctactaactacaggaagcaaactaagcccccgctgtaatgaaacaccttctctggagccaagtccagatttacactgggagaggtgccagcaactgaataaatacctctcccagtgtaaatctggagccaagtccagatttacactgggagaggtgccagcaactgaataaatacctcttagctgagtgg

SEQ ID NO: 2427 - DNA, 960 bp, Homo sapiens; identical to SEQ ID NO: 2426

SEQ ID NO: 2428 - DNA, 600 bp, Homo sapiens
ttgcttctgctcctgcccacactgcagagcatcacgtggcaaatgattgagcaaatacagtttgttaaactttttgggatggttaaaattgacaatctacttcaggaaatgctattaggtggggcttccaatgatggcagtcatctccatcatccaatgcatccacatttgtctcaagacccattaactggacaaactatacttttaggtcccatgtcaacactggttcatgcagaccagatctcaactcctgaaaccccactcccttccccaccacaaggctctgggcaagaacagtacaaaatagctgcaaaccaagcatcagtcatttcacaccagcatctctccaaacaaaagcaattgtgaaaatgtgtttacttcagaacggcactacataaatgtgaaaagttgttgatcttgaaatatctcaagatagcacttttggcaaactcttagccaaggcttcttcattggtgctgttataagatggtatcctattttcttgtttatacgttcattctatttgttattgctactatgtgaaactttcacatgcaaccaatgtatatctgagtttgaaggatgtttatatagggtagg

SEQ ID NO: 2429 - DNA, 600 bp, Homo sapiens; identical to SEQ ID NO: 2428

SEQ ID NO: 2430 - DNA, 1277 bp, Homo sapiens
aagctgcttccctggagacgggcggggaggccaaacttcctgctgaagctctgtggcctcttttggggtgggggcgggggtccaggcagaaagaaactgtctgctgctcaagacccacaggacgcccggaagactaaatgatcactgcccccagtgaatatggtgaagaagctggtgatggcccagaagcggggagagacacgagccctttgcctgggtgtaaccatggtggtgtgtgccgtcatcacctactacatcctggtcacgactgtgctgcccctctaccagaaaagcgtgtggacccaggaatccaagtgccacctgattgagaccaacatcagggaccaggaggagctgaagggcaagaaggtgccccagtacccatgcctgtgggtcaacgtgtcagctgccggcaggtgggctgtgctgtaccacacggaggacactcgggaccagaaccagcagtgctcctacatcccaggcagcgtggacaattaccagacggcccgggccgacgtggagaaggtcagagccaaattccaagagcagcaggtcttctactgcttctccgcacctcgggggaacgaaaccagcgtcctattccagcgcctctacgggccccaggccctcctcttctccctcttctggcccaccttcctgctgaccggtggcctcctcattatcgccatggtgaagagcaaccagtacctgtccatcctggcggcccagaagtagagccatccatccatgccataccacttgtcagggcacaggggactggctgggcccccagggctgctccccacttgcagcacaatgccttctccacctgccctcccactcttccagtccaatccacgctgtcttctgttgcaggactaacctttgagaaatccttttgtgaagtcattgcctgctcaagaatgtacagtggctccccaatgccttggaggccataaggccagccagttctagctctctattacctgtccccactcaactgactcatacctgtttccggctgcatcactatgtgccccacagagaacgatgatcgtcacctctgtgcctgagttctccctgttgtctcaaagcggtacccatcctcccccagaagctgtccccagcgagcctcccttctttgtttgaattctctaataagagcaacagcagctcccatttctagaacacatttacagtattactattttctaggatataaagtgccatatatatttttaattccaatattaataaatgtatgccaaacaacaata

SEQ ID NO: 2431 - DNA, 600 bp, Homo sapiens
cccctcaaacttctgtgcacaaagtgctcccttcccagaggaggggccccatcggtgtgtaaggtggcctattcctctgtgtgttctctggatcttttcagccctgtggtccagtgtccatcacagccatgctgactgagtgactggagacagggatgatggagagttcatgaagggctgggcagagagctggggccacctctggaggtgtcctgctgttcctgttggccccagctgcactcgcagggccttcctgtggcccctttccccaagcaggggcggccgcagctctcacccactttctcctgcagacggcgaggggaccgacctgtttgccgtggctgtccatgagtttggccacgccctgggcctgggccactcctcagcccccaactccattatgaggcccttctaccagggtccggtgggcgaccctgacaagtaccgcctgtctcaggatgaccgcgatggcctgcagcaactctatggtagggggagagggacctgccgcgaaaccatcattgccccatccagtgtcctctgcagcaaggccaggggacgcacacctgcctgactctttcctcacagggaaggcgcccc

SEQ ID NO: 2432 - DNA, 600 bp, Homo sapiens
caggagcggcgtggcaaggcggcccgcatggccgtggtggtggctgctgcctttgccatcagcttcctgccttttcacatcaccaagacagcctacctggcagtgcgctcgacgccgggcgtcccctgcactgtattggaggcctttgcagcggcctacaaaggcacgcggccgtttgccagtgccaacagcgtgctggaccccatcctcttctacttcacccagaagaagttccgccggcgaccacatgagctcctacagaaactcacagccaaatggcagaggcagggtcgctgagtcctccaggtcctgggcagccttcatatttgccattgtgtccggggcaccaggagccccaccaaccccaaaccatgcggagaattagagttcagctcagctgggcatggagttaagatccctcacaggacccagaagctcaccaaaaactatttcttcagccccttctctggcccagaccctgtgggcatggagatggacagacctgggcctggctcttgagaggtcccagtcagccatggagagctggggaaaccacattaaggtgctcacaaaaatacagtgtgacgtgtactgtcaaaa

SEQ ID NO: 2433 - DNA, 600 bp, Homo sapiens; identical to SEQ ID NO: 2432

SEQ ID NO: 2434 - DNA, 600 bp, Homo sapiens
caggaaatggagtttgcagtaatgagctgaagtgtgtgtgtaacagacactggataggttctgattgcaacacttacttccctcacaatgatgatgcaaagactggtatcactctgtctggcaatggtgttgctggcaccaatatcataataggcataattgctggcaccattttagtgctggccctcatattaggaataactgcgtggggttataaaaactatcgagaacagagacagttaccccagggagattatgtaaaaaagcctggagatggtgactctttttatagcgacattcctcccggagtcagcacaaactcagcatctagttctaagaagaggtcaaatgggctctctcattcttggagtgaaaggattccagacacaaaacatatttcagacatctgtgaaaatgggcgacctcgaagtaactcttggcaaggtaacctgggaggcaacaaaaagaaaatcagaggcaaaagatttagacctcggtctaattcaactgagtaagtctgaacctctaatggaaaaaggcactccaaggtcctgtgcaaatagtgtcaaaagtaaattaagcagatagtcaaagaactgt

SEQ ID NO: 2435 - DNA, 600 bp, Homo sapiens; identical to SEQ ID NO: 2434

SEQ ID NO: 2436 - DNA, 600 bp, Homo sapiens
gcacacaatgcccaggtgggtgaagacagttttcctgaagctgctgccccaggtcctgctgatgaggtggcctctggacaagacaaggggcacaggctctgatgcagtgcccagaggccttgccaggaggcctgccaaaggcaagcttgcaagccatggggaacccagacatcttaaagaatgcttccattgtcacaaatcaaatgagcttgccacaagcaagagaagattaagtcatcagccattacagtgggtggtggaaaattcggagcactcgcctgaagttgaagatgtgattaacagtgttcagttcatagcagaaaacatgaagagccacaatgaaaccaaggaggtagaagatgactggaaatacgtggccatggtggtggacagagtatttctttgggtatttataattgtctgtgtatttggaactgcagggctatttctacagccactacttgggaacacaggaaaatcttaaaatgtattttcttttatgttcagaaatttacagacaccatatttgttctgcattccctgccacaaggaaaggaaagcaaaggcttcccacccaagtcccccatctgctaaaacccg

SEQ ID NO: 2437 - DNA, 600 bp, Homo sapiens; identical to SEQ ID NO: 2436

SEQ ID NO: 2438 - DNA, 600 bp, Homo sapiens
ctaaagagctcgctgacgtgtacagattgtggttactgttctacggtcttcgaccccttctgggacctctcactgcccattgctaagcgaggttatcctgaggtgacattaatggactgcatgaggctcttcaccaaagaggatgtgcttgatggagatgaaaagccaacatgctgtcgctgccgaggcagaaaacggtgtataaagaagttctccatccagaggttcccaaagatcttggtgctccatctgaagcggttctcagaatccaggattcgaaccagcaagctcacaacatttgtgaacttccccctaagagacctggacttaagagaatttgcctcagaaaacaccaaccatgctgtttacaacctgtacgctgtgtccaatcactccggaaccaccatgggtggccactatacagcctactgtcgcagtccagggacaggagaatggcacactttcaacgactccagcgtcactcccatgtcctccagccaagtgcgcaccagcgacgcctacctgcacttctacgaactggccagcccgacctccccaatttagcgccagggagccacgtcccttttttcctttccccgt

SEQ ID NO: 2439 - DNA, 600 bp, Homo sapiens
actccaagcctgcctctggtcaccccaagtctgccactgtctaccctaagcctgcctctgtccatttcaagggtgactctgtccatttcaagggtgactctgtccatttcaagcctgactctgttcatttcaagcctgcttccagcaaccccaagcccatcactggccaccatgtctctgctggcagccactccaagtctgccttcagtgctgccaccagccaccctaaacccatcaagccagctaccagccatgctgagcccaccactgctgactatcccaagcctgccactaccagccaccctaagcccgctgctgctgacaaccctgagctctctgcctcccattgccccgagatccctgccattgcccaccctgtgtctgacgacagtgacctccctgagtcggcctctagccctgccgctgggcccaccaagcctgctgccagccagctggagtctgacaccatcgctgaccttcctgaccctactgtagtcactaccagtaccaatgattaccatgatgtcgtggttgttgatgttgaagatgatcctgatgaaatggctgtgtgaaaaatgctctcgtaggtggccaggcagt

SEQ ID NO: 2440 - DNA, 600 bp, Homo sapiens
tcgtggctcatctcgctggtcctcggtggcctgcccatccttggctggaactgcctgggccacctcgaggcctgctccactgtcctgcctctctacgccaagcattatgtgctgtgcgtggtgaccatcttctccatcatcctgttggccatcgtggccctgtacgtgcgcatctactgcgtggtccgctcaagccacgctgacatggccgccccgcagacgctagccctgctcaagacggtcaccatcgtgctaggcgtctttatcgtctgctggctgcccgccttcagcatcctccttctggactatgcctgtcccgtccactcctgcccgatcctctacaaagcccactactttttcgccgtctccaccctgaattccctgctcaaccccgtcatctacacgtggcgcagccgggacctgcggcgggaggtgcttcggccgctgcagtgctggcggccgggggtgggggtgcaaggacggaggcgggtcgggaccccgggccaccacctcctgccactccgcagctccagctccctggagaggggcatgcacatgcccacgtcacccacgtttctggagggcaacacggtggtctga

SEQ ID NO: 2441 - DNA, 600 bp, Homo sapiens
ttcttcatcttcctgaaaattctcaagcttctcatttctaagctcaaagctcatcaaatgtgcttcagagattataaatacagattggcaaaatcaacactggtcctcattcctttattgggcgttcatgagatcctcttctctttcatcactgatgatcaagttgaaggatttgcaaaacttatacgacttttcattcagttgacactgagctcctttcatgggttcctggtggccttgcagtatggttttgccaatggagaagtgaaggctgagctgcggaaatactgggtccgcttcttgctagcccgccactcaggctgcagagcctgtgtcctggggaaggacttccggttcctaggaaaatgtcccaagaagctctcggaaggagatggcgctgagaagcttcggaagctgcagccctcacttaacagtgggcggctcctacatctagccatgcgaggtcttggggagctgggcgcccagccccaacaggaccatgcacgctggccccggggcagcagcctgtccgagtgcagtgagggggatgtcaccatggccaacaccatggaggagattctggaagagagtgagatctag

SEQ ID NO: 2442 - DNA, 600 bp, Homo sapiens
aggcagagccatggaccacgcaggaagggcctacagcccatttctccatacgcactggtatgtgtggatgatgctgccagggcgccatcgccaagtaagaaagtgaagcaaatcagaaacttgtgaagtggaaatgttctaaaggtggtgaggcaataaaaatcatagtactctttgtagcaaaattcttaagtatgttattttctgttgaagtttacaatcaaaggaaaatagtaatgttttatactgtttactgaaagaaaaagacctatgagcacataggactctagacggcatccagccggaggccagagctgagcactcagcccgggaggcaggctccaggcctcagcaggtgcggagccgtcactgcaccaagtctcactggctgtcagtatgacatttcacgggagatttcttgttgctcaaaaaatgagctcgcatttgtcaatgacagtttcttttttcttactagacctgtaacttttgtaaatacacacagcatgtaatggtatcttaaagtgtgtttctatgtgacaattttgtacaaatttgttattttccatttttatttcaaaatatacattcaaacttaaaatt

SEQ ID NO: 2443 - DNA, 600 bp, Homo sapiens; identical to SEQ ID NO: 2442

SEQ ID NO: 2444 - DNA, 1400 bp, Homo sapiens
cggcaaaaaaaaaaggcgtaagaattttgaagctatgttcaaaggtatccttcagagtggattggataacttcgtgataaaccacatgctaaagaacaacgtggctggacaaacatctatccagaccctagtacctaatacggatcaaaagtcgaccagtgtaaaaaaagacaaccacaaaaaaaaaacagttaagatgttggaatacctgggcaaagatgttcttcatggtgtttttaattatttggcaaaacacgatgttctgacattgaaggaagaggaaaagaaaaaatattatgatgccaaaattgaagacaaggccctgatcttggtagactctttgcgaaagaatcgcgtggctcatcaaatgtttacccaaacacttctcaatatggaccaaaagatcaccagtgtaaaacctcttctgcaaatcgaggctggaccacctgagtcagcagaatctacaaatatactcaaactttgtcctcgtgaagaattcctgagactgtgtaaaaaaaatcatgatgagatctatccaataaaaaagagagaggaccgcagacgcctggctctcatcatatgcaatacaaagtttgatcacctgcctgcaaggaatggggctcactatgacatcgtggggatgaaaaggctgcttcaaggcctgggctacactgtggttgacgaaaagaatctcacagccagggatatggagtcagtgctgagggcatttgctgccagaccagagcacaagtcctctgacagcacgttcttggtactcatgtctcatggcatcctagagggaatctgcggaactgcgcataaaaagaaaaaaccggatgtgctgctttatgacaccatcttccagatattcaacaaccgcaactgcctcagtctaaaggacaaacccaaggtcatcattgtccaggcctgcagaggtgaaaaacatggggaactctgggtcagagactctccagcatccttggcagtcatctcttcacagtcatctgagaacctggaggcagattctgtttgcaagatccacgaggagaaggacttcattgctttctgttcttcaacaccacataacgtgtcctggagagaccgcacaaggggctccatcttcattacggaactcatcacatgcttccagaaatattcttgctgctgccacctaatggaaatatttcggaaggtacagaaatcatttgaagttccacaggctaaagcccagatgcccaccatagaacgagcaaccttgacaagagatttctacctctttcctggcaattgaaaatgaaaccacaggcagcccagccctcctctgtcaacatcaaagagcacatttaccagtatagcttgcatagtcaatatttggtatttcaataaaagtaaagactgta

SEQ ID NO: 2445 - DNA, 600 bp, Homo sapiens
aagagggggcccagtgtcaccaggaacctcggagagagtcccacagggagcgcagagtcggcaggcatcgccctccggagcctcttctgtggcagtccaccccctgaggctgcttcggagaagttggaatcctgtgagaagcgcaagctgaagcgtgtccgaatctccctggcaagtgacgcggacctggaaggcgagatgagccctgaagagattctggagtgggaggagcagcaactagatgaacctgtcaacttcagtgactgcaaaattgatcctgctcccttccagctggtggagcggacctctttgcacaagactcacactatcttctcactgctgggagtggaccatgcttatgtcaccagtattggcagactcattggaatcgttactctaaaggagctccggaaggccatcgagggctctgtcacagcacagggtgtgaaagtccggccgcccctcgccagcttccgagacagtgccaccagcagcagtgacacggagaccactgaggtgcatgcactctgggggccccactcccgtcatggcctcccccgggagggcagcccttccgacagcgacgacaaatgccaatga

SEQ ID NO: 2446 - DNA, 600 bp, Homo sapiens; identical to SEQ ID NO: 2445

SEQ ID NO: 2447 - DNA, 600 bp, Homo sapiens
atcgtgctcacctactccactgaccggctgcgcaaatggatgttcatctgcattggctggggtgtgcccttccccatcattgtggcctgggccattgggaagctgtactacgacaatgagaagtgctggtttggcaaaaggcctggggtgtacaccgactacatctaccagggccccatgatcctggtcctgctgatcaatttcatcttccttttcaacatcgtccgcatcctcatgaccaagctccgggcatccaccacgtctgagaccattcagtacaggaaggctgtgaaagccactctggtgctgctgcccctcctgggcatcacctacatgctgttcttcgtcaatcccggggaggatgaggtctcccgggtcgtcttcatctacttcaactccttcctggaatccttccagggcttctttgtgtctgtgttctactgtttcctcaatagtgaggtccgttctgccatccggaagaggtggcaccggtggcaggacaagcactcgatccgtgcccgagtggcccgtgccatgtccatccccacctccccaacccgtgtcagctttcacagcatcaagcagtccacagcagtctga

SEQ ID NO: 2448 - DNA, 600 bp, Homo sapiens; identical to SEQ ID NO: 2447

SEQ ID NO: 2449 - DNA, 1399 bp, Homo sapiens
ttgccggcgcaagagccaagccgccagcgctgctatgtgggccacgctgccgctgctctgcgccggggcctggctcctgggagtccccgtctgcggtgccgccgaactgtccgtgaactccttagagaagtttcacttcaagtcatggatgtctaagcaccgtaagacctacagtacggaggagtaccaccacaggctgcagacgtttgccagcaactggaggaagataaacgcccacaacaatgggaaccacacatttaaaatggcactgaaccaattttcagacatgagctttgctgaaataaaacacaagtatctctggtcagagcctcagaattgctcagccaccaaaagtaactaccttcgaggtactggtccctacccaccttccgtggactggcggaaaaaaggaaattttgtctcacctgtgaaaaatcagggtgcctgcggcagttgctggactttctccaccactggggccctggagtctgcaatcgccatcgcaaccggaaagatgctgtccttggcggaacagcagctggtggactgcgcccaggacttcaataattacggctgccaagggggtctccccagccaggctttcgagtatatcctgtacaacaaggggatcatgggtgaagacacctacccctaccagggcaaggatggttattgcaagttccaacctggaaaggccatcggctttgtcaaggatgtagccaacatcacaatctatgacgaggaagcgatggtggaggctgtggccctctacaaccctgtgagctttgcctttgaggtgactcaggacttcatgatgtatagaacgggcatctactccagtacttcctgccataaaactccagataaagtaaaccatgcagtactggctgttgggtatggagaaaaaaatgggatcccttactggatcgtgaaaaactcttggggtccccagtggggaatgaacgggtacttcctcatcgagcgcggaaagaacatgtgtggcctggctgcctgcgcctcctaccccatccctctggtgtgagccgtggcagccgcagcgcagactggcggagaaggagaggaacgggcagcctgggcctgggtggaaatcctgccctggaggaagttgtggggagatccactgggacccccaacattctgccctcacctctgtgcccagcctggaaacctacagacaaggaggagttccaccatgagctcacccgtgtctatgacgcaaagatcaccagccatgtgccttagtgtccttcttaacagactcaaaccacatggaccacgaatattctttctgtccagaagggctactttccacatatagagctccagggactgtcttttctgtattcgctgttcaataaacattgagtgagcacctcca

SEQ ID NO: 2450 - DNA, 1399 bp, Homo sapiens; identical to SEQ ID NO: 2449

SEQ ID NO: 2451 - DNA, 1400 bp, Homo sapiens
ctgcagacttctttcgggacgaggcagagaggatcatgagggactcccctgtcattgatgggcacaatgacctcccctggcagctgctggatatgttcaacaaccggctgcaggacgagagggccaacctgaccaccttggccggcacacacaccaacatccccaagctgagggccggctttgtgggaggccagttctggtccgtgtacacgccctgcgacacccagaacaaagacgccgtgcggaggacgctggagcagatggacgtggtccaccgcatgtgccggatgtacccggagaccttcctgtatgtcaccagcagtgcaggcattcggcaggccttccgggaagggaaggtggccagcctgatcggcgtggagggcggccactccattgacagcagtttgggcgtcctgcgggcactctatcagctgggcatgcggtacctgaccctcacccacagctgcaacacgccctgggctgacaactggctggtggacacgggagacagcgagccccagagccaaggcttgtcaccctttgggcagcgtgtggtgaaggagctgaaccgtctgggggtcctcatcgacttggctcacgtgtctgtggccaccatgaaggccaccctgcagctgtccagagccccggtcatcttcagccactcctcggcctacagcgtgtgcgcaagccggcgcaacgtgcctgacgacgtcctgaggctggtgaaacagacagacagcctggtgatggtgaacttctacaacaattacatttcctgcaccaacaaggccaacctgtcccaagtggccgaccatctggatcacatcaaggaggtggcaggagccagagccgtgggttttggtggggactttgatggtgttccaagggtccctgaggggctggaggacgtctccaagtatccagacctgatcgctgagctgctcaggaggaactggacggaggcggaggtcaagggcgcactggctgacaacctgctgagggtcttcgaggctgtggaacaggccagcaacctcacacaggctcccgaggaggagcccatcccgctggaccagctgggtggctcctgcaggacccattacggctactcctctggggcttccagcctccatcgccactgggggctcctgctggcctccctcgctcccctggtcctctgtctgtctctcctgtgaaacctgggagaccagagtcccctttagggttcccggagctccgggaagacccgcccatcccaggactccagatgccaggagccctgctgcccacatgcaaggaccagcatctcctgagaggacgcctgggcttacctggggggcaggatgcctggggacagttcaggacacacacacagtaggcccgcaataaaagcaacacccctt

SEQ ID NO: 2452 - DNA, 600 bp, Homo sapiens
gatggggagatggggatgggagggtgggggcggggggctcatctgtcacccgaattttctttggtatttttttttttccttctccatgggcagtgctaaggcttgggccggggctgacttcccttagggctggagaccacgggaggaagcatcccttcctgcaagggatccatttctggaccactccatatttaggacctggaggtacctggatgggcagggcttagtgcccagggcccaagagacttagattgggtgctcctgaaggtgttggtatcacagagggcaggcccttggaacaggaggtctctgtggcctctcctggggctctgtgcctcctcagtctagctgtctccctccccttccccctttcttgtcctagtacatccagctctcagtggatgctcctgctagagtagccacatccccaccactaagaggcccctcccctgcttcctgcccctacctcagccagctgaggtaactccaggacatgcacctgggaactcgctggctcagaaaagagttgggtcctatacccacccttgcctgttgtttctcctaatcctcttgggcatggcgagtctagaaacctatgga

SEQ ID NO: 2453 - DNA, 1400 bp, Homo sapiens
agtgggaggccataaatatattcagagtaacacaggattcactgttttattctagcaatgaatttgaagaataccctggaagaagaaacatctacagaattagcattggaagctatcctccaagcaagaagtgtgttacttgccatctaaggaaagaaaggtgccaatattacacagcaagtttcagcgactacgccaagtactatgcacttgtctgctacggcccaggcatccccatttccacccttcatgatggacgcactgatcaagaaattaaaatcctggaagaaaacaaggaattggaaaatgctttgaaaaatatccagctgcctaaagaggaaattaagaaacttgaagtagatgaaattactttatggtacaagatgattcttcctcctcaatttgacagatcaaagaagtatcccttgctaattcaagtgtatggtggtccctgcagtcagagtgtaaggtctgtatttgctgttaattggatatcttatcttgcaagtaaggaagggatggtcattgccttggtggatggtcgaggaacagctttccaaggtgacaaactcctctatgcagtgtatcgaaagctgggtgtttatgaagttgaagaccagattacagctgtcagaaaattcatagaaatgggtttcattgatgaaaaaagaatagccatatggggctggtcctatggaggatacgtttcatcactggcccttgcatctggaactggtcttttcaaatgtggtatagcagtggctccagtctccagctgggaatattacgcgtctgtctacacagagagattcatgggtctcccaacaaaggatgataatcttgagcactataagaattcaactgtgatggcaagagcagaatatttcagaaatgtagactatcttctcatccacggaacagcagatgataatgtgcactttcaaaactcagcacagattgctaaagctctggttaatgcacaagtggatttccaggcaatgtggtactctgaccagaaccacggcttatccggcctgtccacgaaccacttatacacccacatgacccacttcctaaagcagtgtttctctttgtcagactaaaaacgatgcagatgcaagcctgtatcagaatctgaaaaccttatataaacccctcagacagtttgcttattttattttttatgttgtaaaatgctagtataaacaaacaaattaatgttgttctaaaggctgttaaaaaaaagatgaggactcagaagttcaagctaaatattgtttacattttctggtactctgtgaaagaagagaaaagggagtcatgcattttgctttggacacagtgttttatcacctgttcatttgaagaaaaataataaagtcagaagttcaaaaaaaaaa

SEQ ID NO: 2454 - DNA, 1400 bp, Homo sapiens; identical to SEQ ID NO: 2453

SEQ ID NO: 2455 - DNA, 1400 bp, Homo sapiens
agagggagacccagtagaaagaaaaacatcctgggaaatccagctaccagggccctcccagtggaggcatcttacatttaggctacttcaagtatcctcagaaatgtattctgcacccccggccccgcccatgctgagggaaggggagcagttgccaatatttgcaccatcttcacatgcacatgttgcaacaagagcttctgggaaggtaagcggcatcggagctagatcacgtttcacaattagtggttattcttttctgtgtttgttttgcactttaaaaaagagagaacacatgcaaatgaacttgcttgtgtgtatttgatggctctaagggctataaattacaaacaaaacacatcccagacattaggagttcataagtatatttaatgaaattggtggttttaggaagtcaactttagttttgctttgtttgcatgtccactggtttttttattttgatatttgtctttttttaaattttacagtagtcattgaaagttatgtttctttgcttacttcattttttccctctaattatttaagattggaacaaaagtataaatattatttatttgaggtagaatttttttcatgtagtttcttaatatatacttgaaggaaatgtttcaccttatttttggtctttgtttattcatttagaccctgcaagttgattctcattgccagattccattaccctttcttcctcataggtagtaattaccaatgtaactaagcatttgtgttctgatatctgaggccagtaactattaatatctagttctcagagcatttggaaaggttatcttaaatggctacctaaattgaaatccttttcagaaaaaatataattgcaagtaggtaggagtggcctaaattgtctaatgtaataaagtcagacaaaatgcacactttatagtttcaagattttcagtaaataaaatctgtccattcctacctggacatgtcccattaaaaagtggaagattttaaataatttctttacagatgttttatttaaacaggtagcacaatctactaatgttgtgtgatttgtgttatactggttgtaattaatttttttaattcatgaactagcggaaaatttattaaattaactattaactacattcaccttgtaaattactgtataaaacttgttgacaatgcactgactttagaaagatgttaatgtacataaatagagtgtaaataaaatagtgttgatgtactgaaatatgaactgtatcaaaagtattggtaattgtatatggggtgtacctgtttatctgttaactattatccaaacaaattaaatactgtggttgcctctatgtgctgtttttcctcatacaagtaaacacagaaagtcaaaaaaaaaaaaaaaaaaaaaa

SEQ ID NO: 2456 - DNA, 1400 bp, Homo sapiens; identical to SEQ ID NO: 2455

SEQ ID NO: 2457 - DNA, 600 bp, Homo sapiens
cggaggggtctcgcactgaggcgcccagagctggtggtcccgctggacgccatccctctgcccgggatccacacggcccacgtgtgcccgccatgcccgcgccccacgccattgcagtcttccatcctctggccgtgacggtggctgcagcttccccatttgcgccgttgcctctggctgtctgcacttttgttcatgctccaaagaacatttcataatgccttcagtaccgacgtacacttctgaccattttgtatgtgtccttgtgccgtagtgaccaggcctttttttggtggatgtgttaccccgcacacttcaatctcaactttgtgcaccgtccattttctagggatagacgcccagggaatgaactctagttttctaacagattagctgagatattaacttactcacacggacaggttgatgccagagccgtaagaatgcgccagtgcgggtttgcgggggacttcgggtgtggggtcctgcggccgcgatggccgtggaaggttctggggatccctgctgccacggggacgagttcggacgccaggtggacctgtgcactcagtaaaacgcagtgattcaaaaaaaaaaaaa

SEQ ID NO: 2458 - DNA, 600 bp, Homo sapiens; identical to SEQ ID NO: 2457

SEQ ID NO: 2459 - DNA, 600 bp, Homo sapiens
aggtgaccattgacaaagtcagcccctatgggttttttgcacatgaccctgtgaacctgccccgagggggacccagttctggaaaggttcaggcaactcctccttcctcagcaacaacgtatgtggagaggcccacggtcctgcctatcttgactcttctcgactcccgagtgagctgccactcccaggctgacctgcagggcccctactcggaccgaatctccccccggcagagacgtagcatcacgcgagacagtgacacacctctgtccctgatgtcggtcaaccacgaggagctggagaggtctccaagtggcttcagcatctcccaggacagagatgattatgtgttcggccccaatggggggtcgagctggatgagggagaagcggtacctcgccgagggtgagacggacacagacacggaccccttcacgcccagcggctccatgcctctgtcgtccacaggggatgggatttctgattcagtatggaccccttccaataagcccatttaaaagaggtcactggctgacccctccttgtaatgtagacagactttgtatagttcacttactcttacacccgacgcttaccagc

SEQ ID NO: 2460 - DNA, 600 bp, Homo sapiens; identical to SEQ ID NO: 2459

SEQ ID NO: 2461 - DNA, 1400 bp, Homo sapiens
ctgggccctgtcactcctgagatctgcaaacaggacattgtatttgatggcatcgctcagatccgtggtgagatcttcttcttcaaggaccggttcatttggcggactgtgacgccacgtgacaagcccatggggcccctgctggtggccacattctggcctgagctcccggaaaagattgatgcggtatacgaggccccacaggaggagaaggctgtgttctttgcagggaatgaatactggatctactcagccagcaccctggagcgagggtaccccaagccactgaccagcctgggactgccccctgatgtccagcgagtggatgccgcctttaactggagcaaaaacaagaagacatacatctttgctggagacaaattctggagatacaatgaggtgaagaagaaaatggatcctggctttcccaagctcatcgcagatgcctggaatgccatccccgataacctggatgccgtcgtggacctgcagggcggcggtcacagctacttcttcaagggtgcctattacctgaagctggagaaccaaagtctgaagagcgtgaagtttggaagcatcaaatccgactggctaggctgctgagctggccctggctcccacaggcccttcctctccactgccttcgatacaccgggcctggagaactagagaaggacccggaggggcctggcagccgtgccttcagctctacagctaatcagcattctcactcctacctggtaatttaagattccagagagtggctcctcccggtgcccaagaatagatgctgactgtactcctcccaggcgccccttccccctccaatcccaccaaccctcagagccacccctaaagagatcctttgatattttcaacgcagccctgctttgggctgccctggtgctgccacacttcaggctcttctcctttcacaaccttctgtggctcacagaacccttggagccaatggagactgtctcaagagggcactggtggcccgacagcctggcacagggcagtgggacagggcatggccaggtggccactccagacccctggcttttcactgctggctgccttagaacctttcttacattagcagtttgctttgtatgcactttgtttttttctttgggtcttgttttttttttccacttagaaattgcatttcctgacagaaggactcaggttgtctgaagtcactgcacagtgcatctcagcccacatagtgatggttcccctgttcactctacttagcatgtccctaccgagtctcttctccactggatggaggaaaaccaagccgtggcttcccgctcagccctccctgcccctcccttcaaccattccccatgggaaatgtcaacaagtatgaataaagacacctactgagtggc

SEQ ID NO: 2462 - DNA, 600 bp, Homo sapiens
aaaacaggttgggcacaataaacaaccaagtataaggagctcagaagatttccatctaaatagtttcaataatcctccaagacaatatcagaaaataatgaaaaggctcattaaaagatatgtactgcaggcccagatagataaggagagtgatgaagtgaacgaaggggaactgaaggaaattaagcaggacatctcaagtctccgctatgaactccttgaagaaaaatctcagaatacagaagacctagcagaacttattagagaacttggagagaaattatccatggaaccaaatcaagaggaaaccaatagataatgcgaagacttccttagaaattcatatttatttgtccacttgaagccatattattttctgatttattttcttaagtgccaatgggcccaccttttaaacaagaaaacgttaaataacttgggccatcctatcatctggagccctagtatctaatttttttggtgattaaactccattgttcagggtaaaggctgtagataatgaggaaaattatgcccagttgtttggtgcttgttttataaactgctttcttggatataactaaaaaaaaaaaaaaaaaa

SEQ ID NO: 2463 - DNA, 600 bp, Homo sapiens; identical to SEQ ID NO: 2462

SEQ ID NO: 2464 - DNA, 1400 bp, Homo sapiens
cgggaggcagcaacggcgccacgtgcagcacgcaggtttccatgctgacccgcgtcagcccaggtgcccgccgctcctccagcttccaagccgaagtctccctggtctgaccaccaggatcccagcccaagcggcccctcccgccccttcccactcgcagcagacgccggggacagaggcctgcccgggcgcgccagccccggccctgggctcggaggctgcccccggccccctggtctctggtccggacactcctagagaacgcagccctagagcctgcctggagcgtttctagcaagtgagagagatgggagctcctctcctggaggatgcaggtggaactcagtcattagactcctcctccaaaggccccctacgccaatcaagggcaaaaagtctacatactttcatcctgactctgccccctgctggctcttctgcccaattggaggaaagcaaccggtggatcctcaaacaacactggtgtgacctgagggcagaaaggttctgcccgggaaggtcaccagcaccaacaccacggtagtgcctgaaatttcaccattgctgtcaagttcctttgggttaagcattaccactcaggcatttgactgaagatgcagctcactaccctattctctctttacgcttagttatcagctttttaaagtgggttattctggagtttttgtttggagagcacacctatcttagtggttccccaccgaagtggactggcccctgggtcagtctggtgggaggacggtgcaacccaaggactgagggactctgaagcctctgggaaatgagaaggcagccaccagcgaatgctaggtctcggactaagcctacctgctctccaagtctcagtggcttcatctgtcaagtgggactctgtcacaccagccattcttatctctctgtgctgtggaagcaacaggaatcaagagactgccctccttgtccacccacctatgtgccaactgttgtaactaggctcagagatgtgcacccatgggctctgacagaaagcagatcctcaccctgctacacatacaggatttgaactcagatctgtctgataggaatgtgaaagcacggactcttactgctaacttttgtgtatcgtaaccagccagatcctcttggttatttgtttaccacttgtattattaatgccattatccctgaattccccttgccaccccaccctccctggagtgtggctgaggaggcctccatctcatgtatcatctggataggagcctgctggtcacagcctcctctgtctgcccttcaccccagtggccactcagcttcctacccacacctctgccagaagatcccctcaggactgcaacaggcttgtgcaacaataaatgttggcttggaaaaaaaaaaaa

SEQ ID NO: 2465 - DNA, 600 bp, Homo sapiens
actttgatgacaacagcgtctcccctgtcaatgagaatcagatcgagtccaaggcagcctatgtcctcttctaccaacgccaggacgtggcgcgacgcctgctgtccccggccggctcatctggcgccccagcctcccctgcctgcagctccccacccagctctgagttcatggatgttaattgagagccctgggtcctgccacagaaaaaaaaaaaaaaaagccctctctgcaatctcgcttctcgtgtccgccccgcttctcttattcgtgttaggtgcccccgccaggcattgcaggcttagtcgtggctactgttctcctgtgccgctgcatcgctctctcccgggaaagaacaggtcgtgtctcctcctagcagtgcgcgccccgcctgtgtttgcccttccagcagtgaccctcccttctagtctttatttatggtcgtgcccttccctctcctcagcccagagtgttctgcgtgggtggtgatgggggttcacctgaacacagagtgtattttcttattgaggccctgtaccttctgctgtgtgtgtgtatatataaagcaccagtctgctccccaaaaaaaaaacggaattc

SEQ ID NO: 2466 - DNA, 600 bp, Homo sapiens; identical to SEQ ID NO: 2465

SEQ ID NO: 2467 - DNA, 600 bp, Homo sapiens
gccccattgtacccccattcacctggatctcagtatcaacagaataaccatgtgcatggacagccatatacaggcccagcagcacatcacatgaacaaccctcagagaactggccaacgagcacaagaaaattatgaaggcagtgaagaagtatccccacctcaaaccaaggatcaatgaaatgcacataattaactggttccatcaagactgtgcacccaggccttacagtccaacctttttctgtgtctggctaatatttaaaactagaaaaactattcctaatcaacatggagtggagagtttattcactgtcttatctgcagaaatttgctgtcaatatataacccgcctgcagtggaaagtgtatagtgttttgtaataaatggcctgatgctaatgtgtaaatggcaaaggtgtatatagtatattaatgttgactgttaattcttaagcaagaaacttttttcttgatgagactcacagatctacacaaactacaaaagttaattttcttgttacacccactgcactctgcaaccagtgttgcctgcctcatggcagttggatcagctcctttacaaaaaagaaaaaaaaaaa

SEQ ID NO: 2468 - DNA, 600 bp, Homo sapiens; identical to SEQ ID NO: 2467

SEQ ID NO: 2469 - DNA, 1400 bp, Homo sapiens
aaattttactgattgaggactcctggcagactcacagaattcataatgcacttaaaggaattccagatgacagagatgggctgttcgatacaatacagcgctcgaagaatcactatcaaaaacgagcatatcagtgcataaaatgtatggtagctctatttagcagttgtcctgttgcttaccagatcttacagggtaacggagatcttaaaagaaaatggacctgggcagtggaatggctaggagatgaacttgaaagaagaccatatactggcaatcctcagtatagttacaacaattggtctcctccagtacaaagcaatgaaacagcaaatggttatttcttagaaagatcacatagtgctaggatgacacttgcaaaagcttgtgaactctgtccagaagaggagccagatgaccaggatgccccagatgagcatgagccctctccatcagaagatgccccattatatcctcattcacctgcctctcagtatcaacagaataatcatgtacatggacagccatatacaggaccagcagcacatcacttgaacaaccctcagaaaacaggccaacgaacacaagaaaattatgaaggcaatgaagaagtatcctcacctcagatgaaggatcagtgaaaagcaataattaactgcttcctttatgactatgcactaaggtcttatagtccaaactttctctgtgtctggctagtattgaaaactagataaactgctccaaaccaacatggagtaaagagcatattcactggtttatttgcagtaatttgcaatttgtcagtgtataagacacatgcagggtgaagtgtacagagttttgtaacaaatgactggtcctaatctgtaaatgagaaaggtatatatactatgttaatgtctgactgttaattcttaagcaagaaactttttttgatgaaaacaagtcagatctacacagtcacacaattattttttgttgtgttcactacattgtgcaattgatattgcctgctttgagcagtttggtcaacttaccaacttccccccaaaaaagggaacataaaagagcccatctttgtcagtttacaccaatagtttcttgttaatccttctttcctggatatataaggctggtggtaacttttgaattatatggttgatgtggaaaattggcagtgtaacatttctagatacttttcattacctttttattctggtatataggctaaccactttaaagctattcttatgctgtaacagttagcatggcttcacactgtttgtgtagccaagaggacagaattacatgaatgacagtgcccagagtgacagctgtatattgctcagagcttttatttcttatacctagaataaatataaaatgggggaaaaaaaaaa

SEQ ID NO: 2470 - DNA, 1400 bp, Homo sapiens
  misc_feature (539)..(539): n is a, c, g, or t
  misc_feature (1206)..(1206): n is a, c, g, or t
  misc_feature (1220)..(1220): n is a, c, g, or t
  misc_feature (1235)..(1235): n is a, c, g, or t
  misc_feature (1291)..(1291): n is a, c, g, or t
  misc_feature (1294)..(1294): n is a, c, g, or t
  misc_feature (1337)..(1337): n is a, c, g, or t
  misc_feature (1371)..(1371): n is a, c, g, or t
tctccgtgcggcggcgccaaggggtcagcatcggccggctccacaagcagcggaagcctgaccggcggaaacgctctcgcccctacaaggccaagcgccagtgaggactgctggccctgactctgcagcccactcttgccgtgtggccctcaccagggtccttccctgccccacttccccttttcccagtattactgaatagtcccagctggagagtccaggccctgggaatgggaggaaccaggccacattccttccatcgtgccctgaggcctgacacggcagatcagccccatagtgctcaggaggcagcatctggagttggggcacagcgaggtactgcagcttcctccacagccggctgtggagcagcaggacctggcccttctgcctgggcagcagaatatatattttacctatcagagacatctatttttctgggctccaacccaacatgccaccatgttgacataagttcctacctgactatgctttctctcctaggagctgtcctggtgggcccaggtccttgtatcatnccacggtcccaactacagggtcctagctgggggcctgggtgggccctgggctctgggccctgctgctctagccccagccaccagcctgtccctgttgtaaggaagccaggtcttctctcttcattcctcttaggagagtgccaaactcagggacccagcactgggctgggttgggagtagggtgtcccagtggggttggggtgagcaggctgctgggatcccatggcctgagcagagcatgtgggaactgttcagtggcctgtgaactgtcttccttgttctagccaggctgttcaagactgctctccatagcaaggttctagggctcttcgccttcagtgttgtggccctagctatgggcctaaattgggctctaggtctctgtccctggcgcttgaggctcagaagagcctctgtccagcccctcagtattaccatgtctccctctcaggggtagcagagacagggttgcttataggaagctggcaccactcagctcttcctgctactccagtttcctcagcctctgcaaggcactcagggtgggggacagcaggatcaagacaacccgttggagcccctgtgttccagaggacctgatgccaaggggtaatgggcccagcagtgcctctggagcccaggccccaacacagccccatggcctctnccagatggctttgnaaaaggtgatccaancaggcccctttatctgtacatagtgactgagtggggggtgctggcaagtgtggcanctncctctgggctgagcacagcttgacccctctagcccctgtaaanactggatcaatgaatgaataaaactctcctaagnatctcctgagaaaaaaaaaaaaaaaaagg

SEQ ID NO: 2471 - DNA, 1400 bp, Homo sapiens; identical to SEQ ID NO: 2470
  misc_feature (539)..(539): n is a, c, g, or t
  misc_feature (1206)..(1206): n is a, c, g, or t
  misc_feature (1220)..(1220): n is a, c, g, or t
  misc_feature (1235)..(1235): n is a, c, g, or t
  misc_feature (1291)..(1291): n is a, c, g, or t
  misc_feature (1294)..(1294): n is a, c, g, or t
  misc_feature (1337)..(1337): n is a, c, g, or t
  misc_feature (1371)..(1371): n is a, c, g, or t

SEQ ID NO: 2472 - DNA, 600 bp, Homo sapiens
acactgcgaccgtacgacgtgaaggacgtcattgagcagtactcagcaggccacctggacatgctgggccggatcaagagcctgcaaactcgggtggaccaaattgtgggtcgggggcccggggacaggaaggcccgggagaagggcgacaaggggccctccgacgcggaggtggtggatgaaatcagcatgatgggacgcgtggtcaaggtggagaagcaggtgcagtccatcgagcacaagctggacctgctgttgggcttctattcgcgctgcctgcgctctggcacctcggccagcctgggcgccgtgcaagtgccgctgttcgaccccgacatcacctccgactaccacagccctgtggaccacgaggacatctccgtctccgcacagacgctcagcatctcccgctcggtcagcaccaacatggactgagggacttctcagaggcagggcagcacacggccagccccgcggcctggcgctccgactgccctctgaggcctccggactcctctcgtacttgaactcactccctcacggggagagagaccacacgcagtattgagctgcctgagtgggcgtggtacctgctgtggg

SEQ ID NO: 2473 - DNA, 600 bp, Homo sapiens; identical to SEQ ID NO: 2472

SEQ ID NO: 2474 - DNA, 600 bp, Homo sapiens
tcagccgctcctatttggccgtctgggctctgtcgagcctgcttgtcttcctgctcatggtggctgtgtacacccgcattttcttctacgtgcggcggcgagtgcagcgcatggcagagcatgtcagctgccacccccgctaccgagagaccacgctcagcctggtcaagactgttgtcatcatcctgggggcgttcgtggtctgctggacaccaggccaggtggtactgctcctggatggtttaggctgtgagtcctgcaatgtcctggctgtagaaaagtacttcctactgttggccgaggccaactcactggtcaatgctgctgtgtactcttgccgagatgctgagatgcgccgcaccttccgccgccttctctgctgcgcgtgcctccgccagtccacccgcgagtctgtccactatacatcctctgcccagggaggtgccagcactcgcatcatgcttcccgagaacggccacccactgatggactccaccctttagctaccttgaacttcagcggtacgcggcaagcaacaaatccacagcccctgatgacttgtgggtgctcctggctcaacccaaccaacaggactgactg

SEQ ID NO: 2475 - DNA, 600 bp, Homo sapiens; identical to SEQ ID NO: 2474

SEQ ID NO: 2476 - DNA, 1400 bp, Homo sapiens
aaaagatgcagatgtggtctacatctcagccttcctgacctctgccccaaacacacgctgcaattttgtctcctccttttctgttcaaattgtgaggttctatcaggtttgtaatcactgtagcttcagttattggtgagtctaaggatccaaggctacagaaaaaaaagaaatataacaggaattaatgatcattccacgttttgtagcccactgcatctggatatataccagtatttttcttttttttttttttgagacagagtttggctcttgttgcccaggctggtgtgcaatggcgtgatctcggcacaccacaaccttcacctccccggttcaagcaattctcctgcctcagcctgaagtcgtgatctgcccgcctcggcctcccaaagtgctgggattacaggcgtcagccaccgcgcctggcctataccagtattttctagtttaaaggaggactacattaactcttattgttgtgtttctgaaaagtgaaatttaaaaagcagcctgaaaaataaaaatttataatttgcccttgaattggaaggaatggagattagggaaggaaaactactctagaggccatttaaaagtatgtatttattagaacatcgaaattcgtgttgtctccatcagtggtcaccttgagggattagacattctaatggaatgtcctggctccaccctccagcatgttctcacccaacaatgacagttgagtggagtgggaagggaagtcattctaaagagtccaaagtcagtagcgccacatctggtttataaagtaagagatccagtggacaatgctatttttgtatgccaacctagataggattataaagcaagactgatttcttctgtggtttatgaatgatcttaaggtaattacaaaagggaaattccaagaatgcataacacaatgacaacatggtgagaaaagtgcagtactacttccaaggtggctagtgtaaaggacacttgagtttttaaaactgtggttaaatgttttatgtggaatttgatgagtttgtatattaaataccactgcttgctgcttttactagaatcaagttaagggacacgttagaaatagaacagcttaatatcactggcttcagagcaaaatgagctcgggtgactgcagattatgatggtaaatatggctttaattacaaacatgaggaatgattcactgaagatgaaaagataggacggatgtgatatgaaaaaaacccaaacattttggcattgaatgatggctaaggtgttccaagtattccatcttttaagatgaattgcttaattaattgcctcgctaccccaggattctcattctttggaaataatttttattaaatttcaataaactgtgaatcccaatggtattttacttt

SEQ ID NO: 2477 - DNA, 600 bp, Homo sapiens
cctatggaggagattgtgcgagccatgacctatgtcatcaaccagggcctggccctatactgggggacatcccgatggggggctgcagaaatcatggaggcctactccatggccagacagttcaatctgattcctccagtgtgtgaacaagcggagcaccatctgtttcagagggagaaggtggagatgcagctgccagagctctaccacaagattggagttggatcagtcacttggtaccctctagcctgtggtctcattactagcaagtatgatgggcgagtcccagatacttgcagggcctccatcaagggctaccagtggctcaaggacaaagtgcagagtgaagatggcaagaagcaacaagccaaagtcatggaccttcttcctgtcgctcaccagctgggctgcaccgtggcccagcttgctattgcgtggtgtctccgcagtgagggtgtcagctctgtcttgctgggggtgtcgagtgcggagcagttgatagaacacctgggcgcgctacaggtgctgagccagctgaccccgcagacagtgatggaaatagacgggctcctgggaaacaagccgcattccaagaagtag

SEQ ID NO: 2478 - DNA, 600 bp, Homo sapiens
acattttccgagctcttccggatcggatcctatggactccaaacaagctcactgtgtttcttttcttttcttctggtttaattttaattttctattttcaaaacaagtatttacttcatttgccaatcagaggatgttttaagaaacaaaacatagtatcttatggattgtttacaatcacaaggacatagatacctatcaggatgaagaacaggcattgcaaggaccctctgatgggacggtactgagatatctcggcttccgctcagcccggttttgaatggttgaaaccggacattggtttttaaattttttgtcagtttatgtggagaatttttttctttccttcatacccagcgcaaaggcactggccgcacttgcaggaaaagtgcaacttaaagcagtaccttcattcatgaagctactttttaatttgatgtaacttttcttattttgggaagggttgctgggtgggtgggaaatatgatgtatttgttacacatagttttctcattatttatgaaacttaaccatacagaatgatataactcctgtgcaatgaaggtgataacagtaaaagaaggcaggagaaaaaaaaaa

SEQ ID NO: 2479 - DNA, 600 bp, Homo sapiens
ctggtgacatggcgggtgcgaggccctccagggaggaagtcagagtgcagggccagcaagcacgagcagtgtgagagccagctcaacagcaccgtggtgggcctgaccgtggtctacgccttctgcaccctcccagagaacgtctgcaacatcgtggtggcctacctctccaccgagctgacccgccagaccctggacctcctgggcctcatcaaccagttctccaccttcttcaagggcgccatcaccccagtgctgctcctttgcatctgcaggccgctgggccaggccttcctggactgctgctgctgctgctgctgtgaggagtgcggcggggcttcggaggcctctgctgccaatgggtcggacaacaagctcaagaccgaggtgtcctcttccatctacttccacaagcccagggagtcacccccactcctgcccctgggcacaccttgctgaggccccagtaggggtggggagggagggagaggccgccacccccgccggtgtctgctgttctttccccataggtcttgctttgttgcctgtcttgctgtctagggatggacttggttcctcttgtcaaggtttgggaatccg

SEQ ID NO: 2480 - DNA, 600 bp, Homo sapiens; identical to SEQ ID NO: 2479

SEQ ID NO: 2481 - DNA, 1400 bp, Homo sapiens
tgcactgggctgggtctgcgctgctgggcctggatcccgcagagcacgccgccttcctgcgcgccctgggccggccccctgcaccgcccggcttcatgcccagtcccacctttgacatggcgcaactctatgcccgtgctgggcactccctggatgacatgctgctggactgtcgcttccgtggccaaccttgtgggcctgagaacttcaccacgatcttcacccggatgggaaagtgctacacatttaactctggcgctgatggggcagagctgctcaccactactaggggtggcatgggcaatgggctggacatcatgctggacgtgcagcaggaggaatatctacctgtgtggagggacaatgaggagaccccgtttgaggtggggatccgagtgcagatccacagccaggaggagccgcccatcatcgatcagctgggcttgggggtgtccccgggctaccagacctttgtttcttgccagcagcagcagctgagcttcctgccaccgccctggggcgattgcagttcagcatctctgaaccccaactatgagccagagccctctgatcccctaggctcccccagccccagccccagccctccctatacccttatggggtgtcgcctggcctgcgaaacccgctacgtggctcggaagtgcggctgccgaatggtgtacatgccaggcgacgtgccagtgtgcagcccccagcagtacaagaactgtgcccacccggccatagatgccatgcttcgcaaggactcgtgcgcctgccccaacccgtgcgccagcacgcgctacgccaaggagctctccatggtgcggatcccgagccgcgccgccgcgcgcttcctggcccggaagctcaaccgcagcgaggcctacatcgcggagaacgtgctggccctggacatcttctttgaggccctcaactatgagaccgtggagcagaagaaggcctatgagatgtcagagctgcttggtgacattgggggccagatggggctgttcatcggggccagcctgctcaccatcctcgagatcctagactacctctgtgaggtgttccgagacaaggtcctgggatatttctggaaccgacagcactcccaaaggcactccagcaccaatctgcttcaggaagggctgggcagccatcgaacccaagttccccacctcagcctgggccccagacctcccacccctccctgtgccgtcaccaagactctctccgcctcccaccgcacctgctaccttgtcacacagctctagacctgctgtctgtgtcctcggagccccgccctgacatcctggacatgcctagcctgcacgtagcttttccgtcttcaccccaaataaagtcctaatgcatcaaaaaaaaaaaaaaaaaaaaaa

SEQ ID NO: 2482 - DNA, 1400 bp, Homo sapiens
cgatgggcctcgggggactctagcccatgcatttgctcctggagaaggcctgggaggagatacacatttcgacaatcctgagaagtggactatgggaacgaatggttttaatttgtttaccgttgctgctcatgaatttggccatgccctgggcctggcccattccacagacccatcagcactgatgtacccaacttataagtacaagaatccctatggattccacctccccaaagatgatgtgaaagggatccaggcattatacggacctcggaaagtattcctggggaagcccactctgccccatgccccccatcacaagccatccatccctgacctctgtgactccagctcatcctttgacgctgtgacaatgctggggaaggagctcctgctcttcaaggaccggattttctggagacggcaggttcacttgcggacaggaattcggcccagcactattaccagctccttcccccagctcatgtccaatgtggatgcagcttacgaagtggctgagaggggcactgcttacttcttcaaaggtccccactactggataacaagaggattccaaatgcaaggtcctcctcggactatttatgactttggatttccaaggcacgtgcagcaaatagatgctgctgtctacctcagggagccacagaagacccttttctttgtgggagatgaatactacagctacgacgaaaggaaaaggaaaatggaaaaagactatccaaagaatactgaagaagaattttcaggagtaaatggccaaatcgatgctgctgtagaattaaatggctacatttacttcttttcaggaccaaaaacatacaagtatgacacagagaaggaagatgtggttagtgtggtgaaatctagttcctggattggttgctaaatagaaaagcctagtcttctcaagcaatgaggatgactacaagcagcctctaactggatcttaaggactaaagcagaatgtaggagagggattcttccaaaggccttcaaatcaaattagaattcactgagaataataatacttccaatttttttcatagttgtataatcagaatttcaatccacattagaaaagtttttatatgggcaactttatgcgaaatccaaatcaacacaatgcactctgcagttagacaccattattttttcttacctaatatactgaagcagattgatccgtttgatttttatttccaggaggaagactagtggtggattccatgacatatattgtaattcttttcataggaaatgtcattacagtatgaattataattatttacaagcaatggcttttgtggccatcatttggccatcatttgttataataaatataaatttcccaatttttacttaaaagacatcacaacaca

SEQ ID NO: 2483 - DNA, 1400 bp, Homo sapiens
ctgtgaatcacctaggggtcttgttaagtgcagtctgatccaggaggccggggccgggtactgagagtctgcacttaacaagctcccaggccgagaagccagtgcggcaggttcacaggcgaggcctggagtaacacaaagtgaaactcgtaatagacttcccactctagggcagtggagtcggaagggcacacggggtgcgtctccccggagttcagttttaccagatgatgggggaggggggaaggagttttatgttaaaccatccatgtatttttggagaagagagaggaaaggtttgagaagcactgttccagcctgccctcttcatttagccaatgcttactgcgctagacgcttcatcccacaatcttaaggggcagcttctattagccagtctttacagctgagcacattctggctcagggaggttaagtgacttgcccagtttcagggctaacgaccacagggtctgcactctaaccctaggcatcacatgctcaatgactctctggtgagcgaggacattctctgacctactcgagggacttaagatgctaccttgtgacccagcactgcccaaagtgcttccaaggcagaagcagcaggggatggcgtggtcaagcactcgggaaacctggggctaatcaaatccaatgggggaaatgactaaaagtcttcggtcgttagaagttgaatgggcacagcaactctaagactacagcacacgtcatttcttagctaagcggaccagcctccctgtcggcctggtgttctgtgggatccctctgggcactggtaatcccaagatctgtgcagccccgcctccaggccacatggggctgggcagctaccatttcccttttgcggatgggaggggtaacttgcacctctgacctatcacttccactgcaccccgtctcattcctccacctgccgtggacttggggtcagagactgctgtgtttgagctctgcagcccagggaccgaaaagttggtgtcaatgaattttgcttggtggatgaaatgtcagtggaagaagcagatgagaaactcttgagatcttggtcctgtgttttttctgccaccaaaggccagggtcactgaaggcctggcccacagcaggtgctgagcaaagggaacagtgaggtgcccagctagctgcagagccaccctgtgttgacacctcgcccctgctccctcccatcccttccccctttactcatagcacttcccccattggacacgtggtgcattttgcttgtttattatgttttctctccatcagaatgaaagctcctcgagggcagggactttggtctattgtctgtatttgccggtgcctaggattgtgcctgtatgcaacaggcactcaataaatatttttgctgtagactgg

SEQ ID NO: 2484 - DNA, 1400 bp, Homo sapiens
gcgctacctggtgccccaggctcgcgccctgtgtggcttggatgagagcaaggccaagctgtcatcggacgtgctgacgctgctcatcaagcagtactgccgcgagagcggtgtccgcaacctgcagaagcaagtggagaaggtgttacggaaatcggcctacaagattgtcagcggcgaggccgagtccgtggaggtgacgcccgagaacctgcaggacttcgtggggaagcccgtgttcaccgtggagcgcatgtatgacgtgacaccgcccggcgtggtcatggggctggcctggaccgcaatgggaggctccacgctgtttgtggagacatccctgagacggccacaggacaaggatgccaagggtgacaaggatggcagcctggaggtgacaggccagctgggggaggtgatgaaggagagcgcccgcatagcctacaccttcgccagagccttcctcatgcagcacgcccccgccaatgactacctggtgacctcacacatccacctgcatgtgcccgagggcgccacccccaaggacggcccaagcgcaggctgcaccatcgtcacggccctgctgtccctggccatgggcaggcctgtccggcagaatctggccatgactggcgaagtctccctcacgggcaagatcctgcctgttggtggcatcaaggagaagaccattgcggccaagcgcgcaggggtgacgtgcatcatcctgccagccgagaacaagaaggacttctacgacctggcagccttcatcaccgagggcctggaggtgcacttcgtggaacactaccgggagatcttcgacatcgccttcccggacgagcaggcagaggcgctggccgtggaacggtgacggccaccccgggactgcaggcggcggatgtcaggccctgtctgggccagaactgagcgctgtggggagcgcgcccggacctggcagtggagccaccgagcgagcagctcggtccagtgacccagatcccagggacctcagtcggcttaatcagagtgtggcatagaagctatttaatgattaaagtcatttgcagtgggagttagcatcactaacctgacagttgttgccaggaatttgctttgtttactgctagtatattagaaatcctagatctcagaatcacaatagtaataaacaacaggggtcattttttcctaacttactctgtgttcaggtgtggaatttctgtctcccaagaggaaatgtgacttcactttggtgccaatggacagaaaattctacctgtgctacataggagaagtttggaatgcacttaatagctggtttttacaccttgatttcgaggtggaaagaaattgatcatgaatctctaataaatttaaatctcttaaaccaaaaaaaaaaaaaa

SEQ ID NO: 2485 - DNA, 1400 bp, Homo sapiens; identical to SEQ ID NO: 2484

SEQ ID NO: 2486 - DNA, 600 bp, Homo sapiens
aatcagcctggttgagctcaaatcccaacttagccacgtctggcctgtgtccttgggcagtcacactacctctctgattttgtttccttatctgtaaaatggtgatcatcataatacaacttcaaaaggatttcaggctgagtgtggtggctcacgcctatacacccagcactttggaaggctgaggaaggaggatcgcttgaggccaggagtttgagactagcctaggcaacacagtgaggccttatctcaacaacaaccacaaaatctaaaaattagctgggtgtggtggtgcatgcctgtgatcctggctacttcagaggctgaggtggaaggatcacttgaggccaggagtttgaggctgcagtgagttatgatggcactgctgcactccagcctgcgggacagagtgagaccctgtctgaaagaaagagagaaagaaagaaagaaagagagagaaagaaagaaagaaagaaagggaaagatggaaggaaggaaggaaaaagaaagagaaagagagagagagagaaagaaaaagaaagaaaagtaagaaagaaaaaagaaaaagaaagaaaagtaagaaagaaaaaaaaaaaaaaa

SEQ ID NO: 2487 - DNA, 1400 bp, Homo sapiens
agctggcacaggagatggagggcagcgacaagccacaggagctggcccgggtctgcttgggccaggccaatcgccactttggcatggcgcttggcgccctctttgtacatgagcacttctcagctgccagcaaagccaaggtgcagcagctagtggaagacatcaagtacatcctgggccagcgcctggaggagctggactggatggacgccgagaccagggctgctgctcgggccaagctccagtacatgatggtgatggtcggctacccggacttcctgctgaaacccgatgctgtggacaaggagtatgagtttgaggtccatgagaagacctacttcaagaacatcttgaacagcatccgcttcagcatccagctctcagttaagaagattcggcaggaggtggacaagtccacgtggctgctccccccacaggcgctcaatgcctactatctacccaacaagaaccagatggtgttccccgcgggcatcctgcagcccaccctgtacgaccctgacttcccacagtctctcaactacgggggcatcggcaccatcattggacatgagctgacccacggctacgacgactgggggggccagtatgaccgctcagggaacctgctgcactggtggacggaggcctcctacagccgcttcctgcgaaaggctgagtgcatcgtccgtctctatgacaacttcactgtctacaaccagcgggtgaacgggaaacacacgcttggggagaacatcgcagatatgggcggcctcaagctggcctaccacgcctatcagaagtgggtgcgggagcacggcccagagcacccacttccccggctcaagtacacacatgaccagctcttcttcattgcctttgcccagaactggtgcatcaagcggcggtcgcagtccatctacctgcaggtgctgactgacaagcatgcccctgagcactacagggtgctgggcagtgtgtcccagtttgaggagtttggccgggttttacactgtccaaaggtctcacccatgaaccctgcccacaagtgttccgtgtggtgagcctggctgcccgcctgcacgcccccactgcccccgcacgaatcacctcctgctggctaccggggcaggcatgcacccggtgccagccccgctctgggcaccacctgccttccagcccctccaggacccggtccccctgctgcccctcacttcaggaggggcctggagcagggtgaggctggactttggggggctgtgagggaaatatactggggtccccagattctgctctaagggggccagaccctctgccaggctggattgtacgggccccaccttcgctgtgttcttgctgcaaagtctggtcaataaatcactgcactgttaaaaaaaaaaaaa

SEQ ID NO: 2488 - DNA, 600 bp, Homo sapiens
ttatggcaattgtgcttttctttttcttttcctggattccccaccaaatattcacttttctggatgtattgattcaacagggcatcatacgtgactgtagaattgcagatattgtggacacggccatgcccatcaccatttggatagcttattttaacaattgcctgaatcctctgttttatggctttctgggaaaaaaatttaaaaaagatattctccagcttctgaaatatattcccccaaaggccaaatcccactcaaacctttcaacaaaaatgagcacgctttcctaccgcccctcagataatgtaagctcatccaccaagaagcctgcaccatgttttgaggttgagtgacatgttcgaaacctgtccataaagtaattttgtgaaagaaggagcaagagaacattcctctgcagcacttcactaccaaatgagccttagctacttttcagaattgaaggagaaatgcattatgtggactgaaccgacttttctaaagctctgaacaaaagcttttctttccttttgcaacaagacaaagcaaagccacattttgcattagacagatgacggctgctcgaagaacaatgtcaga

SEQ ID NO: 2489 - DNA, 600 bp, Homo sapiens
ggagcgtgtgaaggtgggcccagggctgactctctgtgccaagggctgtgctgccatcctggatacgggcacgtccctcatcacaggacccactgaggagatccgggccctgcatgcagccattgggggaatccccttgctggctggggagtacatcatcctgtgctcggaaatcccaaagctccccgcagtctccttccttcttgggggggtctggtttaacctcacggcccatgattacgtcatccagactactcgaaatggcgtccgcctctgcttgtccggtttccaggccctggatgtccctccgcctgcagggcccttctggatcctcggtgacgtcttcttggggacgtatgtggccgtcttcgaccgcggggacatgaagagcagcgcccgggtgggcctggcgcgcgctcgcactcgcggagcggacctcggatggggagagactgcgcaggcgcagttccccgggtgacgcccaagtgaagcgcatgcgcagcgggtggtcgcggaggtcctgctacccagtaaaaatccactatttccattgaaaaaaaaaaaaaaaaaaaaaaaaaaaaaaaaaaaaaaaaaaaaaaa

SEQ ID NO: 2490 - DNA, 600 bp, Homo sapiens; identical to SEQ ID NO: 2489

SEQ ID NO: 2491 - DNA, 1400 bp, Homo sapiens
gcagcaatcttcattatttcctactttctgatcttctttttgtgcatgatgggaaatactgtggtttgctttattgtaatgaggaacaaacatatgcacacagtcactaatctcttcatcttaaacctggccataagtgatttactagttggcatattctgcatgcctataacactgctggacaatattatagcaggatggccatttggaaacacgatgtgcaagatcagtggattggtccagggaatatctgtcgcagcttcagtctttacgttagttgcaattgctgtagataggttccagtgtgtggtctacccttttaaaccaaagctcactatcaagacagcgtttgtcattattatgatcatctgggtcctagccatcaccattatgtctccatctgcagtaatgttacatgtgcaagaagaaaaatattaccgagtgagactcaactcccagaataaaaccagtccagtctactggtgccgggaagactggccaaatcaggaaatgaggaagatctacaccactgtgctgtttgccaacatctacctggctcccctctccctcattgtcatcatgtatggaaggattggaatttcactcttcagggctgcagttcctcacacaggcaggaagaaccaggagcagtggcacgtggtgtccaggaaaaagcagaagatcattaagatgctcctgattgtggccctgctttttattctctcatggctgcccctgtggactctaatgatgctctcagactacgctgacctttctccaaatgaactgcagatcatcaacatctacatctacccttttgcacactggctggcattcggcaacagcagtgtcaatcccatcatttatggtttcttcaacgagaatttccgccgtggtttccaagaagctttccagctccagctctgccaaaaaagagcaaagcctatggaagcttataccctaaaagctaaaagccatgtgctcataaacacatctaatcagcttgtccaggaatctacatttcaaaaccctcatggggaaaccttgctttataggaaaagtgctgaaaaaccccaacaggaattagtgatggaagaattaaaagaaactactaacagcagtgagatttaaaaagagctagtgtgataatcctaactctactacgcattatatatttaaatccattgctttttgtggctttgcacttcaaatttttcaaagaatgttctaaataaaacatttactgaaagccctctctggcaaaaaaattaaaaataaacaaaaatggtcataagatcataaacaatcttatgttgtataaaaatacgtagagtgacttagacatgtttgcatgaataaatatatttctagagaacagttaaaaaaaaaaaaaaaaaaaa

SEQ ID NO: 2492 - DNA, 1368 bp, Homo sapiens
atggccacagcaggaaatccctggggctggttcctggggtacctcatccttggtgtcgcaggatcgctcgtctctggtagctgcagccaaatcataaacggcgaggactgcagcccgcactcgcagccctggcaggcggcactggtcatggaaaacgaattgttctgctcgggcgtcctggtgcatccgcagtgggtgctgtcagccgcacactgtttccagaactcctacaccatcgggctgggcctgcacagtcttgaggccgaccaagagccagggagccagatggtggaggccagcctctccgtacggcacccagagtacaacagacccttgctcgctaacgacctcatgctcatcaagttggacgaatccgtgtccgagtctgacaccatccggagcatcagcattgcttcgcagtgccctaccgcggggaactcttgcctcgtttctggctggggtctgctggcgaacggcagaatgcctaccgtgctgcagtgcgtgaacgtgtcggtggtgtctgaggaggtctgcagtaagctctatgacccgctgtaccaccccagcatgttctgcgccggcggagggcacgaccagaaggactcctgcaacggtgactctggggggcccctgatctgcaacgggtacttgcagggccttgtgtctttcggaaaagccccgtgtggccaagttggcgtgccaggtgtctacaccaacctctgcaaattcactgagtggatagagaaaaccgtccaggccagttaactctggggactgggaacccatgaaattgacccccaaatacatcctgcggaaggaattcaggaatatctgttcccagcccctcctccctcaggcccaggagtccaggcccccagcccctcctccctcaaaccaagggtacagatccccagcccctcctccctcagacccaggagtccagaccccccagcccctcctccctcagacccaggagtccagcccctcctccctcagacccaggagtccagaccccccagcccctcctccctcagacccaggagtccagcccctcctccctcagacccaggagtccagaccccccagcccctcctccctcagacccaggggtccaggcccccaacccctcctccctcagactcagaggtccaggcccccaacccctccttccccagacccagaggtccaggtcccagcccctcctccctcagacccagcggtccaatgccacctagactctccctgtacacagtgcccccttgtggcacgttgacccaaccttaccagttggtttttcattttttgtccctttcccctagatccagaaataaatcccctagatccagaaataaagtctaagagaagcgc

SEQ ID NO: 2493 - DNA, 600 bp, Homo sapiens
agcccctgaagaaaattcacgtgaaatgacagaaacgcagatgatgatacattccaagtcttcaaatggaaagtgaaatggattgtattttggtttatagtgacgtaaactgtatgacaaactttgcaggacttcccttataaagcaaaataattgttcagcttccaattagtattcttttatatttctttcattgggcgctttcccatctccaactcggaagtaagcccaagagaacaacataaagcaaacaacataaagcacaataaaaatgcaaataaatattttcatttttatttgtaaacgaatacaccaaaaggaggcgctcttaataactcccaatgtaaaaagttttgttttaataaaaaattaattattattcttgccaacaaatggctagaaaggactgaatagattatatattgccagatgttaatactgtaacatactttttaaataacatatttcttaaatccaaatttctctcaatgttagatttaattccctcaataacaccaatgttttgttttgtttcgttctgggtcataaaactttgttaaggaactcttttggaataaagagcaggatgctgcggaattc

SEQ ID NO: 2494 - DNA, 600 bp, Homo sapiens; identical to SEQ ID NO: 2493

SEQ ID NO: 2495 - DNA, 600 bp, Homo sapiens
ggcctcctgtgcagaatggccgaccagaccttcatctccatcgtggactgggcacgcaggtgcatggtcttcaaggagctggaggtggccgaccagatgacgctgctgcagaactgctggagcgagctgctggtgttcgaccacatctaccgccaggtccagcacggcaaggagggcagcatcctgctggtcaccgggcaggaggtggagctgaccacagtggccacccaggcgggctcgctgctgcacagcctggtgttgcgggcgcaggagctggtgctgcagctgcttgcgctgcagctggaccggcaggagtttgtctgcctcaagttcatcatcctcttcagcctggatttgaagttcctgaataaccacatcctggtgaaagacgctcaggagaaggccaacgccgccctgcttgactacaccctgtgccactacccgcactgcggggacaaattccagcagctgctgctgtgcctggtggaggtgcgggccctgagcatgcaggccaaggagtacctgtaccacaagcacctgggcaacgagatgccccgcaacaacctgctcatcgaaatgctgcaagccaagcagacttga

SEQ ID NO: 2496 - DNA, 1400 bp, Homo sapiens
ttctcagcagaccatttcaaattattaataaatgggccacctccctcttcttcaaggagcatccgtgatgctcagtgttcaaaaccacagccacttagtgatcagctccctaaaaccatgcctaagtacaggcggattagctatcttccaacaatgctgaccaccagacaattactgcatttttccagaagcccactattgcctttgtagtgctttcggcccagttctggcctcagcctcaaagtgcaccgactagttgcttgcctatacctggcacctcattaagatgctgggcagcagtataacaggaggaagagatccctctcctttggtcagattattatgttctcagttctctctccctgctacccctttctctgcagatagatagacactggcattatccctttaggaagaggggggggcagcaagagagcctatttgggacagcattcctctctctctgctgctgtgacatctccctctccttgctggctccatctttcgtctgcactaccaattcaatgcccttcatccaatgggtatctatttttgtgtgtgattatagtaactactccctgctttatatgccaccctcttccttctctttgacccctgtgactctttctgtaactttcccagtgacttcccctagccctgacccaggcactaggccttggtgacttcctggggccaagaaactaaggaaactcggctttgcaacaggcattactcgccattgattggtgcccacccagggcacactgtcggagttctatcacttgcttgacccctggacccataaaccagtccactgttatacccggggcactctaaccatcacaatcaatcaatcaaattcccttaaatttgtatggcactggaactttggcaaagcacttttgacaagttgtgtctgattggagcttcatgatagccttgtgacatctttagggcaggattcttatccccattttgcagatgaaaaccctgagtcacagatttctgtgggactgtggatctcactggaagctatccaagagcccactgtcaccttctagaccacatgatagggctagacagctcagttcaccatgattctcttctgtcacctctgctggcacaccagtggcaaggcccagaatggcgacctctctttagctcaatttctgggcctgaggtgctcagactgcccccaagatcaaatctctcctggctgtagtaacccagtggaatgaatttggacatgccccaatgcttctatatgctaagtgaaatctgtgtctgtaatttgttggggggtggatagggtggggtctccatctactttttgtcaccatcatctgaaatggggaaatatgtaaataaatatatcagcaaagcaaaaagaaaaaaaaaaa

SEQ ID NO: 2497 - DNA, 600 bp, Homo sapiens
gaggacatgacagaagaggccttccaaaaacacattcaggcattagcaattcgtcgactagacaaaccaaagaagctatctgctgagtgtgctaaatactggggagaaatcatctcccagcaatataattttgacagagataacactgaggttgcatatttaaagacacttaccaaggaagatatcatcaaattctacaaggaaatgttggcagtagatgctccaaggagacataaggtatccgtccatgttcttgccagggaaatggattcttgtcctgttgttggagagttcccatgtcaaaatgacataaatttgtcacaagcaccagccttgccacaacctgaagtgattcagaacatgaccgaattcaagcgtggtctgccactgtttccccttgtgaaaccacatattaacttcatggctgcaaaactctgaagattccccatgcatgggaaagtgcaagtggatgcattcctgagtcttccagagcctaagaaaatcatcttggccactttaatagtttctgattcactattagagaaacaaacaaaaaattgtcaaatgtcattatgtagaaatattataaatccaaagtaa

SEQ ID NO: 2498 - DNA, 600 bp, Homo sapiens; identical to SEQ ID NO: 2497

SEQ ID NO: 2499 - DNA, 600 bp, Homo sapiens
gtctttaggattttcaagttgtccagacactccaaaggtctccagattctaggtcagaccctcaaagccagcatgagagaattgggcctcctgatattctttctcttcataggggtcatccttttctctagtgctgtgtattttgcagaggccgatgagcgagagtcccagttccccagcatcccagatgccttctggtgggcagtcgtctccatgacaactgtaggctatggagacatggttccgactaccattgggggaaagatagtgggttccctatgtgcgattgcaggtgtgttaactattgccttaccggtccctgtcattgtgtccaatttcaactacttctaccaccgggagacagagggagaggagcaggcccaatacttgcaagtgacaagctgtccaaagatcccatcctcccctgacctaaagaaaagtagaagtgcctctaccattagtaagtctgattacatggagatccaggagggtgtaaataacagtaatgaggactttagagaggaaaacttgaaaacagccaactgtaccttggctaacacaaactatgtgaatattaccaaaatgttaactgatgtctga

SEQ ID NO: 2500 - DNA, 600 bp, Homo sapiens
tccatgaaaactaacaaccctttgaagctccgagcacttaaagtcaacttcatggagggtgaccccagtccactcctccccgttctagggatgtaccatgaccctctcaggaaccgggggagtgctgcggctgctgtcgctggactggagtgtgccacgcttttggacaaggctgtgctgagcccagagtcctccatctacaccacagcaagtgctaagacacccccccggtctcctgagaaacacacagcaatagcgttcaactttgaggcgggtgtccaccagtacattgacgcagacacagatgatgagggacagctgctctacagtgtggactccagcccccccaaaagcctccctgggagcaccagtccgaagttcagcacggggacaagatcggagaaaaaccactttgaaagctcccctttacccacctcccctaagttcttaaggcagaactgtatttactccacagaagcattgactggaaaaggccccagtggtcaggaaaagtgcaaacttgagaaccacatctcccctgacgtccgtgtgttgccagggggaggagcccatggaagcacacgagatcagagcatctga

SEQ ID NO: 2501 - DNA, 600 bp, Homo sapiens
gtccgcttcgtgcgcatcttgcgcatctttaagctgacccgccactttgtgggcctgcgggtcctgggccacacgctccgagccagcaccaacgagttcctgctgctcatcatcttcctggccttgggcgtgctgatcttcgccaccatgatctactacgccgagaggataggggcacagcccaatgaccccagtgccagtgagcacacgcactttaagaacatccccatcggcttctggtgggccgtggtcaccatgacgaccctgggctatggagacatgtacccgcagacgtggtccggcatgctggtgggggctctgtgtgcgctggcgggcgtgctcaccatcgccatgcccgtgcccgtcatcgtgaacaatttcgggatgtattactccttagccatggctaagcagaaactaccaaagaaaaaaaagaagcatattccgcggccaccgcagctgggatctcccaattattgtaaatctgtcgtaaactctccacaccacagtactcagagtgacacatgtccgctggcccaggaagaaattttagaaattaacagagcaggtaggaaacctctcagaggcatgtcgatctga

SEQ ID NO: 2502 - DNA, 600 bp, Homo sapiens; identical to SEQ ID NO: 2501

SEQ ID NO: 2503 - DNA, 600 bp, Homo sapiens
ccccctccccccgggctcttgtcaccgcctgagacctcgcgagactttcggtcccccccgccccttccccccaggttagcaattgggaatggctgggagggggtgtccccaagacactgggcttcaaatctccccccaagccctccctcctacgatcaagacaccttttgtccagacagctcccttagcgttgcctggaaaagccacagagctccctgcgggggtgcagaaccctgcaggcagccccaggctttgcagaaaccacacacactgttgctggatcttgagtcccattagctgtgagatgcctgtgagagccttcccgcacccgtcagaagctcagagccttcttggaccctttaaagatgtccctctccccagccctccgcctcaccgccccccacccccgaccccgtccttagaatcttctggaggagcctccctccccccccaccccccccccactgctcctggagttctcatctgattccccaagggcactgccagcttcgctccactcagcccccttgcagaccccaccccctgcctgctctctttccctacaactaggtcagcccccagccccgccacggcggccgc

SEQ ID NO: 2504 - DNA, 600 bp, Homo sapiens
ctggccctgggtgtgctcatctttgccaccatgatctactacgctgagcgcattggggccaggccctccgaccctcggggtaatgaccacaccgacttcaagaacatccccattggcttctggtgggctgtggtcaccatgacgacactgggctacggagacatgtaccccaagacgtggtcaggcatgctggtaggggcactgtgtgcactggctggcgtgctcaccatcgccatgccggtgcctgtcatcgtcaacaacttcggcatgtactactccctggccatggccaagcagaagctgcccaagaaacggaagaagcacgtgccacggccggcgcagctggagtcacccatgtactgcaagtctgaggagacttccccccgggacagcacctgcagtgataccagcccccctgcccgggaagagggtatgatcgagaggaaacgggcaggtgagattaggggttgggaaggaaaatcccttttcccccagtggcctagggagtttccaaatggacctcagaccttgggatttggcatgtgttttgtgtggggcttccctaagcataaagatgtgcctttatgagggcaaagtgtt

SEQ ID NO: 2505 - DNA, 1400 bp, Homo sapiens
gccccatgacagccttgacctgaactgcgacagccgggacttcgtggctgccattatcagcatccctacccctcctgccaacaccccagatgagagccaaccttcctcccctggcggcggtggcagggccggcagcaccctcaggaactccagcctgggtaccccttgcctcttccccgagactgtcaagatctcatccctgtgaggggtaggcctgctgattcagagggtcctcttcatttttgggaactcctttccaaagccatatttttgggaggcagagaggggcaggcttgggcaccccttctgccccccccactgagaactatgcaatggagtttcatgaaatggtccacatagtggggaagtagccaggaaatgagaaacttcctcccaccccagacatttttcctggtgggagctgaagcactgggcttccacaggcccctggcctccttgccctagcacactgggactggccccactctcccagctggactcctgcatgctcctccccttgggctctcagatgaaggcaaagctttgatccgacatctgagctctagcctaagaaggagagttgagatttcctcctccctctggctgggatatggagctttggaggttcagagaagagaaccctcacctctgatctggcctctacgagaggtcctcatctccatctggcccaacaattcccagattctgaagcttggaatgcaaacacaggcttcatgggctgtggcctctgcagcgacctgccatccccaggccttgcctgaggggtcaggctgcctctcccaacacacactcagatagcacaaattctaccatccccttccctggctgctggaaatggaccccgcaaccctgtcctctgctgggcccccagcaaactctagcaatagcagctgctgccgtgtcattatgcaaagcctctgaccagtttgctgcagcatttacatctgccctaatcagaggggccacctctaactcctcctcctcctctcttctcctctggtttgcgtccttcctgggttgggctggagtctggactggctgagataagagcctggcaaccagcaagagctgggctgtatttggagatcatgggctgattccatgttcttgggcaacagtccagaagcatcaggggctccggcctgggatgtttctgaactttgggagttataggagacaggaggaacttctcctcctcctcctcccctacaattccttttcacatattcctttcttctccctcttgggtgaccttccaaaactctgctctcaggctgaaatctggcatcatctcaggttccctgtccccagcactgtccccatggagctggtggctgacaaagatgtagtttccatcagtcaataaaacctgagaggag

SEQ ID NO: 2506 - DNA, 1400 bp, Homo sapiens; identical to SEQ ID NO: 2505

SEQ ID NO: 2507 - DNA, 600 bp, Homo sapiens
gttccaaggaggaggcgggcatcatccggatgctggagttcggcagccacctggacctggagcgcatgcaggcttccctcccgctggacaacatctcctaccgcagggagtctgccatctgacctccaggcccggccctcaccactgcccacaagagcctctgccgggggtgggatgccaggacaccccctcccacactcaggacagagccaaccctggctccgtggaccttctggaggaaggtgggggtttcaaagactgggggaccccttcctcctgactccagcacccaggcctgggaagagctcggccccgatcagcctgagttccgccagcgcctacttctggtggctctaggtccccggatccaccacccttcccccactgactcttcaaggacgtgccctctttgctctcagaaccttggggaaggtggctggactgctgggcgggggacatctcggggtttcagggtgggcagggggttagtttggggaggggggggtgcgtttcttttgcatgactgtggcctgttgctcatgactttcttttgtaaatatctataaatggagacagatggagacaccaaaaaaaaaaaaa

SEQ ID NO: 2508 - DNA, 600 bp, Homo sapiens; identical to SEQ ID NO: 2507

SEQ ID NO: 2509 - DNA, 1400 bp, Homo sapiens
catccgagaccgcctccccaaagcccgcttcatcgccaagagcggggcctgcaacctggcgcataagaacatccgtgagcaaggacgctttctacaggacatcttcaccaccttggtggacctgaaatggcgccacacgctggtcatctttaccatgtccttcctctgcagctggctgctcttcgctatcatgtggtggctggtggcctttgcccatggggacatctatgcttacatggagaaaagtggaatggagaaaagtggtttggagtccactgtgtgtgtgactaatgtcaggtctttcacttctgcttttctcttctccattgaagttcaagttaccattgggtttggagggaggatgatgacagaggaatgccctttggccatcacggttttgattctccagaatattgtgggtttgatcatcaatgcagtcatgttaggctgcattttcatgaaaacagctcaggctcacagaagggcagaaactttgattttcagccgccatgctgtgattgccgtccgaaatggcaagctgtgcttcatgttccgagtgggtgacctgaggaaaagcatgatcattagtgcctctgtgcgcatccaggtggtcaagaaaacaactacacctgaaggggaggtggttcctattcaccaactggacattcctgttgataacccaatcgagagcaataacatttttctggtggcccctttgatcatctgccacgtgattgacaagcgcagtcccctgtatgacatctcagcaactgacctggccaaccaagacttggaggtcatagttattctggaaggagtggttgaaactactggcatcaccacacaagcacgaacctcctacattgctgaggagatccaatggggccaccgctttgtgtccattgtgactgaggaagaaggagtgtattctgtggattactccaaatttggcaacactgttaaagtagctgctccacggtgcagtgcccgagagctggatgagaaaccttccatccttattcagaccctccaaaagagtgaactgtctcatcaaaattctctgaggaagcgcaactccatgagaagaaacaattccatgaggaggaacaattctatccgaaggaacaattcttccctcatggtaccaaaggtgcaatttatgactccagaaggaaatcaaaacacatcggaatcatgacagcaagataaccccaagacagtcttttatcaagttttgacggtttatgctgggcactgccagactgaaccagagctggaacacaataatgtgtccttctacattttattacactaaatgatattcatattcaagcaacagcactttctgtagtaataaaaagtaacacaccaagtggaggattcatggcttatgcttgttt

SEQ ID NO: 2510 - DNA, 1400 bp, Homo sapiens
ggtcgctccgacggctaccgctggtgcgccaccaccgccaactacgaccgggacaagctcttcggcttctgcccgacccgagctgactcgacggtgatggggggcaactcggcgggggagctgtgcgtcttccccttcactttcctgggtaaggagtactcgacctgtaccagcgagggccgcggagatgggcgcctctggtgcgctaccacctcgaactttgacagcgacaagaagtggggcttctgcccggaccaaggatacagtttgttcctcgtggcggcgcatgagttcggccacgcgctgggcttagatcattcctcagtgccggaggcgctcatgtaccctatgtaccgcttcactgaggggccccccttgcataaggacgacgtgaatggcatccggcacctctatggtcctcgccctgaacctgagccacggcctccaaccaccaccacaccgcagcccacggctcccccgacggtctgccccaccggaccccccactgtccacccctcagagcgccccacagctggccccacaggtcccccctcagctggccccacaggtccccccactgctggcccttctacggccactactgtgcctttgagtccggtggacgatgcctgcaacgtgaacatcttcgacgccatcgcggagattgggaaccagctgtatttgttcaaggatgggaagtactggcgattctctgagggcagggggagccggccgcagggccccttccttatcgccgacaagtggcccgcgctgccccgcaagctggactcggtctttgaggagccgctctccaagaagcttttcttcttctctgggcgccaggtgtgggtgtacacaggcgcgtcggtgctgggcccgaggcgtctggacaagctgggcctgggagccgacgtggcccaggtgaccggggccctccggagtggcagggggaagatgctgctgttcagcgggcggcgcctctggaggttcgacgtgaaggcgcagatggtggatccccggagcgccagcgaggtggaccggatgttccccggggtgcctttggacacgcacgacgtcttccagtaccgagagaaagcctatttctgccaggaccgcttctactggcgcgtgagttcccggagtgagttgaaccaggtggaccaagtgggctacgtgacctatgacatcctgcagtgccctgaggactagggctcccgtcctgctttgcagtgccatgtaaatccccactgggaccaaccctggggaaggagccagtttgccggatacaaactggtattctgttctggaggaaagggaggagtggaggtgggctgggccctctcttctcacctttgttttttgttggagtgtttctaataaacttggattctctaaccttt

SEQ ID NO: 2511 - DNA, 600 bp, Homo sapiens
ggcaggccaggccaagccaagcagggggccacagggtgggctgtggagctctcaggaagggccctgaggaaggcacacttgctcctgttggtccctgtccttgctgcccaggcagcgtggaggggaagggtagggcagccagagaaaggagcagagaaggcacacaaacgaggaatgaggggcttcacgagaggccacagggcctggctggccacgctgtcccggcctgctcaccatctcagtgaggggcaggagctggggctcgcttaggctgggtccacgcttccctggtgccagcacccctcaagcctgtctcaccagtggcctgccctctcgctcccccacccagcccacccattgaagtctccttgggccaccaaaggtggtggccatggtaccggggacttgggagagtgagacccagtggagggagcaagaggagagggatgtcgggggggtggggcacggggtaggggaaatggggtgaacggtgctggcagttcggctagatttctgtcttgtttgtttttttgttttgtttaatgtatatttttattataattattatatatgaattccaaaaaaaaaaaaaaaaaaaaa

SEQ ID NO: 2512 - DNA, 600 bp, Homo sapiens; identical to SEQ ID NO: 2511

SEQ ID NO: 2513 - DNA, 600 bp, Homo sapiens
aaacagtatagaaaacattactttaactaaaagctggaaaaattttcagttgggatgcgactgacaaaaagaacgggatttccaggcataaagttggcgtgagctacagagggcaccatgtggctcagtggaagacccttcaagattcaaagttccatttgacagagcaaaggcacttcgcaaggagaagggtttaaattatgggtccaaaagccaagtggtaaagcgagcaatttgcagcataactgcttctcctagacagggctgagtgggcaaaatacgacagtacacacagtgactattagccactgccagaaacaggctgaacagccctgggagacaagggaaggcaggtggtgggagttgttcatggagagaaaggagagttttagaaccagcacatccactggagatgctgggccaccagacccctcccagtcaataaagtctggtgcctcatttgatctcagcctcatcatgaccctggagagaccctgataccatctgccagtccccgacagcttaggcactccttgccatcaacctgaccccccgagtggttctccaggctccctgccccacccattcaggccggaattc

SEQ ID NO: 2514 - DNA, 600 bp, Homo sapiens; identical to SEQ ID NO: 2513

SEQ ID NO: 2515 - DNA, 600 bp, Homo sapiens
ctaaggaaaccgttctgtgatatcatggaacccaagtttgattttgccatgaagttcaatgcactggaactggatgacagtgatatctccctttttgtggctgctatcatttgctgtggagatcgtcctggccttctaaacgtaggacacattgaaaaaatgcaggagggtattgtacatgtgctcagactccacctgcagagcaaccacccggacgatatctttctcttcccaaaacttcttcaaaaaatggcagacctccggcagctggtgacggagcatgcgcagctggtgcagatcatcaagaagacggagtcggatgctgcgctgcacccgctactgcaggagatctacagggacatgtactgagttccttcagatcagccacaccttttccaggagttctgaagctgacagcactacaaaggagacgggggagcagcacgattttgcacaaatatccaccactttaaccttagagcttggacagtctgagctgtaggtaaccggcatattattccatatctttgttttaaccagtacttctaagagcatagaactcaaatgctgggggaggtggctaatctcaggactgggaag

SEQ ID NO: 2516 - DNA, 600 bp, Homo sapiens; identical to SEQ ID NO: 2515

SEQ ID NO: 2517 - DNA, 600 bp, Homo sapiens
gcttcatgacaagggagtttctaaagagcctgcgaaagccttttggtgactttatggagcccaagtttgagtttgctgtgaagttcaatgcactggaattagatgacagcgacttggcaatatttattgctgtcattattctcagtggagaccgcccaggtttgctgaatgtgaagcccattgaagacattcaagacaacctgctacaagccctggagctccagctgaagctgaaccaccctgagtcctcacagctgtttgccaagctgctccagaaaatgacagacctcagacagattgtcacggaacacgtgcagctactgcaggtgatcaagaagacggagacagacatgagtcttcacccgctcctgcaggagatctacaaggacttgtactagcagagagtcctgagccactgccaacatttcccttcttccagttgcactattctgagggaaaatctgaccataagaaatttactgtgaaaaagcgttttaaaaagaaaagggtttagaatatgatctattttatgcatattgtttataaagacacatttacaatttacttttaatattaaaaattaccatattatgaaattgc

SEQ ID NO: 2518 - DNA, 600 bp, Homo sapiens; identical to SEQ ID NO: 2517

SEQ ID NO: 2519 - DNA, 1400 bp, Homo sapiens
atttagtaccttgtggtgtatttatgaagatcgtaactacagattttaggaaaagcggtccacattgttcagagagcatccacaggtcctgggatgccattaatcgactctcaaatactggcagtggtttgcagtggcttactggagcccttcacttatgcagcccattaacttctcaggacatccaacatttgaaagactggatctctgaaacctgggtgaatctggcaatggtggactatccttatgcctctaactttttacagcctttgcctgcttggcctatcaaggtagtgtgccagtatttgaaaaatcccaacgtatctgattcactgctgctgcagaatattttccaagctctgaatgtatattacaattattcgggccaggtgaaatgcctgaatatttcagagacagcaactagcagtctgggaacactgggttggagctatcaggcctgcacagaagtagtcatgcccttttgtactaatggtgtcgatgacatgtttgaacctcactcatggaacttaaaggaactttctgatgactgttttcaacagtggggtgtgagaccaaggccctcctggatcactactatgtatggaggcaaaaacattagttcacacacaaacattgttttcagcaatggtgaactagacccctggtcaggaggtggagtaactaaggatatcacagacactctggttgcagtcaccatctcagagggggcccaccacttagatctccgcaccaagaatgccttggatcctatgtctgtgctgttagcccgctccttggaagttagacatatgaagaattggatcagagatttctatgacagtgcaggaaagcagcactgagaaacttttgattgttttcaatttcttcttttatgttcacaccaccacattcccattcactttgattttctacatgtaattaccttcttttgtttatcattagatttgatggggccaaagttgagatagaatagagggtgatgacggtaagagcaagtgtcccatgaatgtgatttcctgggttctcactgtctttgcaccacgtctaggaagaatcttcttgatagctctcccacaccatcagtggccctcataactggagtagagttcctggttgcttttcataagagggagagttactttctttgtatctctgcaagcagagatttctctttggttttgaggttgaagtgtctttggcccatttgtaagtccccatccctaccctacacaaagtaaaagcagaagatagataaaaaatgatgtaattgcagctggtaggatgtctggtgcccaatcccaggaagtgagagccatttcttttgtactggatttaatgactttgaactgtgctgtaaataaataatacagctggacctt

SEQ ID NO: 2520 - DNA, 969 bp, Homo sapiens
ggatttccgggctccatggcaagatcccttctcctgcccctgcagatcctactgctatccttagccttggaaactgcaggagaagaagcccagggtgacaagattattgatggcgccccatgtgcaagaggctcccacccatggcaggtggccctgctcagtggcaatcagctccactgcggaggcgtcctggtcaatgagcgctgggtgctcactgccgcccactgcaagatgaatgagtacaccgtgcacctgggcagtgatacgctgggcgacaggagagctcagaggatcaaggcctcgaagtcattccgccaccccggctactccacacagacccatgttaatgacctcatgctcgtgaagctcaatagccaggccaggctgtcatccatggtgaagaaagtcaggctgccctcccgctgcgaaccccctggaaccacctgtactgtctccggctggggcactaccacgagcccagatgtgacctttccctctgacctcatgtgcgtggatgtcaagctcatctccccccaggactgcacgaaggtttacaaggacttactggaaaattccatgctgtgcgctggcatccccgactccaagaaaaacgcctgcaatggtgactcagggggaccgttggtgtgcagaggtaccctgcaaggtctggtgtcctggggaactttcccttgcggccaacccaatgacccaggagtctacactcaagtgtgcaagttcaccaagtggataaatgacaccatgaaaaagcatcgctaacgccacactgagttaattaactgtgtgcttccaacagaaaatgcacaggagtgaggacgccgatgacctatgaagtcaaatttgactttacctttcctcaaagatatatttaaacctcatgccctgttgataaaccaatcaaattggtaaagacctaaaaccaaaacaaataaagaaacacaaaaccctcaa

SEQ ID NO: 2521 - DNA, 600 bp, Homo sapiens
ctctgtgattgttcatttttttctgctacttttgggtagaaaaaagattcaattgcttggctgtagctttctctcatatatatcaccctaaatataatgaagatcttttagtgtgtatcattttccttttagaaactagtattctcttatttcttactttaatgtacttctatcactgcatttattttgcctgtgcataggagcaattaggatctaaaaaaatatatgggaagataaaagatctaagaacaagtacttgctggaaaattagttggctggacattgataaaataatgcatttataacaattacatgtgtttttgggaacaaggaaaatttctcaaaaaagaatatttcacacatcccttcttttgaatggcctctttgtgaccagccagacctcaggtcttcactctttcttctttgtaaaccatgtcatgtggaaagatttcctcagttagtgagcttgtgtctgcaaattgattttgtttgtaatgtattttgatagcaaatcatgctgcatctatatctttttcttgtttgagctgttactacattgtacatggcatgtgggatcaattaaaaatttgttttaaaaat

SEQ ID NO: 2522 - DNA, 600 bp, Homo sapiens
gcatggagctgttccgagccttgggctgcagcgagctcatcagctccatctttgacttctcccactccctaagtgccttgcacttttccgaggatgagattgccctctacacagcccttgttctcatcaatgcccatcggccagggctccaagagaaaaggaaagtagaacagctgcagtacaatctggagctggcctttcatcatcatctctgcaagactcatcgccaaagcatcctggcaaagctgccacccaaggggaagcttcggagcctgtgtagccagcatgtggaaaggctgcagatcttccagcacctccaccccatcgtggtccaagccgctttccctccactctacaaggagctcttcagcactgaaaccgagtcacctgtgggctgtccaagtgacctggaagagggactccttgcctctccctatggcctgctggccacctccctggaccccgttccaccctcacccttttcctttcccatgaaccctggagggtggtccccaccagctctttggaagtgagcagatgctgcggctggctttctgtcagcaggccggcctggcagtgggacaatcgccagagggtggg

SEQ ID NO: 2523 - DNA, 600 bp, Homo sapiens
tccccttcattgggggcatgctacaagccctcatcaccgctatgggcacgtcttccagctcggcaacgctgcccatcaccttccgctgcctggaggagggcctgggtgtggaccgccgcatcaccaggttcgtcctgcccgtgggcgccacggtcaacatggatggcactgccctctacgaggccctggctgccatcttcattgctcaagttaacaactacgagctcaacctgggtcagatcacaaccatcagcatcacggccacagcagccagtgttggggctgctggcatcccccaggcgggtctggtcaccatggtcattgtgcttacgtcggtcggcttgcccacggaagacatcacgctcatcatcgccgtggactggttccttgaccggcttcgcacaatgaccaacgtactgggggactcaattggagcggccgtcatcgagcacttgtctcagcgggagctggagcttcaggaagctgagcttaccctccccagcctggggaaaccctacaagtccctcatggcacaggagaagggggcatcccggggacggggaggcaacgagagtgctatgtgaggggcctccagctctg

SEQ ID NO: 2524 - DNA, 600 bp, Homo sapiens; identical to SEQ ID NO: 2523

SEQ ID NO: 2525 - DNA, 1400 bp, Homo sapiens
gggcaggaaataacctcactatcccggctgccctttctgggcaccggggcctcggacttagctgggagaaagagagagcttctgttgctgcctcatgctaagactcagtggggaggggctgtgggcgtgagacctgcccctcctctctgccctaatgcgcaggctggccctgccctggtttcctgccctgggaggcagtgatgggttagtggatggaaggggctgacagacagccctccatctaaactgccccctctgccctgcgggtcacaggagggagggggaaggcagggagggcctgggccccagttgtatttatttagtatttattcacttttatttagcaccagggaaggggacaaggactagggtcctggggaacctgacccctgacccctcatagccctcaccctggggctaggaaatccagggtggtggtgataggtataagtggtgtgtgtatgcgtgtgtgtgtgtgtgtgaaaatgtgtgtgtgcttatgtatgaggtacaacctgttctgctttcctcttcctgaattttattttttgggaaaagaaaagtcaagggtagggtgggccttcagggagtgagggattatctttttttttttttctttctttctttcttttttttttttgagacagaatctcgctctgtcgcccaggctggagtgcaatggcacaatctcggctcactgcatcctccgcctcccgggttcaagtgattctcatgcctcagcctcctgagtagctgggattacaggctcctgccaccacgcccagctaatttttgttttgttttgtttggagacagagtctcgctattgtcaccagggctggaatgatttcagctcactgcaaccttcgccacctgggttccagcaattctcctgcctcagcctcccgagtagctgagattataggcacctaccaccacgcccggctaatttttgtatttttagtagagacggggtttcaccatgttggccaggctggtctcgaactcctgaccttaggtgatccactcgccttcatctcccaaagtgctgggattacaggcgtgagccaccgtgcctggccacgcccaactaatttttgtatttttagtagagacagggtttcaccatgttggccaggctgctcttgaactcctgacctcaggtaatcgacctgcctcggcctcccaaagtgctgggattacaggtgtgagccaccacgcccggtacatattttttaaattgaattctactatttatgtgatccttttggagtcagacagatgtggttgcatcctaactccatgtctctgagcattagatttctcatttgccaataataatacctcccttagaagtttgttgtgaggattaaataatgtaaataaagaactagcataac

SEQ ID NO: 2526 - DNA, 1400 bp, Homo sapiens; identical to SEQ ID NO: 2525

SEQ ID NO: 2527 - DNA, 600 bp, Homo sapiens
tctcaagggagcagctgtggaaatctgtcacatcgtactcaataccactttctgtctccaaacacaaaacttcctctgcgggcctcttcgctacacaattgaagatggagcccgtgtggggttccaggtagagtttttggagttgctctttcacttccatggaacactacgaaaactgcagctccaagagcctgagtatgtgctcttggctgccatggccctcttctctcctgaccgacctggagttacccagagagatgagattgatcagctgcaagaggagatggcactgactctgcaaagctacatcaagggccagcagcgaaggccccgggatcggtttctgtatgcgaagttgctaggcctgctggctgagctccggagcattaatgaggcctacgggtaccaaatccagcacatccagggcctgtctgccatgatgccgctgctccaggagatctgcagctgaggccatgctcacttccttccccagctcacctggaacaccctggatacactggagtgggaaaatgctgggaccaaagattgggccgggttcaaagggagcccagtggttgcaatgaaagactaaagcaaaac

SEQ ID NO: 2528 - DNA, 1400 bp, Homo sapiens
accaaaaacgctgtgtacaagtgtaaaaacgggggcaactgtgtgatggatatgtacatgcgaagaaagtgtcaagagtgtcgactaaggaaatgcaaagagatgggaatgttggctgaatgcttgttaactgaaattcagtgtaaatctaagcgactgagaaaaaatgtgaagcagcatgcagatcagaccgtgaatgaagacagtgaaggtcgtgacttgcgacaagtgacctcgacaacaaagtcatgcagggagaaaactgaactcaccccagatcaacagactcttctacattttattatggattcatataacaaacagaggatgcctcaggaaataacaaataaaattttaaaagaagaattcagtgcagaagaaaattttctcattttgacggaaatggcaaccaatcatgtacaggttcttgtagaattcacaaaaaagctaccaggatttcagactttggaccatgaagaccagattgctttgctgaaagggtctgcggttgaagctatgttccttcgttcagctgagattttcaataagaaacttccgtctgggcattctgacctattggaagaaagaattcgaaatagtggtatctctgatgaatatataacacctatgtttagtttttataaaagtattggggaactgaaaatgactcaagaggagtatgctctgcttacagcaattgttatcctgtctccagatagacaatacataaaggatagagaggcagtagagaagcttcaggagccacttcttgatgtgctacaaaagttgtgtaagattcaccagcctgaaaatcctcaacactttgcctgtctcctgggtcgcctgactgaattacggacattcaatcatcaccacgctgagatgctgatgtcatggagagtaaacgaccacaagtttaccccacttctctgtgaaatctgggacgtgcagtgatggggattacaggggaggggtctagctcctttttctctctcatattaatctgatgtataactttcctttatttcacttgtacccagtttcactcaagaaatcttgatgaatatttatgttgtaattacatgtgtaacttccacaactgtaaatattgggctagatagaacaactttctctacattgtgttttaaaaggctccagggaatcctgcattctaattggcaagccctgtttgcctaattaaattgattgttacttcaattctatctgttgaactagggaaaatctcattttgctcatcttaccatattgcatatattttattaaagagttgtattcaatcttggcaataaagcaaacataatggcaacagaaaaaaaaaaaaaaaaaaaaaaaaaaaaaaaaaaaaaaaaaaaaaaaaaaaaaaaaaaaaaaaaaaaaaa

SEQ ID NO: 2529 - DNA, 600 bp, Homo sapiens
ggcggcccctgctggcaggctatgccctgggtgtgggactcttcctgcttctgctccagcccctcacggaccccaagctctacggcagccttcccctttgtgtgcttttggagcgggcaggggactcagaggctcccctgtgctcctgacctatgctcctgggatacgctatgaactctcaccggctccccaagccctccccaccaaggggtactgcaggggaagggctggctggggtccccgaagatctcaggaatttttgtagggattgaagccagagctagttgcgtcccagggaccaagagaaagaagcagatatccaaagggtgcagccccttttgaaaggggtgtttacgagcagctgtgagtgaggggacaaggggcaggtcccaggagccacacactcccttcctcactttggactgctgcttctcttagctcctctgcctctgaaaagctgctcggggttttttatttataaaacctctccccaccccccaccccccaacttcctgggttttctcattgtctttttgcatcagtactttgtatgggatattaaagagatttaacttgggtaacatggcttgggcctttggg

SEQ ID NO: 2530 - DNA, 600 bp, Homo sapiens; identical to SEQ ID NO: 2529

SEQ ID NO: 2531 - DNA, 600 bp, Homo sapiens
catttttcttgctgcctttttcacccaagattcagcagtcagatgtttactgcacacctattacctattatttgctgttcttgcatggttcaaaccaccattctgtagccacccatcctttgccttatctaacaaacatttttccaggaaggtggaaaaggaagtgttgctctcattgtgtgactcagtgctgctgtccatcccatggaaacatgggcacaatcaagtatttgtccagcctattgcaggcttttcctgactttaaaataaattgtgatcaataatagtacctttgattatacatttattattgtgtctctctctgatgtactgtggattgtacatttaactttggaatggctttgtaataatcagtcttaagaaaatgttgacaagctctggttgcttatttttagaaaatgaggacatttaataataataaaaaaaaagggattaatagcttttgacctcaagtcttttgtcttctgagtgttggagcttggctgaagacatgtttaatactgtacaatttctgaagatggttattaacactgtgctgttaagcatccatttaaaaatatgttatcttctttgcctgcc

SEQ ID NO: 2532 - DNA, 600 bp, Homo sapiens
gctggccatttagaggaattctaggacagtgggagctgtgttactagcactatataattccggtcagtgctgacaaataacatttaacaagtattgcagtaatcatcacttacaggtaccatttatttcaaaacaacttttttagtctgctccaaagttaaaataattaactagctaagcattattattcaactggtctaaaaactattgttatctttttttttccttttcactgttatggccttttcacatttctaaatcccatcttgatatactatgaatactctagaatgatgtaaagcagataggaatgtatgtgtacatatttattgcatacttgcacatcaaatcgatgtacatagtttaacacgtggtccttttgtgaaacctagaactcagaggattgctttttttctttcagcctattttgagttaacttcagtcctttcttagggaaatgacagggcaaagcaatttttctgttggctttgggctgtatttgtgcactaaatctttattctaaaaaaaaaaatggaaactttaatttttttaaaacgggaatttcatttacagctacattaaaatcttaatgagaaaaat

SEQ ID NO: 2533 - DNA, 1400 bp, Homo sapiens
gatcaaaacagaagggaacctggagcaagccaaccaggagctgcggattgtcatcaaaaagatctggaagcggatgaaacagaagctgctagatgaggtcatccccccaccagacgaggaggaggtcaccgtgggcaaattctacgccacatttctgatccaggactatttccgcaaattccggcggaggaaagaaaaagggctactaggcaacgacgccgcccctagcacctcttccgcccttcaggctggtctgcggagcctgcaggacttgggtcctgagatgcggcaggccctcacctgtgacacagaggaggaggaagaagaggggcaggagggagtggaggaggaagatgaaaaggacttggaaactaacaaagccacgatggtctcccagccctcagctcgccggggctccgggatttctgtgtctctgcctgtcggggacagacttccagattcactctcctttgggcccagtgatgatgacagggggactcccacctccagtcagcccagtgtgccccaggctggatccaacacccacaggagaggctctggggctctcattttcaccatcccagaagaaggaaattctcagcccaagggaaccaaagggcaaaacaagcaagatgaggatgaggaagtccctgatcggctttcctacctagatgagcaggcagggactcccccgtgctcagtccttttgccacctcacagagctcagagatacatggatgggcacctggtaccacgccgccgtctgctgccccccacacctgcaggtcggaagccctccttcaccatccagtgtctgcagcgccagggcagttgtgaggatttacccatcccaggcacctatcatcgtgggcgaaattcagggcccaatagggctcagggttcctgggcaacaccacctcagcggggtcggctcctgtatgccccgctgttgttggtggaagagggcgcagcgggggaggggtacctcggcagatccagtggcccactgcgcaccttcacctgtctgcacgtgcctggaacccactcggaccccagccatgggaagaggggcagtgccgacagcttggtggaggctgtgcttatctcagagggtctgggcctctttgctcgagacccacgtttcgtggccctggccaagcaggagattgcagatgcgtgtcgcctgacgctggatgagatggacaatgctgccagtgacctgctggcacagggaaccagctctctctatagcgacgaggagtccatcctctcccgcttcgatgaggaggacttgggagacgagatggcctgcgtccacgccctctgaattcccacccctccccaactgctcaataaacctcctgccctcccctccccagcaggaggcaggcatggaccac

SEQ ID NO: 2534 - DNA, 600 bp, Homo sapiens
attgtcgtgaatgctgtggttgtgctcaatgtctccttgcggtctccacacacacactccatggcccgaggggtccgcaaggtgttcctgaggctcttgccccagctgctgaggatgcacgttcgcccgctggccccggcagctgtgcaggacacccagtcccggctacagaatggctcctcgggatggtcgatcacaactggggaggaggtggccctctgcctgcctcgcagtgaactcctcttccagcagtggcagcggcaagggctggtggcggcagcgctggagaagctagagaaaggcccggagttagggctgagccagttctgtggcagcctgaagcaggctgccccagccatccaggcctgtgtggaagcctgcaacctcattgcctgtgcccggcaccagcagagtcactttgacaatgggaatgaggagtggttcctggtgggccgagtgctggaccgcgtctgcttcctggccatgctctcgctcttcatctgtggcacagctggcatcttcctcatggcccactacaaccgggtgccggccctgccattccctggagatccacgcccctacctgccctcaccagactga

SEQ ID NO: 2535 - DNA, 600 bp, Homo sapiens
cacaatctccctgactgctctaccatcctgcccctctactccaagaagtacattgccttctgcatcagcatcttcacggccatcctggtgaccatcgtgatcctctacgcacgcatctacttcctggtgaagtccagcagccgtaaggtggccaaccacaacaactcggagcggtccatggcactgctgcggaccgtggtgattgtggtgagcgtgttcatcgcctgctggtccccactcttcatcctcttcctcattgatgtggcctgcagggtgcaggcgtgccccatcctcttcaaggctcagtggttcatcgtgttggctgtgctcaactccgccatgaacccggtcatctacacgctggccagcaaggagatgcggcgggccttcttccgtctggtctgcaactgcctggtcaggggacggggggcccgcgcctcacccatccagcctgcgctcgacccaagcagaagtaaatcaagcagcagcaacaatagcagccactctccgaaggtcaaggaagacctgccccacacagacccctcatcctgcatcatggacaagaacgcagcacttcagaatgggatcttctgcaactga

SEQ ID NO: 2536 - DNA, 600 bp, Homo sapiens; identical to SEQ ID NO: 2535

SEQ ID NO: 2537 - DNA, 600 bp, Homo sapiens
ggtgggagacatgttcaattacttcctctctctggccattggggtctttctgttcccagccttcctcacagcctctgcctatgtgctgatgatcagaatgctgcgatcttctgccatggatgaaaactcagagaagaaaaggaagagggccatcaaactcattgtcactgtcctggccatgtacctgatctgcttcactcctagtaaccttctgcttgtggtgcattattttctgattaagagccagggccagagccatgtctatgccctgtacattgtagccctctgcctctctacccttaacagctgcatcgacccctttgtctattactttgtttcacatgatttcagggatcatgcaaagaacgctctcctttgccgaagtgtccgcactgtaaagcagatgcaagtatccctcacctcaaagaaacactccaggaaatccagctcttactcttcaagttcaaccactgttaagacctcctattgagttttccaggtcctcagatgggaattgcacagtaggatgtggaacctgtttaatgttatgaggacgtgtctgttatttcctaatcaaaaaggtctcaccacataccaccg

SEQ ID NO: 2538 - DNA, 600 bp, Homo sapiens; identical to SEQ ID NO: 2537

SEQ ID NO: 2539 - DNA, 600 bp, Homo sapiens
taaaactcaaacagttagtgaaattttcattagacgctgctgctggtatgttgtatctcgagagtaaaaactgtatacacagggaccttgctgcaagaaactgcctggtaggtgaaaataatgttctgaaaatcagtgactttggaatgtctcgtcaagaggatggtggagtgtattcatcttctggcttaaagcagattcccattaaatggacagcaccggaagctcttaattatgggagatacagttcagagagtgacgtgtggagctttggcatccttctctgggagaccttcagcttaggggtttgtccgtaccctggaatgacaaatcagcaagcaagagagcaagtagaaagaggataccggatgtcagctccccagcactgtccagaggatatttccaaaatcatgatgaagtgttgggattataaacctgaaaatcgccctaagttcagtgaacttcagaaagagctcactatcatcaagagaaaactcacatagtgacaggatggcgccaaactcagccttcaggactctgtcctccagcagagtaacattattgttctcattaacaatgaatttataccacattaccttc

SEQ ID NO: 2540 - DNA, 600 bp, Homo sapiens
gtcattatattcatctggcttttggcttctctaattggcggtcctgccctgtacttccgggacactgtggagttcaataatcatactctttgctataacaattttcagaagcatgatcctgacctcactttgatcaggcaccatgttctgacttgggtgaaatttatcattggctatctcttccctttgctaacaatgagtatttgctacttgtgtctcatcttcaaggtgaagaagcgaacagtcctgatctccagtaggcatttctggacaattctggttgtggttgtggcctttgtggtttgctggactccttatcacctgtttagcatttgggagctcaccattcaccacaatagctattcccaccatgtgatgcaggctggaatccccctctccactggtttggcattcctcaatagttgcttgaaccccatcctttatgtcctaattagtaagaagttccaagctcgcttccggtcctcagttgctgagatactcaagtacacactgtgggaagtcagctgttctggcacagtgagtgaacagctcaggaactcagaaaccaagaatctgtgtctcctggaaacagctcaataa

SEQ ID NO: 2541 - DNA, 1400 bp, Homo sapiens
tctgctttgcgccctatcacgtgctcttgctgtcccgcagcgccatctacctgggccgcccctgggactgcggcttcgaggagcgcgtcttttctgcataccacagctcactggctttcaccagcctcaactgtgtggcggaccccatcctctactgcctggtcaacgagggcgcccgcagcgatgtggccaaggccctgcacaacctgctccgctttctggccagcgacaagccccaggagatggccaatgcctcgctcaccctggagaccccactcacctccaagaggaacagcacagccaaagccatgactggcagctgggcggccactccgccctcccagggggaccaggtgcagctgaagatgctgccgccagcacaatgaaccccgagtggcacagaatccccagttttcccctctcatcccacagtcccttctctcctggtctggtgtatgcaaattgtatggaaaaagggctgtgttaatattcataagaatacaagaacttaggaagagtgaggttggtgtgtcactggtcaacctttgtgctcccagatcccatcacagtttggcgattgtggagggcctcctgaaggaggagatgagtaaatatatttttttggagacagggtctcactgtgttgcccaggctggagtgcagtagtgcagtcgtggctcactgcagcctccacctcctgggctctccagcgatcttcccacatcagcctcccgagtagctgggaccacaaatgtgagcccacccatgcctggctaatttttgtactttttgtataaatggagtctcactatgtttccccaggctgatcttgaactcctgggctcaagagatcctcctgccttggcctcccaaagtgctcagattagagatgtgagccgccatgtctggccagataaattaagtcaaacatttggtttccagaaaataaagacaaatagagaaggttagatttttttttttccaacaagtggataaaagtctgtgactcgggggaaagtggaaggagaaatgcagccgatatagagtcattatgtttgcaaagcccctggtcatacaggccagggaacataagaccgcaattctaagtttctagataaacagcgatctccaagtcaagactgaggatgaagagggagaatgtcagaactcaagtgaagggcaatcagggcagactgcctggaggagtgatgccagaaggtttgggaagaaggtgtgggacaagaagaaagggtatttattcattcattcaacagaggtttatgtagggcactgtgctgggtggggctggggacacaacaatgactgaggcagcctggccttgccttcacagggctcaccatacacaagtaaataaaaaatatgtaatgtttggaattgct

SEQ ID NO: 2542 - DNA, 600 bp, Homo sapiens
gtggaccgctacctgtccctgtataacgcgctcacctattactcgcgccggaccctgttgggcgtgcacctcctgcttgccgccacttggaccgtgtccctaggcctggggctgctgcccgtgctgggctggaactgcctggcagagcgcgccgcctgcagcgtggtgcgcccgctggcgcgcagccacgtggctctgctctccgccgccttcttcatggtcttcggcatcatgctgcacctgtacgtgcgcatctgccaggtggtctggcgccacgcgcaccagatcgcgctgcagcagcactgcctggcgccaccccatctcgctgccaccagaaagggtgtgggtacactggctgtggtgctgggcactttcggcgccagctggctgcccttcgccatctattgcgtggtgggcagccatgaggacccggcggtctacacttacgccaccctgctgcccgccacctacaactccatgatcaatcccatcatctatgccttccgcaaccaggagatccagcgcgccctgtggctcctgctctgtggctgtttccagtccaaagtgccctttcgttccaggtctcccagcgaggtctga

SEQ ID NO: 2543 - DNA, 600 bp, Homo sapiens
ctagccgtgatgagcgtggaccgatacctggtggtgctggccaccgtgaggtcccgccacatgccctggcgcacctaccggggggcgaaggtcgccagcctgtgtgtctggctgggcgtcacggtcctggttctgcccttcttctctttcgctggcgtctacagcaacgagctgcaggtcccaagctgtgggctgagcttcccgtggcccgagcgggtctggttcaaggccagccgtgtctacactttggtcctgggcttcgtgctgcccgtgtgcaccatctgtgtgctctacacagacctcctgcgcaggctgcgggccgtgcggctccgctctggagccaaggctctaggcaaggccaggcggaaggtgaccgtcctggtcctcgtcgtgctggccgtgtgcctcctctgctggacgcccttccacctggcctctgtcgtggccctgaccacggacctgccccagaccccactggtcatcagtatgtcctacgtcatcaccagcctcacgtacgccaactcgtgcctgaaccccttcctctacgcctttctagatgacaacttccggaagaacttccgcagcatattgcggtgctga

SEQ ID NO: 2544 - DNA, 600 bp, Homo sapiens
tctcgctgcgcctcagcctacgctgtgctggccatctgggcgctgtccgcggtgctggcgctgccgcccgccgtgcacacctatcacgtggagctcaagccgcacgacgtgcgcctctgcgaggagttctggggctcccaggagcgccagcgccagctctacgcctgggggctgctgctggtcacctacctgctccctctgctggtcatcctcctgtcttacgtccgggtgtcagtgaagctccgcaaccgcgtggtgccgggctgcgtgacccagagccaggccgactgggaccgcgctcggcgccggcgcaccttctgcttgctggtggtggtcgtggtggtgttcgccgtctgctggctgccgctgcacgtcttcaacctgctgcgggacctcgacccccacgccatcgacccttacgcctttgggctggtgcagctgctctgccactggctcgccatgagttcggcctgctacaaccccttcatctacgcctggctgcacgacagcttccgcgaggagctgcgcaaactgttggtcgcttggccccgcaagatagccccccatggccagaatatgaccgtcagcgtggtcatctga

SEQ ID NO: 2545 - DNA, 1400 bp, Homo sapiens
aaagcagcaattaaagtcagcccagcaccaactccgacgccaagcgttacactggaaactactttttaaagcaacaaaagagtctaaaacaaaatacaacatttcttaaatacactgtttccagaaagagctattttaacagaagcaactcaaagatatcccttcgacagaagtggaagtgctgaaaaatgctcatctctcacacagacttttgatggacaggagtttctaagtatcatgcctaccaacaagctgtaaaatgatcaccctgaacaatcaagatcaacctgtcccttttaacagctcacatccagatgaatacaaaattgcagcccttgtcttctatagctgtatcttcataattggattatttgttaacatcactgcattatgggttttcagttgtaccaccaagaagagaaccacggtaaccatctatatgatgaatgtggcattagtggacttgatatttataatgactttaccctttcgaatgttttattatgcaaaagatgaatggccatttggagagtacttctgccagattcttggagctctcacagtgttttacccaagcattgctttatggcttcttgcctttattagtgctgacagatacatggccattgtacagccgaagtacgccaaagaacttaaaaacacgtgcaaagccgtgctggcgtgtgtgggagtctggataatgaccctgaccacgaccacccctctgctactgctctataaagacccagataaagactccactcccgccacctgcctcaagatttctgacatcatctatctaaaagctgtgaacgtgctgaacctcactcgactgacattttttttcttgattcctttgttcatcatgattgggtgctacttggtcattattcataatctccttcacggcaggacgtctaagctgaaacccaaagtcaaggagaagtccataaggatcatcatcacgctgctggtgcaggtgctcgtctgctttatgcccttccacatctgtttcgctttcctgatgctgggaacgggggagaacagttacaatccctggggagcctttaccaccttcctcatgaacctcagcacgtgtctggatgtgattctctactacatcgtttcaaaacaatttcaggctcgagtcattagtgtcatgctataccgtaattaccttcgaagcatgcgcagaaaaagtttccgatctggtagtctacggtcactaagcaatataaacagtgaaatgttatgaataataaggttctttcatttcaatcccatcaaaattcacttcactaactactctggcgtcaatggatattctgtataatactatcaagtcccttttctcttgaaaaaataaattcattatcttcattttaaaaaaaaaaaaaaaa

SEQ ID NO: 2546 - DNA, 1400 bp, Homo sapiens
agctattactaattgctttttggaaagatttgcaaagatcatgtacccaatcaccttgtgccttgcaactctgaactgttgttttgaccctttcatctattacttcacccttgaatcctttcagaagtccttctacatcaatgcccacatcagaatggagtccctgtttaagactgaaacacctttgaccacaaagccttcccttccagctattcaagaggaagtgagtgatcaaacaacaaataatggtggtgaattaatgctagaatccaccttttaggtatgagaaatgtgttcaggtccagatatggtttctcctataatttttcctatgctataaactaaagatttgaagctaatgatactgagaataatgcaccaaatccagtcagatacatttgtttgaaggtatactgtagagtttttattgctgttttgttcagtaattataggtcaaatctaattacaacaaccaagatggattgccaaactcttctgcttggttggaatttcattgtatcgcattatccaggtggctagtggcatttgataatatagagatgactttgaaactttcaaaaaggtatttctattccaatgatatttggtaattaggttgggcctataaatatagaacaaattcagggatttttaaaaaattgtgttactactgatatatgctagttttattttatttttttggactgtcattgagtttattttagcacaagaatatttttagcctaacattattaataagaaatgtgtcaaatttttaacattggtaaaatatgttatgtgcattttgaaaacagaaaacaaattgcgttggcatgtacgtgggtgggaagaaaaagaaaattaacaggatttacacaattataatcaccagcagtgtgagtttaaaaaacttcgttgtttttacaccaaattaaaattttcatgtcaaacttcaaagccagaaagctgctaaatacgtgtctggcaggtaaaagctggaaaattacttaaaacaggaaagtgtcaataaaaaaacttgagcaacaccaacatattttttcttaaaatgtcacgttatcttcattttgggaaactaggttctataaaatatttatcctccctgttatactttggagcacagcacagccagaaaggggctgcatttgtgcccaggtcaggagcaaattgaaaaaaaaaataaagtaatactaaaaaatcaaactataaacccaaaacatttattaaaacctgaattaatcctttttggagggaggagtagagatatataacctgaaaatacttattctttcttatcgaattttggagcctaatatagccaggagctgctgaatttgtgcccctggattggaaccaaataaaaaaaaaaaaaaaaaattcct

SEQ ID NO: 2547 - DNA, 600 bp, Homo sapiens
cttaaggtcaacctgctgtctcctcaggcggccctgggggtctcgggcctcgtctggctcctgatggtcgccctcacctgcccgggcttgctcatctctgaggccgcccagaactccaccaggtgccacagtttctactccagggcagacggctccttcagcatcatctggcaggaagcactctcctgccttcagtttgtcctcccctttggcctcatcgtgttctgcaatgcaggcatcatcagggctctccagaaaagactccgggagcctgagaaacagcccaagcttcagcgggcccaggcactggtcaccttggtggtggtgctgtttgctctgtgctttctgccctgcttcctggccagagtcctgatgcacatcttccagaatctggggagctgcagggccctttgtgcagtggctcatacctcggatgtcacgggcagcctcacctacctgcacagtgtcgtcaaccccgtggtatactgcttctccagccccaccttcaggagctcctatcggagggtcttccacaccctccgaggcaaagggcaggcagcagagcccccagatttcaaccccagagactcctattcctga

SEQ ID NO: 2548 - DNA, 600 bp, Homo sapiens
ccggcagaaaggtgcattattaagatctctcctgatttaccagacaccatctatgttctagccctcacctacgacagtgcgagactgtggtggtattttggctgttacttttgtttgcccacgcttttcaccatcacctgctctctagtgactgcgaggaaaatccgcaaagcagagaaagcctgtacccgagggaataaacggcagattcaactagagagtcagatgaactgtacagtagtggcactgaccattttatatggattttgcattattcctgaaaatatctgcaacattgttactgcctacatggctacaggggtttcacagcagacaatggacctccttaatatcatcagccagttccttttgttctttaagtcctgtgtcaccccagtcctccttttctgtctctgcaaacccttcagtcgggccttcatggagtgctgctgctgttgctgtgaggaatgcattcagaagtcttcaacggtgaccagtgatgacaatgacaacgagtacaccacggaactcgaactctcgcctttcagtaccatacgccgtgaaatgtccacttttgcttctgtcggaactcattgctga

SEQ ID NO: 2549 - DNA, 600 bp, Homo sapiens
gcaggccgctacctgggagcagccttccccttgggctaccaagccttccggaggccgtgctattcctggggggtgtgcgcggccatctgggccctcgtcctgtgtcacctgggtctggtctttgggttggaggctccaggaggctggctggaccacagcaacacctccctgggcatcaacacaccggtcaacggctctccggtctgcctggaggcctgggacccggcctctgccggcccggcccgcttcagcctctctctcctgctcttttttctgcccttggccatcacagccttctgctacgtgggctgcctccgggcactggcccgctccggcctgacgcacaggcggaagctgcgggccgcctgggtggccggcggggccctcctcacgctgctgctctgcgtaggaccctacaacgcctccaacgtggccagcttcctgtaccccaatctaggaggctcctggcggaagctggggctcatcacgggtgcctggagtgtggtgcttaatccgctggtgaccggttacttgggaaggggtcctggcctgaagacagtgtgtgcggcaagaacgcaagggggcaagtcccagaagtaa

SEQ ID NO: 2550 - DNA, 600 bp, Homo sapiens; identical to SEQ ID NO: 2549

SEQ ID NO: 2551 - DNA, 600 bp, Homo sapiens
gtggcctgggttatgtcctttggtcactgcaccatcgtgatcatcgttcaatacttgaacacgactgagcaggtcagaagtggcaatgaaattacctgctacgagaacttcaccgataaccagttggacgtggtgctgcccgtgcggctggagctgtgcctggtgctcttcttcatccccatggcagtcaccatcttctgctactggcgttttgtgtggatcatgctctcccagccccttgtgggggcccagaggcggcgccgagccgtggggctggctgtggtgacgctgctcaatttcctggtgtgcttcggaccttacaacgtgtcccacctggtggggtatcaccagagaaaaagcccctggtggcggtcaatagccgtggtgttcagttcactcaacgccagtctggaccccctgctcttctatttctcttcttcagtggtgcgcagggcatttgggagagggctgcaggtgctgcggaatcagggctcctccctgttgggacgcagaggcaaagacacagcagaggggacaaatgaggacaggggtgtgggtcaaggagaagggatgccaagttcggacttcactacagagtag

SEQ ID NO: 2552 - DNA, 600 bp, Homo sapiens; identical to SEQ ID NO: 2551

SEQ ID NO: 2553 - DNA, 600 bp, Homo sapiens
tttagccatgaactttctgattttggcttggagagcactgctggagagattcctgttgttgctatcagaactgctaaaggagagaagtttgtcatgcaggaggagttctcgcgtgatgggaaggctctggagaggttcctgcaggattactttgatggcaatctgaagagatacctgaagtctgaacctatcccagagagcaatgatgggcctgtgaaggtagtggtagcagagaattttgatgaaatagtgaataatgaaaataaagatgtgctgattgaattttatgccccttggtgtggtcactgtaagaacctggagcccaagtataaagaacttggcgagaagctcagcaaagacccaaatatcgtcatagccaagatggatgccacagccaatgatgtgccttctccatatgaagtcagaggttttcctaccatatacttctctccagccaacaagaagctaaatccaaagaaatatgaaggtggccgtgaattaagtgattttattagctatctacaaagagaagctacaaacccccctgtaattcaagaagaaaaacccaagaagaagaagaaggcacaggaggatctctaa

SEQ ID NO: 2554 - DNA, 600 bp, Homo sapiens
tcttcccgtggaagggaatatacatgtcaagaagcagattgaatcccggaagcgacttgccaagacagtgctggtgtttgtgggcctgttcgccttctgctggctccccaatcatgtcatctacctgtaccgctcctaccactactctgaggtggacacctccatgctccactttgtcaccagcatctgtgcccgcctcctggccttcaccaactcctgcgtgaacccctttgccctctacctgctgagcaagagtttcaggaaacagttcaacactcagctgctctgttgccagcctggcctgatcatccggtctcacagcactggaaggagtacaacctgcatgacctccctcaagagtaccaacccctccgtggccacctttagcctcatcaatggaaacatctgtcacgagcggtatgtctagattgacccttgattttgccccctgagggacggttttgctttatggctagacaggaacccttgcatccattgttgtgtctgtgccctccaaagagccttcagaatgctcctgagtggtgtaggtgggggtggggaggcccaaatgatggatcaccattatattttgaaagaagc

SEQ ID NO: 2555 - DNA, 600 bp, Homo sapiens; identical to SEQ ID NO: 2554

SEQ ID NO: 2556 - DNA, 947 bp, Homo sapiens
ggctcggggccggggccagcacccacactgggtctccacagcggcatggaggcctgcgtgtcttcactgctggtgctggccctgggggccctgtcagtaggcagctcctttgggacccagatcatcgggggccgggaggtgatcccccactcgcgcccgtacatggcctcactgcagagaaatggctcccacctgtgcgggggtgtcctggtgcacccaaagtgggtgctgacggctgcccactgcctggcccagcggatggcccagctgaggctggtgctggggctccacaccctggacagccccggtctcaccttccacatcaaggcagccatccagcaccctcgctacaagcccgtccctgccctggagaacgacctcgcgctgcttcagctggacgggaaagtgaagcccagccggaccatccggccgttggccctgcccagtaagcgccaggtggtggcagcagggactcggtgcagcatggccggctgggggctgacccaccagggcgggcgcctgtcccgggtgctgcgggagctggacctccaagtgctggacacccgcatgtgtaacaacagccgcttctggaacggcagcctctcccccagcatggtctgcctggcggccgactccaaggaccaggctccctgcaagggtgactcgggcgggcccctggtgtgtggcaaaggccgggtgttggccggagtcctgtccttcagctccagggtctgcactgacatcttcaagcctcccgtggccaccgctgtggcgccttacgtgtcctggatcaggaaggtcaccggccgatcggcctgatgccctggggtgatggggaccccctcgctgtctccacaggacccttcccctccaggggtgcagtggggtgggtgaggacgggtgggagggacagggagggaccaataaatcataatgaagaaacgctc

SEQ ID NO: 2557 - DNA, 1400 bp, Homo sapiens
cgctcatggaatgagggtgaaattcaacccccttgctttactgctagattcgtctttggagggagaatttgaccttgtacagagaattatttatgaggttgatgacccaagcctgcccaatgatgaaggcatcacggctcttcacaatgctgtgtgtgcaggccacacagaaatcgttaagttcctggtacagtttggtgtaaatgtaaatgctgctgatagtgatggatggactccattacattgtgctgcctcatgtaacaacgtccaagtgtgtaagtttttggtggagtcaggagccgctgtgtttgccatgacctacagtgacatgcagactgctgcagataagtgcgaggaaatggaggaaggctacactcagtgctcccaatttctttatggagttcaggagaagatgggcataatgaataaaggagtcatttatgcgctttgggattatgaacctcagaatgatgatgagctgcccatgaaagaaggagactgcatgacaatcatccacagggaagacgaagatgaaatcgaatggtggtgggcgcgccttaatgataaggagggatatgttccacgtaacttgctgggactgtacccaagaattaaaccaagacaaaggagcttggcctgaaacttccacacagaattttagtcaatgaagaattaatctctgttaagaagaagtaatacgattatttttggcaaaaatttcacaagacttattttaatgacaatgtagcttgaaagcgatgaagaatgtctctagaagagaatgaaggattgaagaattcaccattagaggacatttagcgtgatgaaataaagcatctacgtcagcaggccatactgtgttggggcaaaggtgtcccgtgtagcactcagataagtatacagcgacaatcctgttttctacaagaatcctgtctagtaaataggatcatttattgggcagttgggaaatcagctctctgtcctgttgagtgttttcagcagctgctcctaaaccagtcctcctgccagaaaggaccagtgccgtcacatcgctgtctctgattgtccccggcaccagcaggccttggggctcactgaaggctcgaaggcactgcacaccttgtatattgtcagtgaagaacgttagttggttgtcagtgaacaataactttattatatgagtttttgtagcatcttaagaattatacatatgtttgaaatattgaaactaagctacagtaccagtaattagatgtagaatcttgtttgtaggctgaattttaatctgtatttattgtcttttgtatctcagaaattagaaacttgctacagacttacccgtaatatttgtcaagatcatagctgactttaaaaacagttgtaataaactttttgatgct

SEQ ID NO: 2558 - DNA, 600 bp, Homo sapiens
cacctcaaagcccttgaagagtgggcaaagacagcaagagagctgcagcctgggcccgagctcagaaacagctgtcgcctcagtctgcgcacaagcatgcaccccagggtagtgcctgcagggatgcatgtgtccccgtgggggtgcctgtgccaggcaggcctcaggtgcatgccatgctcagaaccctgctgccctttctaggcagcctccttggggcccaagctctgctccctggatctgccacctagcagacgtggggagcctgaccccatgcctgtcatggaaccctccttgcctggtgtgtgtggctcccctcttcactgggcacctggatccaggcccacctgtgtccctgactcagggtggtcccaggcctggcacctactctttagagagccccagcatctttgatgtggattggagacaattgcctggttccctggggcaggtgaagacttggtgccacaaagaatgccacagtggatacgccagcaggccacatggctggccaagcaattattattatggatcccttgggctgtgggccttcccatccaccccaccacaactgcccaggtagctggagctgatcataaa

SEQ ID NO: 2559 - DNA, 600 bp, Homo sapiens; identical to SEQ ID NO: 2558

SEQ ID NO: 2560 - DNA, 600 bp, Homo sapiens
aagctcatcaccctgagaacaaacccagatgcagcaacgcagaacaggcgattccagttcactcagaatcagaagaaagaagattctaaaacgtccacctcggtcaccagtgtgaaccaagccagcacatcccgcctggagggcctacagtcagaaaaccatcgcctgcgaatgaagatcacagagctggataaagacttggaagaggtcaccatgcagctgcaggacacaccagaaaagaccacctacattaaacagaaccactaccaagagctcaatgacatcctcaacctgggaaacttcactgagagcacagatggaggaaaggccattttaaaaaatcacctcgatcaaaatccccagctacagtggaacacaacagagccctctcgaacatgcaaagatcctatagaagatataaactctccagaacacatccagcgtcggctgtccctccagctccccatcctccaccacgcctacctcccatccatcggaggcgtggacgccagctgtgtcagcccctgcgtcagccccaccgccagcccccgccacagacatgtgccaccctccttccgagtcatggtctcgggcctgtaa

SEQ ID NO: 2561 - DNA, 1400 bp, Homo sapiens
actttctgtggctcaattacgaggagcactggtatatgagcttgtggattctaaaatcattccttttaatattcaagactatgcagaagctttgaaaaactatgcagcaagtatctataatctatctaagaaacatgatcaacaattaacagaccatggagtatcatttgactccttattttctgctgtgaaaaacttctcagaggctgcttcagattttcataaacgacttatacaagttgatcttaacaatcccattgcagtgagaatgatgaatgaccaactgatgctcctggaaagagcattcatcgatcctcttggtttaccaggaaagctgttctataggcacatcatatttgctccaagtagccacaacaaatatgctggagaatcatttcctggaatctatgatgctatctttgatattgaaaataaagccaactctcgtttggcctggaaagaagtaaagaaacatatttctattgcagcttttacaattcaagcagcagcaggaactctgaaagaagtattatagaaggtctcaagtggctagccattaaaggtgttgctaaaagtctgaggataaaattcacctttctgataacttatgaagccagggtgttctaaactcttttcatgtcatgttttgattataggctttggtcttttcatctgcaaagccttttttttttttgctctttaaaagttaataattatattagcaaagtgttaatctaatgaagtaaaaaactcctgtgtggcagaaagtaaaagaaaattccctaaattatagcaaggaacatgaattctcagacattgtgagtgtgggaatgtaaaatggtaaaatcacttttgaaaacagtttggcagtttcctataaagttaaacatacacttttactttaggactccagaattccacttctagttatttattcaagagaaggaaaaacaatgatcacagcaatacttgtatgcatgttcattgcaacttaaaagcgtaaaaaccccaaatgtccatccacagacgaatgtataaactgtggtatccattacacaatagactacttactactcagcaataaaaatgaagtaactttcaataaatgcaatattattggcagacattgttgaaggaaaaaagccagacaaacaactacataaaatatgtttctatttagatgaagtggcaaactaatctgtagtgttaaaaattagattagtgattgcctgggccaagtggcaggttggggaggatggctgcaaagaagtatgaggaaactttctccaatagatgagaattttccgtatcttgatctgagtggcaaattgtaaacttaaaatatatataaaatttattgaaagaaaattaagcctcaataaacgtgattataaaaaaaa

SEQ ID NO: 2562 - DNA, 600 bp, Homo sapiens
ctccggggctgggcaggggtgggagtggccagtgttggcggttcttagagcagatgtgtcattgtgttcatttagagaaacagctgccatcagcccgttagctgtaacttggagctccactctgcccccagaaaggggctgccctggggtgtgccctggggagcctcagaagcctgcgaccttgggagaaaagggccagggccctgagggcctagcattttttctactgtaaacgtagcaagatctgtatatgaatatgtatatgtatatgtatgtaagatgtgtatatgtatagctatgtagcgctctgtagagccatgtagatagccactcacatgtgcgcacacgtgtgcggtctagtttaatcccatgttgacaggatgcccaggtcaccttacacccagcaacccgccttggcccgcaggctgtgcactgcatggtctagggacgttctctctccagtcctcagggaagaggacgccaggacttcgcagcaggccccctctctccccatctctggtctcaaagccagtcccagcctgacctctcaccacacggaagtggaagactcccctttcctagggcctcaagcacacaccg

SEQ ID NO: 2563 - DNA, 600 bp, Homo sapiens
atcccctactttgcaactctcatcacagagctagtccaggagacagagccgagtgcccaacagaacatgtccctggccatcctgaggatcatccgcctggtgagggtcttccgcatcttcaagctctcgcgccactccaaggggctgcagatcctcgggcaaacactgaaggcatccatgcgggagttggggttgctcatcttctttctcttcattggagtcatcctcttctccagtgcagtctactttgctgaggtggatgagccagagtcccatttctctagcattcctgatggcttctggtgggcagtggtcaccatgacaactgtaggctatggggacatgtgcccgaccaccccaggggggaagattgtgggcactctgtgtgccattgcaggggtcctcaccattgccctccctgtgcctgtcattgtctccaacttcaattacttctaccaccgggagactgagaatgaagaaaagcagaacatcccaggagaaattgaaagaatcctcaacagtgtaggctcaagaatgggcagcacagactctcttaataagaccaatggtggctgttccacagagaagtctaggaaatga

SEQ ID NO: 2564 - DNA, 600 bp, Homo sapiens
gctgcccattgcctaaagaagaatagccaggtctggctgggtcggcacaacctgtttgagcctgaagacacaggccagagggtccctgtcagccacagcttcccacacccgctctacaatatgagccttctgaagcatcaaagccttagaccagatgaagactccagccatgacctcatgctgctccgcctgtcagagcctgccaagatcacagatgttgtgaaggtcctgggcctgcccacccaggagccagcactggggaccacctgctacgcctcaggctggggcagcatcgaaccagaggagttcttgcgccccaggagtcttcagtgtgtgagcctccatctcctgtccaatgacatgtgtgctagagcttactctgagaaggtgacagagttcatgttgtgtgctgggctctggacaggtggtaaagacacttgtgggggtgattctgggggtccacttgtctgtaatggggtgcttcaaggtatcacatcatggggccctgagccatgtgccctgcctgaaaagcctgctgtgtacaccaaggtggtgcattaccggaagtggatcaaggacaccatcgcagccaacccctga

SEQ ID NO: 2565 - DNA, 600 bp, Homo sapiens; identical to SEQ ID NO: 2564

SEQ ID NO: 2566 - DNA, 1400 bp, Homo sapiens
cgagccaaccttatcaacaacatctttgaacttgcaggcctaggcaaggtacctctcaagagggcctttgatttgattaattatcttggaaatgagaaccatactgcacccatcaccgaagccctgtttcagacagacctcatctataacctccttgaaaaactgggatacatggatctggcctcaagactggtgactagggtatttaaattacttcaaaaccaaattcaacaacaaacttggactgatgagggcactccatctatgcgagagcttcggtcagccctgctagagtttgcttgcacccacaacctggggaactgctctactactgccatgaaactgtttgatgactggatggcatccaatggaactcaaagcctacctactgatgtcatgacaactgtgttcaaagttggagcaaaaactgacaaaggctggtcattccttttgggcaaatacatttctataggctctgaagcagagaagaacaaaatactagaagcacttgccagctcagaggatgtgcggaagctttactggttaatgaaaagtagcctgaatggagataacttccgaacacagaagctgtcttttatcattagaacagtgggtcgacattttcctggacacttactggcatgggattttgtcaaagagaactggaataagcttgtacagaagttccctctggggtcctataccatacaaaatattgttgctggatcaacttacctgttttcaacaaagacacatttatctgaggttcaggcattctttgaaaatcagtcagaggcaaccttccggcttcgttgtgtccaggaggctttggaagtcattcagttgaatatccagtggatggagaagaacctcaaaagtctcacatggtggctgtagcatgcacaaccgcacctcattttgttgcccattcagagagcttgtaagcttgggctctgccgcttttgcaaaagccaaggtaaagccaggatcgctgccaagttgtttgcactctttggagttctagttagctcagggcctgactgtatttttcatccatcttttctgaagtgtctttgggcagtatgtagttatttattacaaaattatattcacgtaaatgccaaccatctacaaaaacaatgagtaatttttctactttgaagatacacagatggggacaaaaaccctgttttggaattctgttctattcctcagtatccagaaagttactgacacagtaaaacaaggaaagttctaccctaagagccgccatcacttcaggccgctggtttgtcagccatctgctgcttcttattgatagatggcattggaatgtggtacaaagttagctctgaagaatatggtaacgaagacaataaagcatgcactgtaagaactga

SEQ ID NO: 2567 - DNA, 1400 bp, Homo sapiens
acaggtgataattaccatccttgaccaggagcctgatgtccggaacaggatgtcctcaagcatggtgttcactacctcgaagtcgcacacatctccagcgataaatgacactgtcatctgggacaggccgtccagggtgggaacctatcatacagactgtaattgttttagaagcatcgacttgggctggagtggtttcatttcccaccaaatgctgaaaaggaggagtttcctgaaaaatgatgacctcatcatatttgtggactttgaagatatcacccacctcagccagactgaagttccctctaaaggcaaaagactgagcccccaaggcctcattctccaaggccaggagcagcaggtctccgaagaaggttcgggaaaggccatgttagaggaagccctacctgtcagcctgagccaggggcagcccagccgacagaagcggtcggtggagaacacaggccccctggaggaccataactggccacagtacttcagagacccatgtgacccaaacccttgccaaaatgacggcatctgtgtgaacgtgaaggggatggcgagctgcaggtgcatctctggacatgctttcttctacacgggggagcgctgtcagtcggccgaggtgcacggcagtgtcctgggcatggtgatcggaggcacggctggcgtgatcttcttgaccttctccatcatcgccatcctttcccaaaggccaaggaagtgacctgcctgctggcattggccagaccacagcagcacctcctccatgcaggccttaactttcccatgttcaatgcagtttggggcagcttttttatcagccttgctttggataggacctccaaggactaagcctccagccccatgtgtgacccttgtcatctctctgccccacataattatgttactttgctatgtgctcctaatgtatctagtgtgtcctgtgacaacactcatcacacttcattgtaaatcacttgttttattgactgtctttcctatagactgtaagctccatgagggcaggcacatgttgttctcattgaccgtgctggccccagtgcctagatgcatggctggcacattgttggcactcaacaatggttgaatgaataaaacaataaatgaatgaataactaagatatagaaactctcatttatattgcagattgaatatatatgatgaaattcttatgttgaatatgttagaatcaaatactcatttttcattagatacagtagtgtcatcactcttttaagatcttgttaaagatttcaaataaaggtacttctggcgagccaggctgcacagcatttgctttcctctgagattctaagagaaggcctttaataaatttaataaatattgagttagcaaaaaaaaaaaaaaaaaa

SEQ ID NO: 2568 - DNA, 600 bp, Homo sapiens
gacgtggaagatctgactaaagagaccctgcacaagcagtaccacctggtaaaatcgcacaccaacaccagccacgtcatgcagtatggaaacaaaacaatctccaccatgaaagtgatgcagtttcagggtatgaaacgcaaagccagttctcccgtccccctacctccagtcacacaccttgacctcacccccagccctgatgtgcctctcaccatcatgaaaaggaaactgatgaacaccaatgatctggaggagtccaggcagctcacggaggagatccagcggcatctggatgccaggcacctcattgagaagtcagtgcgtaagatcgtctccttgctggcagcgtccgaggctgaggtggagcagctcctgtccgagagagccccgctcacggggcacagctgctacccagaggccctgctgcacttccggacccactgcttcaactggcactcccccacgtacgagtatgcgttgagacatttgtacgtgctggtcaacctttgtgagaagccgtatccacttcacaggataaaattgtccatggaccacgtgtgccttggtcactactgaagagctgcctcctggaagctt

SEQ ID NO: 2569 - DNA, 600 bp, Homo sapiens; identical to SEQ ID NO: 2568

SEQ ID NO: 2570 - DNA, 600 bp, Homo sapiens
cctaacatctccatggggaggcctcaccccagggacagggccctggagctcagggtccttgtttctgccctgccagctgcagcctggttggcagcatctgctccatcggggcagggggtatgcagagcttgtggtggggcaggaacggtggaggcagaggtgacagttcccagagtgggctttggtggccagggaggcagcctagcctatgtctggcagatgagggctggctgccgttttctgggctgatgggtgccctttcctggcagtctcagtccaaaagtgttgactgtgtcattagtcctttgtctaagtagggccagggcaccgtattcctctcccaggtgtttgtggggctggaaggacctgctcccacaggggccatgtcctctcttaataggtggcactaccccaaacccatcttttgttctcctatatcctccttctcctgttccatttcagttcagtttcagcggtgccaacctctttgcgtttcctttttgttgatgaggacccagagctgctgcacacactcacctctaaccccctcccctcgctgctgggccccatctccacaggagagactggttcggctctagg

SEQ ID NO: 2571 - DNA, 600 bp, Homo sapiens
gacccacagccccccactcacgccagaggtcgccggtctgcatgggccccgaccgctgtgaccaccatgcctggggcaggggctgtgcacagacggaccccccacccccacacgcactttatgagggagaccccgacagaggacgcttgagccagaatctcaggaccccgcccagggagctgccagcccagggctcagcttcccatgggccccccgcccccctccttcccctccctgaaccccacagtccgcctggccagacctcctggccgccacgcagaatacctcgaaccaggcgggctgtgaaccagccccgctcacctgccagccccaacacccgacgggggccgaggccaggctgcccctccctgtgggctcagggtctcctgcgggctaggcagccaggagctctgtccgcaaaaccaaatctgggtgtcagaggccaagaccctggggtgggatcagggaccacccctcacggggcataaggtcagttttcccccagagcccgggtccctgtcccccacagggcaggcggggtccctggagccctggtgtggagcggcgagtcccggggcggtgcctgtctcagaagaaggg

SEQ ID NO: 2572 - DNA, 600 bp, Homo sapiens
cgcctgctcttcagcgccgtcgagtgggcccgcaacatccccttcttcccggatctgcagatcaccgaccaggtgtccctgctacgcctcacctggagcgagctgttcgtgctcaacgcggcccagtgctctatgccgctgcacgtggcgccgttgctggccgccgccggcctgcatgcctcgcccatgtctgccgaccgcgtcgtggccttcatggaccacatccgcatcttccaggagcaggtggagaagctcaaggcgctacacgtcgactcagccgagtacagctgcctcaaagccatcgtgctgttcacgtcagacgcctgtggcctgtcggatgcggcccacatcgagagcctgcaggagaagtcgcagtgcgcactggaggagtacgtgaggagccagtaccccaaccagcccagccgttttggcaaactgctgctgcgactgccctcgctgcgcaccgtgtcctcctccgtcatcgagcagctcttcttcgtccgtttggtaggtaaaacccccatcgaaactctcatccgcgatatgttactgtctgggagcagcttcaactggccttacatgtccatccagtgctcctag

SEQ ID NO: 2573 - DNA, 1400 bp, Homo sapiens
gccggctggttgtgggcactggcggtcaagtgtggaggagaggggtggaggctgccccattgagatcttcctgctgagtcctttccaggggccaattttggatgagcatggagctgtcacctctcagctgctggatgacttgagatgaaaaaggagagacatggaaagggagacagccaggtggcacctgcagcggctgccctctggggccacttggtagtgtccccagcctacctctccacaaggggattttgctgatgggttcttagagccttagcagccctggatggtggccagaaataaagggaccagcccttcatgggtggtgacgtggtagtcacttgtaaggggaacagaaacatttttgttcttatggggtgagaatatagacagtgcccttggtgcgagggaagcaattgaaaaggaacttgccctgagcactcctggtgcaggtctccacctgcacattgggtggggctcctgggagggagactcagccttcctcctcatcctccctgaccctgctcctagcaccctggagagtgcacatgccccttggtcctggcagggcgccaagtctggcaccatgttggcctcttcaggcctgctagtcactggaaattgaggtccatgggggaaatcaaggatgctcagtttaaggtacactgtttccatgttatgtttctacacattgctacctcagtgctcctggaaacttagcttttgatgtctccaagtagtccaccttcatttaactctttgaaactgtatcacctttgccaagtaagagtggtggcctatttcagctgctttgacaaaatgactggctcctgacttaacgttctataaatgaatgtgctgaagcaaagtgcccatggtggcggcgaagaagagaaagatgtgttttgttttggactctctgtggtcccttccaatgctgtgggtttccaaccaggggaagggtcccttttgcattgccaagtgccataaccatgagcactactctaccatggttctgcctcctggccaagcaggctggtttgcaagaatgaaatgaatgattctacagctaggacttaaccttgaaatggaaagtcttgcaatcccatttgcaggatccgtctgtgcacatgcctctgtagagagcagcattcccagggaccttggaaacagttggcactgtaaggtgcttgctccccaagacacatcctaaaaggtgttgtaatggtgaaaacgtcttccttctttattgccccttcttatttatgtgaacaactgtttgtctttttttgtatcttttttaaactgtaaagttcaattgtgaaaatgaatatcatgcaaataaattatgcgatttttttttcaaagcaaaaaaaaaaaaaaaaaaaaaaaaaaaaaaa

SEQ ID NO: 2574 - DNA, 1400 bp, Homo sapiens; identical to SEQ ID NO: 2573

SEQ ID NO: 2575 - DNA, 1156 bp, Homo sapiens
ggcacgaggaagagcggtcggcggggtttcttcgttgcattgcctgagaggagcggagtctgccaggtggtgtccatcatgttctctttcaacatgttcgaccaccctattcccagggtcttccaaaaccgcttctccacacagtaccgctgcttctctgtgtccatgctagcatggcctaatgacaggtcagatgtggagaaaggagggaagataattatgccaccctcggccctggaccaactcagccgacttaacattacctatcccatgctgttcaaactgaccaataagaattcggaccgcatgacgcattgtggcgtgctggaatttgtggctgatgaaggcatctgctacctcccacactggatgatgcagaacttactcttggaagaagacggcctggtccagttggagaccgtcaaccttcaagtggccacctactccaagagtaagttctgctacctcccacactggatgatgcagaacttactcttggaagaaggcggcctggtccaggtggagagcgtcaaccttcaagtggccacctactccaaattccaacctcagagcgctgacttcctggacatcaccaaccccaaagccgtattagaaaacgcacttaggaactttgcctgtctgaccaccggggatgtgattgccattaactacaatgaaaagatctacgaactgcgtgtgatggagaccaaacccgacaaggcagtgtccattcatgagtgtgacatgaacgtggactttgatgctcccctgggctacaaagaacccgaaagacaagtccagcatgaggagtcgacagaaggtgaagccgaccacagtggctatgctggagagcttggcttccgcgctttctctggatctggcaatagactggatggaaagaagaaaggggtagagcccagcccctccccaatcaagcctggagatattaaaagaggaattcccaattatgaatttaaacttggtaagataactttcatcagaaattcacgtccccttgtcaaaaaggttgaagaggatgaagctggaggcagattcgtcgctttctctggagaaggacagtcattgcgtaaaaagggaagaaagccctaagtgaggactgttggctgattggaaaataataaaagtttcatttgca

SEQ ID NO: 2576 - DNA, 1156 bp, Homo sapiens; identical to SEQ ID NO: 2575

SEQ ID NO: 2577 - DNA, 1400 bp, Homo sapiens
tcagcgttgccctggcggacagagacaggccctcggggtggaggtctttggtttcataagagcctgagagagatttttctaagatatgtgtaacacaccaacgtactgtgacctaggaaaggctgctaaggatgtcttcaacaaaggatatggctttggcatggtcaagatagacctgaaaaccaagtcttgtagtggagtggaattttctacttctggtcatgcttacactgatacagggaaagcatcaggcaacctagaaaccaaatataaggtctgtaactatggacttaccttcacccagaaatggaacacagacaatactctagggacagaaatctcttgggagaataagttggctgaagggttgaaactgactcttgataccatatttgtaccgaacacaggaaagaagagtgggaaattgaaggcctcctataaacgggattgttttagtgttggcagtaatgttgatatagatttttctggaccaaccatctatggctgggctgtgttggccttcgaagggtggcttgctggctatcagatgagttttgacacagccaaatccaaactgtcacagaataatttcgccctgggttacaaggctgcggacttccagctgcacacacatgtgaacgatggcactgaatttggaggttctatctaccagaaggtgaatgagaagattgaaacatccataaaccttgcttggacagctgggagtaacaacacccgttttggcattgctgctaagtacatgctggattgtagaacttctctctctgctaaagtaaataatgccagcctgattggactgggttatactcagacccttcgaccaggagtcaaattgactttatcagctttaatcgatgggaagaacttcagtgcaggaggtcacaaggttggcttgggatttgaactggaagcttaatgtggtttgaggaaagcatcagatttgtccctggaagtgaagagaaatgaacccactatgttttggccttaaaattcttctgtgaaatttcaaaagtgtgaactttttattcttccaaagaattgtaatcctccccacactgaagtctaggggttgcgaatccctcctgagggagatgcttgaaggcatgcctggaagttgtcatgtttgtgccacgtttcagttcagttctgaagtgttattaaatgtgttcctcagcgacagtgtagcgtcatgttagaggagacgatctgacccaccagtttgtacatcacgtcctgcatgtcccacaccattttttcatgaccttgtaatatactggtctctgtgctatagtggaatctttggttttgcatcatagtaaaataaaataaacccatcacatttggaacataaaaaaaaaaaaaaaaaaaaaaaaaaaaaa

SEQ ID NO: 2578 - DNA, 600 bp, Homo sapiens
ttggccatccgttacccgctactggtgagccactccggtcccccaggaagatctttgggatctgcatgcacaatctgggtcctggtgtggaccggaagcatccctatctacagtttccatgggaaagtggaaaaatacatgtgcttccacaacatgtctgatgatacctggagcgccaaggtcttcttcccgctggaggtgtttggcttcctccttcccatgggcatcatgggcttctgctgctccaggagcatccacatcctgctgggccgccgagaccacacccaggactgggtgcagcagaaagcctgcatctacagcatcgcagccagcctggctgtattcgtggtctccttcctcccagtccacctggggttcttcctgcagttcctggtgagaaacagctttatcgtagagtgcagagccaagcagagcatcagcttcttcttgcaattgtccatgtgtttctccaatgtcaactgctgcctggatgttttctgctactactttgtcatcaaagaattccgcatgaacatcagggcccaccggccttccagggtccagctggtcctgcaggacaccacgatctcccggggctaa

SEQ ID NO: 2579 - DNA, 600 bp, Homo sapiens; identical to SEQ ID NO: 2578

SEQ ID NO: 2580 - DNA, 600 bp, Homo sapiens
gcttctggagacatctcggaggtacaaccctgggagtgagagtatcaccttcctcaaggatttcagttataaccgggaagactttgccaaagcagggctgcaagtggaattcatcaaccccatcttcgagttctccagggccatgaatgagctgcaactcaatgatgccgagtttgccttgctcattgctatcagcatcttctctgcagaccggcccaacgtgcaggaccagctccaggtggagaggctgcagcacacatatgtggaagccctgcatgcctacgtctccatccaccatccccatgaccgactgatgttcccacggatgctaatgaaactggtgagcctccggaccctgagcagcgtccactcagagcaagtgtttgcactgcgtctgcaggacaaaaagctcccaccgctgctctctgagatctgggatgtgcacgaatgactgttctgtccccatattttctgttttcttggccggatggctgaggcctggtggctgcctcctagaagtggaacagactgagaagggcaaacattcctgggagctgggcaaggagatcctcccgtggcattaaaagagagtcaaagggt

SEQ ID NO: 2581 - DNA, 1400 bp, Homo sapiens
tggctgtggcctacgccacgcagcgggagaagcttacctttctggaggaggatgacaaggacctgtacatcctctggaaggggccctccttcgatgtgcaggtgggcctgcacgagctgctgggccatggcagtggcaagctcttcgtacaggacgaaaaaggagcattcaactttgaccaggaaacagtgatcaacccagagacgggcgagcagattcagagctggtatcggagcggggagacctgggatagcaagttcagcaccatcgcctccagctacgaagagtgccgggctgagagcgtgggtctctacctctgtctccacccgcaagtgctggagatctttggctttgagggggctgatgcggaggacgtgatctacgtgaactggctcaacatggttcgggccgggctgctcgctctggagttctacacacctgaggccttcaactggcgacaggcccatatgcaggcccggtttgtgatcctgagagtcttgctggaggctggcgagggactcgttaccatcactcccaccacaggctccgatgggcgcccagatgcccgggtccgcctcgaccgcagcaagatccggtctgtgggcaagcctgctctagagcgcttcctgcggagacttcaggtgctgaagtccacaggggatgtggccggagggcgggccctgtacgaggggtatgcaacggtcactgatgcgccccccgagtgcttcctcaccctcagggacacggtgctgctgcgtaaggaatctcggaagctcattgttcagcccaacactcgccttgaaggctcagacgtgcagcttctggaatacgaggcgtcagctgctggcctcatccgatccttctctgagcgtttcccagaggatggacccgagttggaggagatcctcacacagctggccacagccgatgcccgattctggaagggccccagtgaggccccatctggccaagcttgaggaagatgtgtggccttgcccccaattccatcagaccaaggctgcaagtggccctccattcgtgtgtgtatttaggggctggggagggggaggggcaggagcttggaccttggtactacctcagctgagggtggtgacacaaccccttccatttgtcagcactttccagcctgccaattgcttcccctctgtgatctcatttcatctgcactgccatacgtggagtgagcaagacagggcttaccatcctgtctaccagatgaggaaatggcagttctgagaagtcactggtctagatcccgcaggtggcacgtgacagctagggttcaaaacgttctcaccaaatccaatgctcctcacatattaattttataaccagacaaataaatattagagacaaccaaaaaaaaaaaaaaaaaaaaa

SEQ ID NO: 2582 - DNA, 1400 bp, Homo sapiens; identical to SEQ ID NO: 2581

SEQ ID NO: 2583 - DNA, 600 bp, Homo sapiens
gggaagaggagcctggactaggactcccataaatcactggggggctgggccttgcaggtggagggacctcactccagggcacggcgtgggaggggtagtcgaagagctctggtggcagcgttgagaagggggtgagtggtgccagttgccagggcaagtcactgcgctgggaggtgggcggggagcatcaccagaacccaggcgctgccccagcaccttctcctccccaggttacttgcttctaggactcttggccatgctgctggcagtggagaccttctctgagctgccgcaggtccgtgccatggggaagttcttcagacccagtggtcctgtgactgctgaggaccaaggtggcatcctagggcaggatgaactggctctgagcaccctgccgcccgcggccccagcttcaggacaagcccctgcttgctgaagcgtcaggtgaccgagttcagctccgtaaggtggcggcacctgaggaggaagcagccaggagtggctggggaagaatctggagatggagccgcggtgagggtgggcgggaggcctcaggggatactgttaatcataaaatgagcaacgaaaaaaaaaaaaaaa

SEQ ID NO: 2584 - DNA, 600 bp, Homo sapiens; identical to SEQ ID NO: 2583

SEQ ID NO: 2585 - DNA, 1400 bp, Homo sapiens
attacaagaagaaaccaagacattacaccatggtttttagacatttctgatttggtttcttatctttcattttataagaaggttggttttaaacaatacactaagaatgactcctataaagaaaacaaaaaaaggtagtgaactttcagctaccttttaaagaggctaagttatctttgataacatcatataaagcaactgttgacttcagcctgttggtgagtttagttgtgcatgcctttgttgtatataagctaaattctagtgacccatgtgtcaaaaatcttacttctacatttttttgtatttattttctactgtgtaaatgtattcctttgtagaatcatggttgttttgtctcacgtgataattcagaaaatccttgctcgttccgcaaatcctaaagctccttttggagatgatataggatgtgaaatacagaaacctcagtgaaatcaagaaataatgatcccagccagactgagaaaatgtaagcagacagtgccacagttagctcatacagtgcctttgagcaagttaggaaaagatgcccccactgggcagacacagccctatgggtcatggtttgacaaacagagtgagagaccatattttagccccactcaccctcttgggtgcacgacctgtacagccaaacacagcatccaatatgaatacccatcccctgaccgcatccccagtagtcagattatagaatctgcaccaagatgtttagctttataccttggccacagagagggatgaactgtcatccagaccatgtgtcaggaaaattgtgaacgtagatgaggtacatacactgccgcttctcaaatccccagagcctttaggaacaggagagtagactaggattccttctcttaaaaaggtacatatatatggaaaaaaatcatattgccgttctttaaaaggcaactgcatggtacattgttgattgttatgactggtacactctggcccagccagagctataattgttttttaaatgtgtcttgaagaatgcacagtgacaaggggagtagctattgggaacagggaactgtcctacactgctattgttgctacatgtatcgagccttgattgctcctagttatatacagggtctatcttgcttcctacctacatctgcttgagcagtgcctcaagtacatccttattaggaacatttcaaaccccttttagttaagtctttcactaaggttctcttgcatatatttcaagtgaatgttggatctcagactaaccatagtaataatacacatttctgtgagtgctgacttgtctttgcaatatttcttttctgatttatttaattttcttgtatttatatgttaaaatcaaaaatgttaaaatcaatgaaataaatttgcagttaaga

SEQ ID NO: 2586 - DNA, 1118 bp, Homo sapiens
ctgatgaaagtgcttccaaactgaaaattggacgtgcctttacgatggtaagcgttaacagctcccactgcttctataatgactcctttaagtacactttgtatgggtgcatgttcagcatggtgtttgtgcttgggttagtatccaattgtgttgccatatacattttcatctgcgtcctcaaagtccgaaatgaaactacaacttacatgattaacttggcaatgtcagacttgctttttgtttttactttacccttcaggattttttacttcacaacacggaattggccatttggagatttactttgtaagatttctgtgatgctgttttataccaacatgtacggaagcattctgttcttaacctgtattagtgtagatcgatttctggcaattgtctacccatttaagtcaaagactctaagaaccaaaagaaatgcaaagattgtttgcactggcgtgtggttaactgtgatcggaggaagtgcacccgccgtttttgttcagtctacccactctcagggtaacaatgcctcagaagcctgctttgaaaattttccagaagccacatggaaaacatatctctcaaggattgtaattttcatcgaaatagtgggattttttattcctctaattttaaatgtaacttgttctagtatggtgctaaaaactttaaccaaaccagttacattaagtagaagcaaaataaacaaaactaaggttttaaaaatgatttttgtacatttgatcatattctgtttctgttttgttccttacaatatcaatcttattttatattctcttgtgagaacacaaacatttgttaattgctcagtagtggcagcagtaaggacaatgtacccaatcactctctgtattgctgtttccaactgttgttttgaccctatagtttactactttacatcggacacaattcagaattcaataaaaatgaaaaactggtctgtcaggagaagtgacttcagattctctgaagttcatggtgcagagaattttattcagcataacctacagaccttaaaaagtaagatatttgacaatgaatctgctgcctgaaataaaaccattaggactcactgggacagaactttcaag

SEQ ID NO: 2587 - DNA, 1400 bp, Homo sapiens
acctgaaggaaagattgcagaggaggtatatgactacatcatgcacatccttatgcacttccagggtcttttggtctctaccattttctgcttctttaatggagaggttcaagcaattctgagaagaaactggaatcaatacaaaatccaatttggaaacagcttttccaactcagaagctcttcgtagtgcgtcttacacagtgtcaacaatcagtgatggtccaggttatagtcatgactgtcctagtgaacacttaaatggaaaaagcatccatgatattgaaaatgttctcttaaaaccagaaaatttatataattgaaaatagaaggatggttgtctcactgtttggtgcttctcctaactcaaggacttggacccatgactctgtagccagaagacttcaatattaaatgactttggggaatgtcataaagaagagccttcacatgaaattagtagtgtgttgataagagtgtaacatccagctctatgtgggaaaaaagaaatcctggtttgtaatgtttgtcagtaaatactcccactatgcctgatgtgacgctactaacctgacatcaccaagtgtggaattggagaaaagcacaatcaacttttctgagctggtgtaagccagttccagcacaccattgatgaattcaaacaaatggctgtaaaactaaacatacatgttgggcatgattctacccttattcsccccaagagacctagctaaggtctataaacatgaagggaaaattagcttttagttttaaaactctttatcccatcttgattggggcagttgactttttttttttcccagagtgccgtagtcctttttgtaactaccctctcaaatggacaataccagaagtgaattatccctgctggctttcttttctctatgaaaagcaactgagtacaattgttatgatctactcatttgctgacacatcagttatatcttgtggcatatccattgtggaaactggatgaacaggatgtataatatgcaatcttacttctatatcattaggaaaacatcttagttgatgctacaaaacaccttgtcaacctcttcctgtcttaccaaacagtgggagggaattcctagctgtaaatataaattttgcccttccatttctactgtataaacaaattagcaatcattttatataaagaaaatcaatgaaggatttcttattttcttggaattttgtaaaaagaaattgtgaaaaatgagcttgtaaatactccattattttattttatagtctcaaatcaaatacatacaacctatgtaatttttaaagcaaatatataatgcaacaatgtgtgtatgttaatatctgatactgtatctgggctgattttttaaataaaatagagtctggaatgct

SEQ ID NO: 2588 - DNA, 1400 bp, Homo sapiens; identical to SEQ ID NO: 2587

SEQ ID NO: 2589 - DNA, 1075 bp, Homo sapiens
gggcccttccagagaaatgtactgaaaaagtctacgcaatgtctgggatttgctaaacaatacctggaaagcagacaggtttttttgccattcctccaggacatccaccataaggaaaggagaccctggaccaacattctctaagatgtttatatggaccagtggccggacctcttcatcttatagacatgatgaaaaaagaaatatttaccagaaaatcagggaccatgacctcctggacaaaaggaaaacagtcacagcactgaaggcaggagaggaccgagctattctcctgggactggctatgatggtgtgctccatcatgatgtattttctgctgggaatcacactcctgcgctcatacatgcagagcgtgtggaccgaagagtctcaatgcaccttgctgaatgcgtccatcacggaaacatttaactgctccttcagctgtggtccagactgctggaaactttctcagtacccctgcctccaggtgtacgttaacctgacttcttccggggaaaagctcctcctctaccacacagaagagacaataaaaatcaatcagaagtgctcctatatacctaaatgtggaaaaaattttgaagaatccatgtccctggtgaatgttgtcatggaaaacttcaggaagtatcaacacttctcctgctattctgacccagaaggaaaccagaagagtgttatcctaaccaaactctacagttccaacgtgctgttccattcactcttctggccaacctgtatgatggctgggggtgtggcaattgttgccatggtgaaacttacacagtacctctccctactatgtgagaggatccaacggatcaatagataaatgcaaaaatggataaaataatttttgttaaagctcaaatactgttttctttcattcttcaccaaagaaccttaagtttgtaacgtgcagtctgttatgagttccctaatatattcttatatgtagagcaataatgcaaaagctgttctatatgcaaacatgatgtctttattattcaggagaataaataactgttttgtgttgaaaaaaaaaaaaaaaaaa

SEQ ID NO: 2590 - DNA, 600 bp, Homo sapiens
atctctgtgacattacagggaaaaaaatatagttttctatctctttcaagggcagaagagttttcatttttatttttgtaattttatctgtaagtcataaatattacttaatcaggcctgattctacttttgaaaattacagttcttgaaatgcagataatgtttactttgaaaacaaatgtcatgaatgatttccagtttttaaagctatatgtttcactgcttcatatctctgtccactttctgaatgagaacttattttgtgcctagagctctcactcactgataatgcttattaccttctgggcatttattccaaagtgggatcaactgtacgcctttggtatctgaccataaagtcttttgctccgctgacatttgggtgatgtcttcacatggaaatataataaaaataaaaatctagtttaatactgcattatttattttcctaaggctaaagaggagcagtcctatgcttttattcagcatcctttatctgtgacttcatgctctgataactgcctttccttccttctgtgcctttgaatacaaatttcagttctgcaaaagtgaaacattaaacattgccaacgcaaatgt

SEQ ID NO: 2591 - DNA, 600 bp, Homo sapiens; identical to SEQ ID NO: 2590

SEQ ID NO: 2592 - DNA, 600 bp, Homo sapiens
cttgcatccatttgcagcctgctttcaattgcagtggacaggtactttactatcttctatgctctccagtaccataacattatgacagttaagcgggttgggatcatcataagttgtatctgggcagcttgcacggtttcaggcattttgttcatcatttactcagatagtagtgctgtcatcatctgcctcatcaccatgttcttcaccatgctggctctcatggcttctctctatgtccacatgttcctgatggccaggcttcacattaagaggattgctgtcctccccggcactggtgccatccgccaaggtgccaatatgaagggagcgattaccttgaccatcctgattggcgtctttgttgtctgctgggccccattcttcctccacttaatattctacatctcttgtcctcagaatccatattgtgtgtgcttcatgtctcactttaacttgtatctcatactgatcatgtgtaattcaatcatcgatcctctgatttatgcactccggagtcaagaactgaggaaaaccttcaaagagatcatctgttgctatcccctgggaggcctttgtgacttgtctagcagatattaa

SEQ ID NO: 2593 - DNA, 600 bp, Homo sapiens
gtggcatccatgtgcagcttactggccattgcagtggataggtacgtcaccatcttctacgccctgcgctaccaccacatcatgacggcgaggcgctcaggggccatcatcgccggcatctgggctttctgcacgggctgcggcattgtcttcatcctgtactcagaatccacctacgtcatcctgtgcctcatctccatgttcttcgctatgctgttcctcctggtgtctctgtacatacacatgttcctcctggcgcggactcacgtcaagcggatcgcggctctgcccggggccagctctgcgcggcagaggaccagcatgcagggcgcggtcaccgtcaccatgctgctgggcgtgtttaccgtgtgctgggccccgttcttccttcatctcactttaatgctttcttgccctcagaacctctactgctctcgcttcatgtctcacttcaatatgtacctcatactcatcatgtgtaattccgtgatggaccctctcatatatgccttccgcagccaagagatgcggaagacctttaaggagattatttgctgccgtggtttcaggatcgcctgcagctttcccagaagggattaa

SEQ ID NO: 2594 - DNA, 600 bp, Homo sapiens
gcctttataacccacgaaaggctgaaaagcagagattttataaaaggagatgatgtttatatcctactgacagtggaagacatatctcacctcaactctacacaaatccagctaacaccagcccctagtgttcaagacctctgctcaaaaaccacctgtaaaaatgacggtgtctgcactgttcgagatggcaaagctgagtgcaggtgccagtcaggggaagactggtggtacatgggagaaaggtgtgaaaagagaggctccacccgagacaccatagtcattgctgtttcatctactgttgctgtgtttgccttgatgctgatcatcacccttgtcagtgtctattgcaccaggaagaaatatcgtgaaaggatgagctcaaatcgaccaaatttgactctgcaaaatcatgctttttgaagattaactcgacaatatggccagctaatgaaattaaaaaggattcttcatcatggatttcgcctaagtgatattacagccacctcattcttctaaaagtggatatttttctgtaaatagctggaaatattataaatcactattttggtcaaagtcaaaaaaaaaaaaaaaaaaaaa

SEQ ID NO: 2595 - DNA, 1400 bp, Homo sapiens
caaggaacgatagctaaaaatccagagactgtcatgcagttccttgaaaaactatctgacaaactttctgaaagaactctgaaagattttgagatgatacgagggatgaaaatgaaactgaatgctcaaaattccgaagtaatgccctgggaccccccttactacagtggtgtgattcgtgcagaaaggtataatattgagcccagcctatattgcccgtttttctctcttggagcatgcatggaaggcctgaatattttgcttaacagactgttggggatttcattatatgcagagcagcctgcaaaaggagaggtgtggagcgaagatgtccgaaaactggctgttgttcatgaatctgaaggattgttggggtacatttactgtgatttttttcagcgagcagacaaaccacatcaggattgccatttcactatccgtggaggcagactaaaggaagatggagactatcaactcccacttgtagttcttatgctgaatcttccccgttcctcaaggagttctccaactttgctaactcctggcatgatggaaaatcttttccatgaaatgggacatgccatgcattcaatgctaggacgtactcgttaccaacacgtcactgggaccaggtgccctactgattttgctgaggttccttctattctgatggagtactttgcaaatgattatcgagtagttaaccaatttgccagacattatcagactggacagccactgccaaaaaatatggtgtctcgtctttgtgaatctaaaaaggtttgtgctgcagctgatatgcaacttcaggtcttttatgccactctggatcaaatctaccatgggaagcatcccctgaggaattcaaccacagacattctcaaggaaacacaagagaaattctatggcctaccatatgttccaaatactgcctggcagctgcgattcagccacctcgtggggtatggtgctagatattactcttacctcatgtccagagcggtcgcctccatggtttggaaggagtgttttctacaggatcctttcaacagggctgccggggagcgctatcgcagggagatgctggcccacggtggaggcagggagcccatgctcatggttgaaggtatgcttcagaagtgtccttctgttgatgacttcgtaagtgccctcgtttccgacttggatctggacttcgaaactttcctcatggattctgaataaaagaaacactctacacctctaatcaaggtcatgtagtaatgactttgttataaatgctacagctgtgagagcttgtttctgattgtttcattgttcgcttctgtaattctgaaaaactttaaactggtagaacttggaataaataatttgttttaattaaaaaaaaaaaaaaaaaa

SEQ ID NO: 2596 - DNA, 600 bp, Homo sapiens
aggaagtcagcatttgacatgtttaacttcctggcttctaaacatcgtcagcctcctgaatacaaccccaatgatgaagaagaggaggaggtacagctgaagtcagctcggagggcaactagcatggatctgccaatgcccatgcgcttccggcacttaaaaaagacttctaaggaggcagttggtgtctacaggtctcccatccatggccggggtcttttctgtaagagaaacattgatgcaggtgagatggtgattgagtatgccggcaacgtcatccgctccatccagactgacaagcgggaaaagtattacgacagcaagggcattggttgctatatgttccgaattgatgactcagaggtagtggatgccaccatgcatggaaatcgtgcacgcttcatcaatcactcgtgtgagcctaactgctattctcgggtcatcaatattgatgggcagaagcacattgtcatctttgccatgcgtaagatctaccgaggagaggaactcacttacgactataagttccccattgaggatgccagcaacaagctgccctgcaactgtggcgccaagaaatgccggaagttcctaaactaa

SEQ ID NO: 2597 - DNA, 600 bp, Homo sapiens
gcaggtcgtggtcacctgccagcgactgtctcagactgggcagggaggctttggcatgacttaagaggaagggcagtcttgggacccgctatgcaggtcctggcaaacctggctgccctgtctcatccctgtccctcagggtagcaccatggcaggactgggggaactggagtgtccttgctgtatccctgttgtgaggttccttccaggggctggcactgaagcaagggtgctggggccccatggccttcagccctggctgagcaactgggctgtagggcagggccacttcctgaggtcaggtcttggtaggtgcctgcatctgtctgccttctggctgacaatcctggaaatctgttctccagaatccaggccaaaaagttcacagtcaaatggggaggggtattcttcatgcaggagaccccaggccctggaggctgcaacatacctcaatcctgtcccaggccggatcctcctgaagcccttttcgcagcactgctatcctccaaagccattgtaaatgtgtgtacagtgtgtataaaccttcttcttcttttttttttttaaactgaggattgtcattaaacacagttgttttct

SEQ ID NO: 2598 - DNA, 600 bp, Homo sapiens
ttcaagacaagagctgttatgctgtttcctagctaggagcaggcttgtggcagcctgattcggggctgacctttcaaaccagagggttgctggtcctgcacatgagtggaaatacactcatggggaagcttccatgatgcacagtatctgctgttcttcagtcctttgtctttctttgtcattcagttctaggcctttcctctgcacgctcaatgcccagtaaaatttcaggattaactaaagaagaggagaaaaagaagaaaagattctttcttaaaagtttctaatgttattttccttctgaagtctgagcccatttctggggggagaaaaaaaaagcaaatcagaaaacccacggtttttctttttttctttttttctttttttcttttttggctttaaaacaaagggaaaaaagagtttaaacaaaaaacccacaattgaacttccaggaaagtgtgaagacccaaaacagctttgtctccaaagaagatagctctctgactgctttggatagtctcctacgcaccattttgtcaggtgggagatttggaatacacatgcaggacgttagactgttgggacagccattttccaaca

SEQ ID NO: 2599 - DNA, 600 bp, Homo sapiens; identical to SEQ ID NO: 2598

SEQ ID NO: 2600 - DNA, 1400 bp, Homo sapiens
ctcctgcccctgggcatcatcctgttctgctcagccagaattatctggagcctgcggcagagacaaatggaccggcatgccaagatcaagagagccatcaccttcatcatggtggtggccatcgtctttgtcatctgcttccttcccagcgtggttgtgcggatccgcatcttctggctcctgcacacttcgggcacgcagaattgtgaagtgtaccgctcggtggacctggcgttctttatcactctcagcttcacctacatgaacagcatgctggaccccgtggtgtactacttctccagcccatcctttcccaacttcttctccactttgatcaaccgctgcctccagaggaagatgacaggtgagccagataataaccgcagcacgagcgtcgagctcacaggggaccccaacaaaaccagaggcgctccagaggcgttaatggccaactccggtgagccatggagcccctcttatctgggcccaacctcaaataaccattccaagaagggacattgtcaccaagaaccagcatctctggagaaacagttgggctgttgcatcgagtaatgtcactggactcggcctaaggtttcctggaacttccagattcagagaatctgatttagggaaactgtggcagatgagtgggagactggttgcaaggtgtgaccacaggaatcctggaggaacagagagtaaagcttctaggcatctgaaacttgcttcatctctgacgctcgcaggactgaagatgggcaaattgtaggcgtttctgctgagcagagttggagccagagatctacttgtgacttgttggccttcttcccacatctgcctcagactggggggggctcagctcctcgggtgatatctagcctgcttgtgagctctagcagggataaggagagctgagattggagggaattgtgttgctcctggaggaagcccaggcatcattaaacaagccagtaggtcacctggcttccgtggaccaattcatctttcagacaagctttagagaaatggactcagggaagagactcacatgctttggttagtatctgtgtttccggtgggtgtaataggggattagccccagaagggactgagctaaacagtgttattatgggaaaggaaatggcattgctgctttcaaccagcgactaatgcaatccattcctctcttgtttatagtaatctaagggttgagcagttaaaacggcttcaggatagaaagctgtttcccacctgtttcgttttaccattaaaagggaaacgtgcctctgccccacgggtagagggggtgcacgttcctcctggttccttcgcttgtgtttctgtacttaccaaaaatctaccacttcaataaattttgataggagacaaaaaaaaaa

SEQ ID NO: 2601 - DNA, 600 bp, Homo sapiens
tagaaattcaagattactataatggctgttattatacacagctctgtaaactaccactcagccctgtgttggggtcctcaaagaagtaaggccacagtaatcaagcaagggcctttggttttttccagagttagatcctctcagaacagagtctgggagaactccaatgctgaatggagaagggtaataggttggttgcagtgaatgggctgggggtggggtggccttctccaggcctgagtgtttttgtgtccagctcagtatctgcaacaagaagtttcccacttgtggatgtttagtgcagccacagacttgtattttgatccccaattttttttgaaagagttctcctcataggaggatgattcagcatcagaagaagaaggaacccatagcttggtgtcattaacataattattttaagccttatccagcagccataatttgaataactctacgagaccagagagactgtagttccctattttaacctcaattatgcatttgtccccaaccccactgagaactaaatgctgtaccacagagccgggtgtgaactatggtttagaaggttcaagtttccaattaaagtcattgaag

SEQ ID NO: 2602 - DNA, 600 bp, Homo sapiens; identical to SEQ ID NO: 2601

SEQ ID NO: 2603 - DNA, 600 bp, Homo sapiens
ggtgggctacaccgtcttcagggtcaacatgtccaaccaggtgccacggagtgtagggagcacccctctgattgggcacttcttcaccatctgcatggccttcttggttctcagcttagctaagtccatcgtgttggtcaaattcctccatgatgagcagcgtggtggacaggagcagcccttcttgtgccttcgaggggacaccgatgctgacaggcctagagtggaacccagggcccaacgtgctgtggtaacagagtcctcgctgtatggagagcacctggcccagccaggaaccctgaaggaagtctggtcgcagcttcaatctatcagcaactacctccaaactcaggaccagacagaccaacaggaggcagagtggctggtcctcctgtcccgctttgaccgactgctcttccaaagctaccttttcatgctggggatctacaccatcactctgtgctccctctgggcactgtggggcggcgtgtgaagactgaagtgttcttcagtaattgtgctggcacttaggagagagaggagggggaataatagtgggttaaaaagctttctgggtcgggtgtggtggttcttgcctat

SEQ ID NO: 2604 - DNA, 600 bp, Homo sapiens
ctgggggccagtggggaactgagggcaaggggatatagtgatggggctcagatggactgggaggagggggagggtgatgcattaattaatggcttcgttaattaatgtcatgttgcttgtcgctttctcagtgtgtgtgtgtggtccatgcccactgctggtgccagggtgggtgtccatgtgcacccggcctggatgccagctgtgtccttcgggggcgtgcgtgtaactgtagtgtagtcaggtgctcaatggagaatataaacatatacagaaaaatatatattttaagtttaaaaaacagaaaaacagacaaaacaatccccatcaggtagctgtctaacccccagctgggtctaatccttctcattacccacccgacctggctgcccctcaccttgggctgggggactggggggccatttccttttctctgccctttttttgttgttctattttgtacagacaagttggaaaaacaacagcgacaaaaaagtcaagaaactttgtaaaatatcgtgtgtgtgattccttgtaaaatattttcaaatggtttattacagaagatcagttattaaataatgttcatattttcacttc

SEQ ID NO: 2605 - DNA, 600 bp, Homo sapiens
tacaacatggtagtgcagaccaccgcgctgctcttcttctgcctgcccatggccatcatgagcgtgctctacctgctcattgggctgcgactgcggcgggagaggctgctgctcatgcaggaggccaagggcaggggctctgcagcagccaggtccagatacacctgcaggctccagcagcacgatcggggccggagacaagtgaccaagatgctgtttgtcctggtcgtggtgtttggcatctgctgggccccgttccacgccgaccgcgtcatgtggagcgtcgtgtcacagtggacagatggcctgcacctggccttccagcacgtgcacgtcatctccggcatcttcttctacctgggctcggcggccaaccccgtgctctatagcctcatgtccagccgcttccgagagaccttccaggaggccctgtgcctcggggcctgctgccatcgcctcagaccccgccacagctcccacagcctcagcaggatgaccacaggcagcaccctgtgtgatgtgggctccctgggcagctgggtccaccccctggctgggaacgatggcccagaggcgcagcaagagaccgatccatcctga

SEQ ID NO: 2606 - DNA, 600 bp, Homo sapiens
gtgcctgcagtttagagaaggcagagccactggttttgagaaccagatttgagagagggacctggccagggtggagcattgtctgggtgtttctgcgcttgacccatgctggaagctaatggcctgttgctcctgacagagccccaaactcctcggcctcactgggaggcccctttgtagaccagggctcccctcctcttgttccccctgggcttagggcctcgtggggagttccaggacttgcttcatgcttgagaatgcagatgtggtgcttctcatttattcttaaagctactggtagttaaagtaaaattcagtaacattttctgaccaagagacatgttttgttaaacaacaaaaaggtacatatgggttcacattgaaatatgtctatatgctgaatatagcaacatatgcatctaagatttgggcatttggttattaatagcgtgctggactattcaggaataaggaaaatgtggtttatcacttaagagaaacaagggctggtagctgtactattttcactcagaagcatgttcatttatgtagatgccactttaagctttatcagaattaaatgtgagatttcttctttga

SEQ ID NO: 2607 - DNA, 600 bp, Homo sapiens; identical to SEQ ID NO: 2606

SEQ ID NO: 2608 - DNA, 600 bp, Homo sapiens
agcgagttctacaaaactcgacacaacatcatcctgagtgccggcatcttcttcgtgtctgcaggtctgagtaacatcattggcatcatagtgtacatatctgccaatgccggagacccctccaagagcgactccaaaaagaatagttactcatacggctggtccttctacttcggggccctgtccttcatcatcgccgagatggtcggggtgctggcggtgcacatgtttatcgaccggcacaaacagctgcgggccacggcccgcgccacggactacctccaggcctctgccatcacccgcatccccagctaccgctaccgctaccagcgccgcagccgctccagctcgcgctccacggagccctcacactccagggacgcctcccccgtgggcatcaagggcttcaacaccctgccgtccacggagatctccatgtacacgctcagcagggaccccctgaaggccgccaccacgcccaccgccacctacaactccgacagggataacagcttcctccaggttcacaactgtatccagaaggagaacaaggactctctccactccaacacagccaaccgccggaccacccccgtataa

SEQ ID NO: 2609 - DNA, 600 bp, Homo sapiens; identical to SEQ ID NO: 2608

SEQ ID NO: 2610 - DNA, 1400 bp, Homo sapiens
  misc_feature (1388)..(1388): n is a, c, g, or t
  misc_feature (1394)..(1394): n is a, c, g, or t
agccaagaattcataagatagccatcctgggtcttggcagcagcattgggactcctccagaaggcattacagcagaagttctggtggtgacctctttcgatgaactgcagagaagggcctcagaagcaagagggaagattgttgtttataaccaaccttacatcaactactcaaggacggtgcaataccgaacgcagggggcggtggaagctgccaaggtgggggctttggcatctctcattcgatccgtggcctccttctccatctacagtcctcacacaggtattcaggaataccaggatggcgtgcccaagattccaacagcctgtattacggtggaagatgcagaaatgatgtcaagaatggcttctcatgggatcaaaattgtcattcagctaaagatgggggcaaagacctacccagatactgattccttcaacactgtagcagagatcactgggagcaaatatccagaacaggttgtactggtcagtggacatctggacagctgggatgttgggcagggtgccatggatgatggcggtggagcctttatatcatgggaagcactctcacttattaaagatcttgggctgcgtccaaagaggactctgcggctggtgctctggactgcagaagaacaaggtggagttggtgccttccagtattatcagttacacaaggtaaatatttccaactacagtctggtgatggagtctgacgcaggaaccttcttacccactgggctgcaattcactggcagtgaaaaggccagggccatcatggaggaggttatgagcctgctgcagcccctcaatatcactcaggtcctgagccatggagaagggacagacatcaacttttggatccaagctggagtgcctggagccagtctacttgatgacttatacaagtatttcttcttccatcactcccacggagacaccatgactgtcatggatcccagcagatggatgttgctgctgctgtttgggctgttgtttcttatgttgttgcagacatggaagaaatgctgcctaggtcctagaaacagtaagaaagaaacgttttcatgcttctggccagggatcctgggtctgcaactttggaaaactcctcttcacataacaatttcatccaattcatcttcaaagcacaactctatttcatgctttctgttattatctttcttgatactttccaaattctctgattctagaaaaaggaatcattctcccctccctcccaccacatagaatcaacatatggtagggattacagtgggggcatttctttatatcacctcttaaaaacattgtttccactttaaaagtaaacacttaataaatttttggaagatctctgaaaaaaaaaaaaaaaaaaaaaanaaattncctgcg

SEQ ID NO: 2611 - DNA, 1400 bp, Homo sapiens; identical to SEQ ID NO: 2610
  misc_feature (1388)..(1388): n is a, c, g, or t
  misc_feature (1394)..(1394): n is a, c, g, or t

SEQ ID NO: 2612 - DNA, 600 bp, Homo sapiens
acgcccacacgcacacacatgtgcacacacattgccccatcgcacaagaaacctgcagaggacccccactgggggcatcgaggctcagccctcagggcccggggcatctgactctggccccccaggaggggagctatttggacttttgggacacccaccgaggagaccctaagccaagaaggagaagaaagagcctgaagaccttcagtctgacccctgccaccttccggggcatttgggcactgtaggaaaagaggccagctctgcagccccctcggggacgcccccaccagctcaaattccgagtgcagaaaagaaaccggaccccccagtgaggcctgccaggcctcccggaccccttgttactcaggaacctcaccttggacggaatgggatgggggcttcggtgcccaccaaccccccacctccactctgccattccggcccacctccctctggccggacagaactggtgctctcttctccccactgtgcccgtccgcggaccggggacccttccccgtgccctaccccctcccattttgatggtgtctgtgacatttcctgttgtgaagtaaaagagggacccctgcgtcctgc

SEQ ID NO: 2613 - DNA, 1400 bp, Homo sapiens
gcgtcaacacgttcggcagttatgagtgccaatgccgcagtggcttcgtcctccatgacaacaagcacgactgcaaagaagccggctgtgaccacaaggtgacatccaccagtggtaccatcaccagccccaactggcctgacaagtatcccagcaagaaggagtgcacgtgggccatctccagcacccccgggcaccgggtcaagctgaccttcatggagatggacatcgagtcccagcctgagtgtgcctacgaccacctagaggtgttcgacgggcgagacgccaaggcccccgtcctcggccgcttctgtgggagcaagaagcccgagcccgtcctggccacaggcagccgcatgttcctgcgcttctactcagataactcggtccagcgaaagggcttccaggcctcccacgccacagagtgcgggggccaggtacgggcagacgtgaagaccaaggacctttactcccacgcccagtttggcgacaacaactaccctgggggtgtggactgtgagtgggtcattgtggccgaggaaggctacggcgtggagctcgtgttccagacctttgaggtggaggaggagaccgactgcggctatgactacatggagctcttcgacggctacgacagcacagcccccaggctggggcgctactgtggctcagggcctcctgaggaggtgtactcggcgggagattctgtcctggtgaagttccactcggatgacaccatcaccaaaaaaggtttccacctgcgatacaccagcaccaagttccaggacacactccacagcaggaagtgaccactgcctgagcaggggcggggactggagcctgctgcccttggtcgcctagactggatagtgggggtgggcggaacgcaacgcaccatccctctcccccaggccccaggacctgcagggccaatggcctggtgagactgtccataggaggtgggggaactggactccggcataagccacttccccacaaacccccaccagcaaggggctggggccagggagcagagcttccacaagacatttcgaagtcatcattcctctcttagggggccctgcctggtggcaagagggaatgtcagcaggaccccatcgccatccctgtgtctctacacgctgtattgtgtatcaccgggggcattattttcattgtaatgttcatttcccacccctgctccagcctcgatttggttttattttgagcccccattccaccacagtttcctggggcacaagtgtctgtgcatgtcccccaggagccaccgtggggagccgatggggaggggatggagaaacaagacagggcttctctcagcccatggccggtcagccacaccagggcaccgcagccaataaaccgaaagtgttacagcc

SEQ ID NO: 2614 - DNA, 600 bp, Homo sapiens
gcagctgtgaccccgggtacgagctggccccagacaagcgccgctgtgaggctgcttgtggcggattcctcaccaagctcaacggctccatcaccagcccgggctggcccaaggagtacccccccaacaagaactgcatctggcagctggtggcccccacccagtaccgcatctccctgcagtttgacttctttgagacagagggcaatgatgtgtgcaagtacgacttcgtggaggtgcgcagtggactcacagctgactccaagctgcatggcaagttctgtggttctgagaagcccgaggtcatcacctcccagtacaacaacatgcgcgtggagttcaagtccgacaacaccgtgtccaaaaagggcttcaaggcccacttcttctcaggaggggagctatttggacttttgggacacccaccgaggagaccctaagccaagaaggagaagaaagagccttgaagaccttcagtctgacccctgccaccttccggggcatttggacctgtaggaaaagaggccagctctgcagccccctcggggacgcccccaccagctcaaattccgagtgcagaaaagaaaccggaccccccag

SEQ ID NO: 2615 - DNA, 600 bp, Homo sapiens; identical to SEQ ID NO: 2614

SEQ ID NO: 2616 - DNA, 600 bp, Homo sapiens
cacccaggccaccctgcctcctcccgtccgccccagagggaccagacacaggtccctgagccttggggagtccacaggctccccatcttctccttactgcatctcagcccacatctcagcccttccccatggcaggggctccccgcagacgatgccaccttccttgtccccgcagctgcttgtggcggattcctcaccaagctcaacggctccatcaccagcccgggctggcccaaggagtacccccccaacaagaactgcatctggcagctggtggcccccacccagtaccgcatctccctgcagtttgacttctttgagacagagggcaatgatgtgtgcaagtacgacttcgtggaggtgcgcagtggactcacagctgactccaagctgcatggcaagttctgtggttctgagaagcccgaggtcatcacctcccagtacaacaacatgcgcgtggagttcaagtccgacaacaccgtgtccaaaaagggcttcaaggcccacttcttctcagaaaagaggccagctctgcagccccctcggggacgcccccaccagctcaaattccgagtgcagaaaagaaaccggaccccccag

SEQ ID NO: 2617 - DNA, 600 bp, Homo sapiens
tctgacgggtccattaacaaagcgggctttgccgtcaactttttcaaagaggtggacgagtgctctcggcccaaccgcgggggctgtgagcagcggtgcctcaacaccctgggcagctacaagtgcagctgtgaccccgggtacgagctggccccagacaagcgccgctgtgaggctgcttgtggcggattcctcaccaagctcaacggctccatcaccagcccgggctggcccaaggagtacccccccaacaagaactgcatctggcagctggtggcccccacccagtaccgcatctccctgcagtttgacttctttgagacagagggcaatgatgtgtgcaagtacgacttcgtggaggtgcgcagtggactcacagctgactccaagctgcatggcaagttctgtggttctgagaagcccgaggtcatcacctcccagtacaacaacatgcgcgtggagttcaagtccgacaacaccgtgtccaaaaagggcttcaaggcccacttcttctcagaaaagaggccagctctgcagccccctcggggacgcccccaccagctcaaattccgagtgcagaaaagaaaccggaccccccag

SEQ ID NO: 2618 - DNA, 600 bp, Homo sapiens; identical to SEQ ID NO: 2617

SEQ ID NO: 2619 - DNA, 600 bp, Homo sapiens
caatgaacattgtccctcggacaaaagtgaaaactatcaagatgttcctcattttaaatctgttgtttttgctctcctggctgccttttcatgtagctcagctatggcacccccatgaacaagactataagaaaagttcccttgttttcacagctatcacatggatatcctttagttcttcagcctctaaacctactctgtattcaatttataatgccaattttcggagagggatgaaagagactttttgcatgtcctctatgaaatgttaccgaagcaatgcctatactatcacaacaagttcaaggatggccaaaaaaaactacgttggcatttcagaaatcccttccatggccaaaactattaccaaagactcgatctatgactcatttgacagagaagccaaggaaaaaaagcttgcttggcccattaactcaaatccaccaaatacttttgtctaagttctcattctttcaattgttatgcaccagagattaaaaagctttaactataaaaacagaagctatttacatatttgttttcactcaactttccaagggaaatgttttattttgtaaaatgcattcatttgtttactgt

SEQ ID NO: 2620 - DNA, 600 bp, Homo sapiens; identical to SEQ ID NO: 2619

SEQ ID NO: 2621 - DNA, 878 bp, Homo sapiens
cagattttcaggttgattgatgtgggacagcagccacaatgaggaactcctatagatttctggcatcctctctctcagttgtcgtttctctcctgctaattcctgaagatgtctgtgaaaaaattattggaggaaatgaagtaactcctcattcaagaccctacatggtcctacttagtcttgacagaaaaaccatctgtgctggggctttgattgcaaaagactgggtgttgactgcagctcactgtaacttgaacaaaaggtcccaggtcattcttggggctcactcaataaccagggaagagccaacaaaacagataatgcttgttaagaaagagtttccctatccatgctatgacccagccacacgcgaaggtgaccttaaacttttacagctgacggaaaaagcaaaaattaacaaatatgtgactatccttcatctacctaaaaagggggatgatgtgaaaccaggaaccatgtgccaagttgcagggtgggggaggactcacaatagtgcatcttggtccgatactctgagagaagtcaatatcaccatcatagacagaaaagtctgcaatgatcgaaatcactataattttaaccctgtgattggaatgaatatggtttgtgctggaagcctccgaggtggaagagactcgtgcaatggagattctggaagccctttgttgtgcgagggtgttttccgaggggtcacttcctttggccttgaaaataaatgcggagaccctcgtgggcctggtgtctatattcttctctcaaagaaacacctcaactggataattatgactatcaagggagcagtttaaataaccgtttcctttcatttactgtggcttcttaatcttttcacaaataaa

SEQ ID NO: 2622 - DNA, 600 bp, Homo sapiens
tatggtttccacatgtataaaccctctcttttatggctttctcaacaaaaatttccaaaaggacctggtagtgcttattcaccactgctggtgcttcacacctcaggaaagatgtgaaaatattgccatctccactatgcacacagactccaagaggtctttaagattggctcgtataacaacaggtatatgaaaattgataatgctgaagctcttcttgaatgggagctggacaggtaatggtgggaatagggcaagatgcagaaagaagaaaccagaaccaaaaatagcaactttatacccacttttcctttaggctaagactgcctgtctcatatgtctatccaacacaccctccaacatacacgaacacacataccaccccttttctcttaagaaaataactctaataattcaaacaacctgcccgccatcatttgtggcaaagaatgagaatgagaaagcagagagagaggcaaacagcagtgatggctggggaacaatgttcacagatacttttattcaatggaatatctacaaaagttatgactaatgatatgcctagtaaaaacactgctatacctccttagcactgagaat

SEQ ID NO: 2623 - DNA, 600 bp, Homo sapiens; identical to SEQ ID NO: 2622

SEQ ID NO: 2624 - DNA, 600 bp, Homo sapiens
aatgagatgatcaacttaactcttcatccatccaaaaagagtgggcctcaggtgaaactctctggcagccataaatggagttattcattcatcaaaaaacacagaagaagatatagcaagaagacagcatgtgtgttacctgctccagaaagaccttctcaagagaaccactccagaatacttccagaaaactttggctctgtaagaagtcagctctcttcatccagtaagttcataccaggggtccccacttgctttgagataaaacctgaagaaaattcagatgttcatgaattgagagtaaaacgttctgttacaagaataaaaaagagatctcgaagtgttttctacagactgaccatactgatattagtatttgctgttagttggatgccactacaccttttccatgtggtaactgattttaatgacaatcttatttcaaataggcatttcaagttggtgtattgcatttgtcatttgttgggcatgatgtcctgttgtcttaatccaattctatatgggtttcttaataatgggattaaagctgatttagtgtcccttatacactgtcttcatatgtaataattctcactgttt

SEQ ID NO: 2625 - DNA, 600 bp, Homo sapiens; identical to SEQ ID NO: 2624

SEQ ID NO: 2626 - DNA, 1400 bp, Homo sapiens
cagcgcattttctacctgaaattggaagacttggtgccaccgccagcaataattgacaaacttttcctggacactttacctttctaagacctcctcccaagcacttcaaaggaactggaatgataatggaaactgtcaagagggggcaagtcacatgggcagagatagccgtgtgagcagtctcagctcaagctgccccccatttctgtaaccctcctagcccccttgatccctaaagaaaacaaacaaacaaacaaaaactgttgctatttcctaacctgcaggcagaacctgaaagggcattttggctccggggcatcctggatttagaacatggactacacacaatacagtggtataaactttttattctcagtttaaaaatcagtttgttgttcagaagaaagattgctataaggtataatgggaaatgtttggccatgcttggttgttgcagttcagacaaatgtaacacacacacacatacacacacacacacacacagagacacatcttaaggggacccacaagtattgccctttaacaagacttcaaagttttctgctgtaaagaaagctgtaatatatagtaaaactaaatgttgcgtgggtggcatgagttgaagaaggcaaaggcttgtaaatttacccaatgcagtttggctttttaaattattttgtgcctatttatgaataaatattacaaattctaaaagataagtgtgtttgcaaaaaaaaagaaaataaatacataaaaaagggacaagcatgttgattctaggttgaaaatgttataggcacttgctacttcagtaatgtctatattatataaatagtatttcagacactatgtagtctgttagattttataaagattggtagttatctgagcttaaacattttctcaattgtaaaataggtgggcacaagtattacacatcagaaaatcctgacaaaagggacacatagtgtttgtaacaccgtccaacattccttgtttgtaagtgttgtatgtaccgttgatgttgataaaaagaaagtttatatcttgattattttgttgtctaaagctaaacaaaacttgcatgcagcagcttttgactgtttccagagtgcttataatatacataactccctggaaataactgagcactttgaattttttttatgtctaaaattgtcagttaatttattattttgtttgagtaagaattttaatattgccatattctgtagtatttttctttgtatatttctagtatggcacatgatatgagtcactgcctttttttctatggtgtatgacagttagagatgctgattttttttctgataaattctttctttgagaaagacaattttaatgtttacaacaataaaccatgtaaatgaaaaaaaaaa

SEQ ID NO: 2627 - DNA, 600 bp, Homo sapiens
aagacatgtactgaattccataactgtacagaatgtagggatgggttaagcctgcagggatcccggtgctctgtctcctgtgaagatggacggtatttcaacggccaggactgccagccctgccaccgcttctgcgccacttgtgctggggcaggagctgatgggtgcattaactgcacagagggctacttcatggaggatgggagatgcgtgcagagctgtagtatcagctattactttgaccactcttcagagaatggatacaaatcctgcaaaaaatgtgatatcagttgtttgacgtgcaatggcccaggattcaagaactgtacaagctgccctagtgggtatctcttagacttaggaatgtgtcaaatgggagccatttgcaaggatgcaacggaagagtcctgggcggaaggaggcttctgtatgcttgtgaaaaagaacaatctgtgccaacggaaggttcttcaacaactttgctgcaaaacatgtacatttcaaggctgagcagccatcttagatttctttgttcctgtagacttatagattattccatattattaaaaagaaaaaaaaaagccaaaaaaaaaaaaaaaa

SEQ ID NO: 2628 - DNA, 600 bp, Homo sapiens; identical to SEQ ID NO: 2627

SEQ ID NO: 2629 - DNA, 1400 bp, Homo sapiens
  misc_feature (1065)..(1071): n is a, c, g, or t
cttattctgtgagatgttttgtattatttcaccagcagcatagaacaggacctctgcttttgcacaccttttccccaggagcagaagagagtgggcctgccctctgccccatcattgcacctgcaggcttaggtcctcacttctgtctcctgtcttcagagcaaaagacttgagccatccaaagaaacactaagctctctgggcctgggttccagggaaggctaagcatggcctggactgactgcagccccctatagtcatggggtccctgctgcaaaggacagtggcagaccccggcagtagagccgagatgcctccccaagactgtcattgcccctccgatcgtgaggccacccactgacccaatgatcctctccagcagcacacctcagccccactgacacccagtgtccttccatcttcacactggtttgccaggccaatgttgctgatggcccctccagcacacacacataagcactgaaatcactttacctgcaggcaccatgcacctcccttccctccctgaggcaggtgagaacccagagagaggggcctgcaggtgagcaggcagggctgggccaggtctccggggaggcaggggtcctgcaggtcctggtgggtcagcccagcacctcgcccagtgggagcttcccgggataaactgagcctgttcattctgatgtccatttgtcccaatagctctactgccctccccttcccctttactcagcccagctggccacctagaagtctccctgcacagcctctagtgtccggggaccttgtgggaccagtcccacaccgctggtccctgccctcccctgctcccaggttgaggtgcgctcacctcagagcagggccaaagcacagctgggcatgccatgtctgagcggcgcagagccctccaggcctgcaggggcaaggggctggctggagtctcagagcacagaggtaggagaactggggttcaagcccaggcttcctgggtcctgcctggtcctccctcccaaggagccattctatgtgactctgggtggaagtgcccagcccctgcctgacggnnnnnnngatcactctctgctggcaggattcttcccgctccccacctacccagctgatgggggttggggtgcttctttcagccaaggctatgaagggacagctgctgggacccacctccccccttccccggccacatgccgcgtccctgcccccacccgggtctggtgctgaggatacagctcttctcagtgtctgaacaatctccaaaattgaaatgtatatttttgctaggagccccagcttcctgtgtttttaatataaatagtgtacacagactgacgaaactttaaataaatgggaattaaatatttaaaaaaaaaagcggccgcgaattc

SEQ ID NO: 2630 - DNA, 1400 bp, Homo sapiens
actggaaagttcctcaagatggagactttgactttttgaaaaatctaagtttagaagaactacagatgcggttaaaagcactggaccccatgatggaacgggagatagaagaacttcgtcagagatacactgcgaaaagacagcccattctggatgcgatggatgcaaagaaaagaaggcagcaaaacttttgagtctaatttcctctctgtttttaactattctggagaccaagaaaccactaggaattgaaggaatatttggatatttttaatcctaagattttgccctacaattaggcagaggtcaaaaagtgacaatggtacatgcccaggtaaattcccaaaaggcagaattgacagttgtatctgctgtgcattcactctaagatgaggagaacaaaagaagtgtattctcttgttctgtcagctgcataccagtaataaaactgttatgaaatggattttcaaggtctctaaaccttgaaaatccaaaggctattgttgcattgtacagcactgaaagggctttatgttacaatattctttattcctatctagtatactaggctatttattgtccccttaggtaaacttatttatttatgctattttggctttgtttcattttttaaggacaagatcaggatagctttggtgaaggtagggtcatattaatatgatgataatgtgcaaccaatttatactttctgcagggagctatggggtacattccttgatttccaggatagtttttcaaataggaaagcaataatggcagtagttctcaaatgggctaggccttttttatattgaagcaataattccatttttaccctttgaaattttgtttttttgatttttgatgtttggtacaaatagaactatatatatttaggtaaaatagatctatcgtgtttaaaaccaaagaaatcaatggaacccttgcacaaaaaagtgtgataaatatttttaaataaaaacttaatacaaatgtaatttgttaatattgtttcatgttttatgtgtagatctaatagctgaactgattcaaactgtaataagctcatcaatttcatttctatgaaaatgtgctctgttgtcacaggatgtttctgttgattttattcatttcctgggaattggtaaacatcatgttcctgatgataacccagtagcaaaaacatttgtactgagtggtacaagccttggggactgaaaaaaaaaaaagattaaaaccattaaaaagaaactcatttttacgctgaatgaacatttatatgattgcattgggaccagtcatttcctaagctacatatggccatcttgacagtgttttttcttttgtgtgtttaattattatgtgtaaatcataaagacaaataaatttcactgtgccac

SEQ ID NO: 2631 - DNA, 1400 bp, Homo sapiens; identical to SEQ ID NO: 2630

SEQ ID NO: 2632 - DNA, 1400 bp, Homo sapiens
ccaccagtacctccttcagcggaaggcctcaccacccacagtgtgaatcctgaggtgccgccattggcggttctgctgcttcgctgcagggataaggtggagctaccgaacagctgattcatatgccaagaatttggagtcttctttcaaaccagtgggggttggacaatgaatgtagttaactggttcctgctcacactccagaattaaattctattgaaaaaggaaaatcagcaattcagcaaaaaaataaataaaaaataaaaatgtaaatatgatagtaataaaatagagcataacgaaactgtgaaactttctgaagccttgtcagtggttaaaagtatttaacactctactgttaatgacagatgttctgtttttataacctaccaaaaggaaactagaggcttcttggtgaagagcatttttgtgaagtgggttctgcaaggagcctataaagccaagggtggtgtccatttctgggaatggttaaacacaaaaggctgatagctggtatcacatagttggagtcagtgcataattccaagtggctttttttttttttggcacggggactgatcaggaagatatattcctgcataactcaatctgaaccaaggattgtagtttagttttcctccttgccttcccttctgtgtgaccgaccccttggccaaaaaaaaaacaaaaagcaaaaaacaaaaacctaccctgttctggtttttttcctccctttagttccacccccaacccccattccctggtgtccttcttagagatgaagaaataataaggaaacatctttcatagccacattaaataagagaaactgatatacattatttttttctttttaaagatgacttataagaaccctgaaatttatataggtgagacaatagaaataaaaagatcttcagccaggcctttctgaaggagttattctgctaaaaatggtcttagttgtctgaaaagccagctcttgaacctcttcacaacagtatcaacactggcttctcccggttcattttatgcgtgcgagaagtcagtggtaactgctgcagggcttaatacattagtggtaactggtttaaaaaacaaagactgtaagcctgtgtgtgccactgtttgcttcaacagtatatcctactaataagcctcacctatttaatccaatgagttttaaatctaaatctcattcccttcttctttccctaccttttttttctttttttcttaaaaaaatattttgtgttattaacagaaattcatatttggtgtggcttaacggtatttcagaaggtcatcagattgtgagactgcttccttgaaacatttttgtgctattgttttaaaaaaataattaaaaaacagttggcgttaataaaaatgtcaatgtg

SEQ ID NO: 2633 - DNA, 1400 bp, Homo sapiens; identical to SEQ ID NO: 2632

SEQ ID NO: 2634 - DNA, 1400 bp, Homo sapiens
tggtcatttattttgctctaataatactgcaagaaaactatggctgaacttagtttttggataatctagttcatgtgcattaggctgccgtatatactactatgatatttagctgcagtatcaatgtggcataaatactgcggcagcattcttcgaaaaccgcattttcaaatttatccccgtaatcaatgtgggcctattaaaaaaccaaatcatgatacaagaaacaaccttggaaaagttatttccctttgtaatacctttaaaaatccagagtattatattcattttactgccactgtggaaacaggttctagatttcatactccatctaaagtcatttttcagttacatgtaagtattatttactgctattgggatctattcttcagatattcaaaaacattttttgctttaaaatgcatatctttaattgggtgttggtccaaaattaaaatttttgctgtctgtttttctctaccccattttgtggtaatttggcaacttgagctctcccaattattgtaatataaggacagacataatagtattctgtacccatagtaataattgcatcaagcttagatgagaaatttttttcatatactggcctttaaatcattaatggacaattggctataaaggtaggtctgttaactttctttgtgtgttcctgatggaattcaccatagccttacagcttttctcagaaggtaacttgttataagagaaatggcatttgcatgttccagagtcagaacctgtacagtatataaagcataaacaccttgaatttgattttagttcaccacattcaaggatccaggatgccaaaaatatgtgtgaacatttgaaacatttttatttgctgctttttccctttgatatagttgaaagaatgtattgtaaattggcatacaatactgcctttaatagaaaacctaaatgctggggcacatttcacatatcgactacctgagaaattgctttgtgtcccactgttattaaagcaaaaagtataatgttcttcacttgaactaatcaaatacaatagattataaattgtgtattgtaaataaaagttcactctgtgagtgcacattttggtaaattatttatttatgttagcatttaaaagtttaaaaaaaatgcatttgaccaggataaatgaggtatgttgatcatggctttgctttatatcttgatattaaagctggtttatcatcctggtattttaaaagctgctttggggttttttttttcttttttttttttttaatgtaaactaacctcctgcatgacagaggttaaaattttgtctgcacttgagttcacttgagtttacatttgaaatgtgcatgtttatttatatagatttcaataaagctattcaaggcctt

SEQ ID NO: 2635 - DNA, 1400 bp, Homo sapiens
aaattcaaggaaaagttcttcatttaaatgatatttgtactattgaccatcctgaagacagtgaatatgaagctgaaatgtcacttcaaggagaagtaaatattaaatccaaccatatttcacaagagggtgttatgcataaagaatattgtgtcaaccagaaagatttgaatggccaagcaaaaatgatcgaaagtgtaactgacaatcaaaaatccacagaggaagtagatatgaaaaatatcaacatggataatgatctggaggttttaacatcttctcccactaggaatttaaatggtgcctacctaacggaagggagcaatggagaagtggacatttccaatggtttcaaaaacctaaatttgaatgctgctcttcatcctgatgaaataaatatagagattctgaatgatagtcatactcctggaacaaaggtgtatgaggttgtaaatgaagatccagaaactgctttctgtactcttgcaaacagggaagttttcaatactgatgagtgttcaatccaacattgtttatatcagttcacccgtaatgagaaacttcgagatgcgaataaactgctttgtgaagtatgcacacggagacagtgtaatggaccaaaggcaaatataaaaggtgaaaggaagcatgtttacaccaatgccaaaaagcagatgctaatttctcttgctcctcctgttcttactcttcatttaaagagatttcagcaggctggttttaacctacgcaaagttaacaaacacataaagtttccggaaatcttagatttggctcctttttgcacccttaaatgtaagaatgttgcagaagaaaatacaagggtactctattccttatatggagttgttgaacacagtggtactatgaggtcggggcattacactgcctatgccaaggcaagaaccgcaaatagtcatctctctaatcttgttcttcacggtgatattccacaagattttgaaatggaatcaaaagggcagtggtttcacatcagcgacacacatgtgcaagctgtgcctacaactaaagtactaaactcacaagcgtacctcctattttatgagagaatactgtaataatatcaaaagcactttttctggaaacacatttatggcttttataatggctgaaataacgataaaaaaagactaattaaaatcatgttcacttaacattaaatacatgccagaagaaatcatgtttatttaaatattgaagggaaaaatacctaaaaatgtacaaaggttttatattgtcatagtggtttttattcctgctttgtttctggaaaggaaatcctgaattacttaagtactttgtgtttaatatatctgggtgatggatcacaacacatcaataaactgacttaccctaaaatc

SEQ ID NO: 2636 - DNA, 1400 bp, Homo sapiens; identical to SEQ ID NO: 2635

SEQ ID NO: 2637 - DNA, 600 bp, Homo sapiens
attaccttttctgctctctcggactttgcagacactctctctggtcccctgagaatcccaaaacccaatcgaaatatactgatccagatggacctgcctttggtccctggagataagatccactgcttggacatcctttttgctttcaccaagaatgtcctaggagaatccggggagttggattctctgaaggcaaatatggaggagaagtttatggcaactaatctttcaaaatcatcctatgaaccaatagcaaccactctccgatggaagcaagaagacatttcagccactgtcattcaaaaggcctatcggagctatgtgctgcaccgctccatggcactctctaacaccccatgtgtgcccagagctgaggaggaggctgcatcactcccagatgaaggttttgttgcattcacagcaaatgaaaattgtgtactcccagacaaatctgaaactgcttctgccacatcattcccaccgtcctatgagagtgtcactagaggccttagtgatagagtcaacatgaggacatctagctcaatacaaaatgaagatgaagccaccagtatggagctgattgcccctgggccctagtga

SEQ ID NO: 2638 - DNA, 600 bp, Homo sapiens; identical to SEQ ID NO: 2637

SEQ ID NO: 2639 - DNA, 600 bp, Homo sapiens
acagatgtgacgcggacaatgcattttgggacccctacagcctacgagaaggaatgcttcacatatgtcctcaagggccacatagctgtgagtgcagccgttttcccgactggaaccaaaggtcaccttcttgactcctttgcccgttcagctttatgggattcaggcctagattacttgcacgggactggacatggtgttgggtcttttttgaatgtccatgagggtccttgcggcatcagttacaaaacattctctgatgagcccttggaggcaggcatgattgtcactgatgagcccgggtactatgaagatggggcttttggaattcgcattgagaatgttgtccttgtggttcctgtgaagaccaagtataattttaataaccggggaagcctgacctttgaacctctaacattggttccaattcagaccaaaatgatagatgtggattctcttacagacaaagagtgcgactggctcaacaattaccacctgacctgcagggatgtgattgggaaggaattgcagaaacagggccgccaggaagctctcgagtggctcatcagagagacgcaacccatctccaaacagcattaa

SEQ ID NO: 2640 - DNA, 600 bp, Homo sapiens
agctttgtattttggttagctatgcaaagtcatgagaaagatgagattcttttaatgaatataaaatatttattaggggattctatttcatattaattccaggtgatttgttttttcacagtaaaccatgtaagtggaagctttactgccaatgtgtttatatgttatataatatctcataatagtagacatgaaaactactttgaaattccttgatttgtaattcaatgctattaaatcatacaaaagcaaattttgcacagtaaactaatagtttgagatttaaaactattttcttatagtatagttacaaaatgggaaaataattagttacagtgggaaattcactcatattaatggaggattgtacatataaatactatttaaacaacatatgtaattttgaaaatttttaaataagagcattaaaagactttaatgatttggaatactaaatttaattgtttagaatattaagttttcctctgtgcaaatttaaaacaaataacaagagatcgtgttacagtcacaatctacttttcttaaactttgtatctctaggaacgaaggtggaaatacgggaaacaactttgtttttaa

SEQ ID NO: 2641 - DNA, 600 bp, Homo sapiens; identical to SEQ ID NO: 2640

SEQ ID NO: 2642 - DNA, 600 bp, Homo sapiens
  misc_feature (501)..(501): n is a, c, g, or t
  misc_feature (579)..(579): n is a, c, g, or t
atttttacatggtagatcaacaattctttttgggggtagattagaaaacccttacactttggctatgaacaaataataaaaattattctttaaagtaatgtctttaaaggcaaagggaagggtaaagtcggaccagtgtcaaggaaagtttgttttattgaggtggaaaaatagccccaagcagagaaaaggagggtaggtctgcattataactgtctgtgtgaagcaatcatttagttactttgattaatttttcttttctccttatctgtgcagtacaggttgcttgtttacatgaagatcatgctatattttatatatgtagcccctaatgcaaagctctttacctcttgctattttgttatatatatttcagatgacatctccctgctaatgctcagagatcttttttcactgtaagaggtaacctttaacaatatgggtattacctttgtctcttcataccggttttatgacaaaggtctattgaatttatttgtntgtaagtttctactcccatcaaagcagctttctaagtttattgccttgggttattatggaatgatagttatagccccntataatgccttacctaggaaa

SEQ ID NO: 2643 - DNA, 600 bp, Homo sapiens; identical to SEQ ID NO: 2642
  misc_feature (501)..(501): n is a, c, g, or t
  misc_feature (579)..(579): n is a, c, g, or t

SEQ ID NO: 2644 - DNA, 1400 bp, Homo sapiens
acacttgggaacttcagggcggtttcaacggtgtttcccgctcagcaattctgcaggagaattctactctgtctgcaagtaaacaagtgttgcataaatggagcatctactgttgtcacggctatattcggaggcattctccaaaatgaggttaactgcctcatatgtgggacagaatctagaaagtttgatccattcctagacctttcattagatattccaagtcagttcagaagtaagcgctctaagaatcaagaaaatggaccagtttgttcgttacgagattgtcttcgcagttttaccgacttagaagaacttgatgagacagagttatatatgtgccataaatgcaaaaagaaacaaaagtccacaaaaaagttttggattcaaaaactacccaaggtgctatgcttacatttgaaaagatttcattggacagcatatttaagaaataaagttgatacatacgtagaatttccactgagaggcctagacatgaaatggtacttactagagcctgagaacagtggcccggagagctgcctgtatgacctcgccgctgtggtggtgcaccatggttccggggttggttctggacattacacagcatacgcaactcacgaaggccgctggttccacttcaatgacagtactgtaacactgactgacgaggagactgtggtgaaggcgaaggcctacatccttttctacgtggaacaccaggccaaagctggatcggataaactttaatacctcctccaaatcatcattcaccaaccataccagagaaacatttccagttttccacaaatacttgatacaagatttaatttcattatgcacttttcaatttcctattttggatttagttttgtcaatggtagtgacttactgaacatggggcaccaactaattttgttgttgttctaccagaaaacctcagcagatgttttgatttgctgctttagttgtaataattcaatttttataggtagttgtaagaacttagtcttatttgacttttttattttatgttaatgttttcagttctcactttgaggcacatttacatcaatgcttttgttcctctcacatgctgaaagcaagatgtgttccttattgtgaagagcgacacaactgcctgctgcctttccacagctataatggacatcaggttgactctaaatcaaggatcatgtgtgcacaatacttgtggcccacaaaatttcacaatgactgctgaggaatcattctttttgcctgtaaaatataacaaagggcatcattaagtagaccaggtaattactgcttgtctctcaaggctgctgtctttatcagcactaactaaataaatttgttggttcagttgtacttgtcctgcaaataaaaaaaaaaaaaaa

SEQ ID NO: 2645 - DNA, 600 bp, Homo sapiens
agtcactgcataataatccggccaacaggcgcaccacgcccgtctgaactgacctctgacctctgccccacgcccagcacagccttgggggaagtgtacagagatgtctctgaggttgcatggcatggtccttgtgatggtattactttttacaaagaatgaaaccaaatggactcagccctctcccacattttcccctcaccctccaagtcctaacccctccatcctctctaacttttcaagccaatcccttaatgtcattcctctctctgtgtatctgtgccagatgttttcctttcttccttctttactggaaggacctccacattcttccctccttggaagaggactttactaaaagtcacaggtggtggccaggggggatttccgaatctccatcaggcgcgctcatagttgtccccattgtctacccacacaaatcctcaggaaaccaaccaccgcccaggtggccctgagggaggcattcacctttatgtgttagaaaaacatgaccagaaatcaaagatgtcagagccccgaagcagctaatgtaataagcactcatgttattaaaggttttgccttgtcgtaaccaaccga

SEQ ID NO: 2646 - DNA, 1400 bp, Homo sapiens
tatccctgctggtttccttgccccaaattatctatggcaatgtctttaatctcgacaagctcatatgtggttaccatgacgaggcaatttccactgtggttcttgccacccagatgacactggggttcttcttgccactgctcaccatgattgtctgctattcagtcataatcaaaacactgcttcatgctggaggcttccagaagcacagatctctaaagatcatcttcctggtgatggctgtgttcctgctgacccagatgcccttcaacctcatgaagttcatccgcagcacacactgggaatactatgccatgaccagctttcactacaccatcatggtgacagaggccatcgcatacctgagggcctgccttaaccctgtgctctatgcctttgtcagcctgaagtttcgaaagaacttctggaaacttgtgaaggacattggttgcctcccttaccttggggtctcacatcaatggaaatcttctgaggacaattccaagactttttctgcctcccacaatgtggaggccaccagcatgttccagttataggccttgccagggtttcgagaagctgctctggaatttgcaagtcatggctgtgccctcttgatgtggtgaggcaggctttgtttatagcttgcgcattctcatggagaagttatcagacactctggctggtttggaatgcttcttctcaggcatgaacatgtactgttctcttcttgaacactcatgctgaaagcccaagtagggggtctaaaatttttaaggactttccttcctccatctccaagaatgctgaaaccaagggggatgacatgtgactcctatgatctcaggttctccttgattgggactggggctgaaggttgaagaggtgagcacggccaacaaagctgttgatggtaggtggcacactgggtgcccaagctcagaaggctcttctgactactgggcaaagagtgtagatcagagcagcagtgaaaacaagtgctggcaccaccaggcacctcacagaaatgagatcaggctctgcctcaccttggggcttgacttttgtataggtagatgttcagattgctttgattaatccagaataactagcaccagggactatgaatgggcaaaactgaattataagaggctgataattccagtggtccatggaatgcttgaaaaatgtgcaaaacagcgtttaagactgtaatgaatctaagcagcatttctgaagtggactctttggtggctttgcattttaaaaatgaaattttccaatgtctgccacacaaacgtatgtaaatgtatatacccacacacatacacacatatgtcatatattactagcatatgagtttcatagctaagaaataaaactgttaaagtctccaaact

SEQ ID NO: 2647 - DNA, 1400 bp, Homo sapiens; identical to SEQ ID NO: 2646

SEQ ID NO: 2648 - DNA, 1400 bp, Homo sapiens
ctacagtaacaggttatggaatggtctcttttatcctatcacaaaaaaagacatagatatttaggctgattaattatctctaccagtttttgtttctcaagctcagtgcatagtggtaaatttcagtgttaacattggagacttgcttttctttttctttttttataccccacaattcttttttattacacttcgaattttagggtacacgagcacaacgtgcaggttagttacatatgtatacatgtgccatgttggtgtgctgaacccagtaactcgtcatttgatttattaaaagccaagataatttacatgtttaaagtatttactattacccccttctaatgtttgcataattctgagaactgataaaagacagcaataaaagaccagtgtcatccatttaggtagcaagacatattgaatgcaaagttctttagatatcaatattaacacttgacattattggaccccccattctggatgtatatcaagatcataattttatagaagagtctctatagaactgtcctcatagctgggtttgttcaggatatatgagttggctgattgagactgcaacaactacatctatatttatgggcaatattttgttttacttatgtggcaaagaactggatattaaactttgcaaaagagaatttagatgagagatgcaattttttaaaaagaaaattaatttgcatccctcgtttaattaaatttatttttcagttttcttgcgttcatccataccaacaaagtcataaagagcatattttagagcacagtaagactttgcatggagtaaaacattttgtaattttcctcaaaagatgtttaatatctggtttcttctcattggtaattaaaattttagaaatgatttttagctctaggccactttacgcaactcaatttctgaagcaattagtggtaaaaagtatttttccccactaaaaaactttaaaacacaaatcttcatatatacttaatttaattagtcaggcatccattttgccttttaaacaactaggattccctactaacctccaccagcaacctggactgcctcagcattccaaatagatactacctgcaattttatacatgtatttttgtatcttttctgtgtgtaaacatagttgaaattcaaaaagttgtagcaatttctatactattcatctcctgtccttcagtttgtataaacctaaggagagtgtgaaatccagcaactgaattgtggtcacgattgtatgaaagttcaagaacatatgtcagttttgttacagttgtagctacatactcaatgtatcaacttttagcctgctcaacttaggctcagtgaaatatatatattatacttattttaaataattcttaatacaaataaaatggta

SEQ ID NO: 2649 - DNA, 600 bp, Homo sapiens
gctaacatgctttgtgctggcttagaaagtgggggcaaggacagctgcagaggtgacagcggaggggcactggtgtttctagatagtgaaacagagaggtggtttgtgggaggaatagtgtcctggggttccatgaattgtggggaagcaggtcagtatggagtctacacaaaagttattaactatattccctggatcgagaacataattagtgatttttaacttgcgtgtctgcagtcaaggattcttcatttttagaaatgcctgtgaagaccttggcagcgacgtggctcgagaagcattcatcattactgtggacatggcagttgttgctccacccaaaaaaacagactccaggtgaggctgctgtcatttctccacttgccagtttaattccagccttacccattgactcaaggggacataaaccacgagagtgacagtcatctttgcccacccagtgtaatgtcactgctcaaattacatttcattaccttaaaaagccagtctcttttcatactggctgttggcatttctgtaaactgcctgtccatgctctttgtttttaaacttgttcttattgaaaaaaaaaaaaaaaaa

SEQ ID NO: 2650 - DNA, 600 bp, Homo sapiens; identical to SEQ ID NO: 2649

SEQ ID NO: 2651 - DNA, 600 bp, Homo sapiens
atgctgtgctgcaaaagaaaaaggacatcaaattcaagaagctaagcctgatctcctgtaaaaacatcatttccctgatggacaccagcggcaatgggaagctggagtttgatgaattcaaagtgttctgggacaagctgaagcagtggattaaccttttccttcggtttgatgctgacaagtccggcaccatgtctacctatgaactacggactgcactgaaagctgcaggctttcagctgagcagccacctcctgcagctgattgtgctcaggtatgcggatgaggagctccagctggacttcgatgacttcctcaactgcctggtccggctggagaatgcgagccgggtgttccaggctctcagtacaaagaacaaggagttcattcatctcaatataaatgagttcatccatttgacaatgaacatctgaggctgccttgtagagatgcagcctgcccagctgaatcttggcttctggaccttgaccttcagaacttctcttggtgtggaaccattacgcccagggttcactcccctctcatcgtccggccttctcccttcatcttgatctgggaagaatgaaatgaactcagcta

SEQ ID NO: 2652 - DNA, 600 bp, Homo sapiens; identical to SEQ ID NO: 2651

SEQ ID NO: 2653 - DNA, 945 bp, Homo sapiens
atggaatttacagatagaaactacacgttggtcactgagtttattctattaggttttccaactcgccctgaactgcagattgtcctgttcctcatgtttctgacattgtatgctataattctgatagggaacattggattgatgctgttgatcaggattgatcctcaccttcaaacccccatgtattttttccttagcaacctatcatttgtagacctttgctatttctcagacattgttcccaaaatgctggtcaatttcctctcggagaacaaatctatttcctattatgggtgtgccctgcagttttattttttctgtacttttgcagatacagaatccttcatcctggccgccatggcctatgatcgctatgtcgccatctgtaaccctttattgtacacagttgtgatgtctaggggcatctgtatgcggttgattgtcttgtcataccttggaggcaacatgagttccctggttcacacatcctttgcctttattctgaaatattgtgacaaaaatgttattaatcattttttctgtgacctccctcccctgcttaaactatcctgcactgacacaacaattaatgagtggctcctctccacatacggcagctcagtggaaatcatttgttttatcatcatcatcatctcctactttttcattcttctctcagtcttaaagatccgctctttcagtgggaggaagaagaccttttctacatgcgcctctcacctgacttcagtgacgatctaccaagggactctcctctttatttactcacggcccagctacctgtattctccaaacactgataaaattatctcagtgttctacaccattttcattccagtgctgaatccgttgatttatagtttgagaaataaagatgtaaaggatgcagctgagaaagttctaagatcaaaggtagattcttcatga

SEQ ID NO: 2654 - DNA, 600 bp, Homo sapiens
aaagccaggtttgtgtgtgtaggtatttggatttttgtgattttgaccagttctccatttctaatggccaaaccacaaaaagatgagaaaaataataccaagtgctttgagcccccacaagacaatcaaactaaaaatcatgttttggtcttgcattatgtgtcattgtttgttggctttatcatcccttttgttattataattgtctgttacacaatgatcattttgaccttactaaaaaaatcaatgaaaaaaaatctgtcaagtcataaaaaggctataggaatgatcatggtcgtgaccgctgcctttttagtcagtttcatgccatatcatattcaacgtaccattcaccttcattttttacacaatgaaactaaaccctgtgattctgtccttagaatgcagaagtccgtggtcataaccttgtctctggctgcatccaattgttgctttgaccctctcctatatttcttttctgggggtaactttaggaaaaggctgtctacattcagaaagcattctttgtccagcgtgacttatgtacccagaaagaaggcctctttgccagaaaaaggagaagaaatatgtaaagtatag

SEQ ID NO: 2655 - DNA, 600 bp, Homo sapiens
aatccatttctgtgtcctgctggaggttttaacctagacaaggattccgcttattccttggtatggtgacagtgtctctccatggcctgagcagggagattataacagctgggttcgcaggagccagccttggccctgttgtaggcttgttctgttgagtggcacttgctttgggtccaccgtctgtctgctccctagaaaatgggctggttcttttggccctcttctttctgaggcccactttattctgaggaatacagtgagcagatatgggcagcagccaggtagggcaaaggggtgaagcgcaggccttgctggaaggctatttacttccatgcttctccttttcttactctatagtggcaacattttaaaagcttttaacttagagattaggctgaaaaaaataagtaatggaattcacctttgcatcttttgtgtctttcttatcatgatttggcaaaatgcatcacctttgaaaatatttcacatattggaaaagtgctttttaatgtgtatatgaagcattaattacttgtcactttctttaccctgtctcaatattttaagtgtgtgcaattaaagatcaaatagatacat

SEQ ID NO: 2656 - DNA, 600 bp, Homo sapiens
tcttgcaaaaagaaatctggccaacttcaaagttccgccgcccttagaaggcacacaaagcaccaagaagcttagtactaaacctaacaaacacaaaataaatgtaaaaaccaacactagttacctcagaatttggattggattttgttaatgcagaatttccccagaaacctgtaatcagtgtctgttaaattgctccattacatacaaagacaggaggattaaaacaattcaactaacagtaacaatctgagttccattttcctttgatggtgtgccagaagttaaggaaatcaagcataacattggccatgaagaaaaaaattgtaacaatctcactggaggccaaacaggaatggagaatcacatttaatggagctgtacaaagtcatttattgtgtgatttaatatacattactgaaatcctgcgagcaagaatttcatatatataaaatttgtaggcagtgcataaagtatttttcaagttgtggaaattatactgagtatgctaaaaattccatcttctgtatatgtgccagtattttggaaagtttaaatccaatgtttttatttaaatatattaaaaatcatatgaaaaat

SEQ ID NO: 2657 - DNA, 600 bp, Homo sapiens
gctcaccagggccagcagggccctaggctggggtcgtacagctgaagttgtgggtgcattggcctaggctgagcgtggggcagggaattatgggggctgtgcccagggtgggtgtctggcacccagctgccagccttctgtcctgggcaaactactccctacttaagggaataggccaggctccatccggaggcagggaccatgccaggaggagcccctgtggtcacggcatcctgtggtgtccatgaggtaccacagctccactcctggctggaacccggcaccctctgtgggaagccagcactagctctcatcccccatccgggagataccaccagtcctggtccccttttgccaacacctgctggtcagatgtccccctacccccaccccactgtcctccaaggctacaggacccctgcttctgacacagtgagcaacaagcctgggtttccctgctggcagacggcagatccctcaggaaacctgctccacttgtcagggtctcttcggagacccaggatttagggtcacatgctgcaggcagggctgtggcccagctgggtctgacaaggacccgtgtcacatcgtgaatattta

SEQ ID NO: 2658 - DNA, 600 bp, Homo sapiens
cgaagtcaacagaaacaaatcctcccatcatgaaacaaactctgcctacatgttatctccaaagccacagaagaaatttgtggaccaggcttgtggcccaagtcattcaaaagaaagtatggtgagtcccaagatctctgctggacatcaacactgtggtcagagcagctcgacccccatcaacactcggattgaaccttactacagcatctataacagcagcccttcccaggaggagagcagcccatgtaacttacagccagtaaactcttttggatttgccaattcatatattgccatgcattatcacaccactaatgacttagtgcaggaatatgacagcacttcagccaagcagattccagtcccctccgtttaaagtcatggaggctataggatcttatgtaaacagtttttgtttctgatagtaatggactttattctaacttgagatcagtggcggatcaaaacctacaagattcaactgaaaagttggcagttatggttttctttcatctgatgtgtcagtatctgttgatttgctttgtagtttgttgacatcttaagatttgatgtgaaagttttagattttttaccctg

SEQ ID NO: 2659 - DNA, 600 bp, Homo sapiens; identical to SEQ ID NO: 2658

SEQ ID NO: 2660 - DNA, 1077 bp, Homo sapiens
gccgcgggagaggaggccatgggcgcgcgcggggcgctgctgctggcgctgctgctggctcgggctggactcaggaagccggagtcgcaggaggcggcgccgttatcaggaccatgcggccgacgggtcatcacgtcgcgcatcgtgggtggagaggacgccgaactcgggcgttggccgtggcaggggagcctgcgcctgtgggattcccacgtatgcggagtgagcctgctcagccaccgctgggcactcacggcggcgcactgctttgaaacctatagtgaccttagtgatccctccgggtggatggtccagtttggccagctgacttccatgccatccttctggagcctgcaggcctactacacccgttacttcgtatcgaatatctatctgagccctcgctacctggggaattcaccctatgacattgccttggtgaagctgtctgcacctgtcacctacactaaacacatccagcccatctgtctccaggcctccacatttgagtttgagaaccggacagactgctgggtgactggctgggggtacatcaaagaggatgaggcactgccatctccccacaccctccaggaagttcaggtcgccatcataaacaactctatgtgcaaccacctcttcctcaagtacagtttccgcaaggacatctttggagacatggtttgtgctggcaatgcccaaggcgggaaggatgcctgcttcggtgactcaggtggacccttggcctgtaacaagaatggactgtggtatcagattggagtcgtgagctggggagtgggctgtggtcggcccaatcggcccggtgtctacaccaatatcagccaccactttgagtggatccagaagctgatggcccagagtggcatgtcccagccagacccctcctggccgctactctttttccctcttctctgggctctcccactcctggggccggtctgagcctacctgagcccatgcagcctggggccactgccaagtcaggccctggttctcttctgtcttgtttggtaataaacacattccagttgatgccttgcagggcattcttcaaaa

SEQ ID NO: 2661 - DNA, 1186 bp, Homo sapiens
aggaatctgcgctcgggttccgcagatgcagaggttgaggtggctgcgggactggaagtcatcgggcagaggtctcacagcagccaaggaacctggggcccgctcctcccccctccaggccatgaggattctgcagttaatcctgcttgctctggcaacagggcttgtagggggagagaccaggatcatcaaggggttcgagtgcaagcctcactcccagccctggcaggcagccctgttcgagaagacgcggctactctgtggggcgacgctcatcgcccccagatggctcctgacagcagcccactgcctcaagccccgctacatagttcacctggggcagcacaacctccagaaggaggagggctgtgagcagacccggacagccactgagtccttcccccaccccggcttcaacaacagcctccccaacaaagaccaccgcaatgacatcatgctggtgaagatggcatcgccagtctccatcacctgggctgtgcgacccctcaccctctcctcacgctgtgtcactgctggcaccagctgcctcatttccggctggggcagcacgtccagcccccagttacgcctgcctcacaccttgcgatgcgccaacatcaccatcattgagcaccagaagtgtgagaacgcctaccccggcaacatcacagacaccatggtgtgtgccagcgtgcaggaagggggcaaggactcctgccagggtgactccgggggccctctggtctgtaaccagtctcttcaaggcattatctcctggggccaggatccgtgtgcgatcacccgaaagcctggtgtctacacgaaagtctgcaaatatgtggactggatccaggagacgatgaagaacaattagactggacccacccaccacagcccatcaccctccatttccacttggtgtttggttcctgttcactctgttaataagaaaccctaagccaagaccctctacgaacattctttgggcctcctggactacaggagatgctgtcacttaataatcaacctggggttcgaaatcagtgagacctggattcaaattctgccttgaaatattgtgactctgggaatgacaacacctggtttgttctctgttgtatccccagccccaaagacagctcctggccatatatcaaggtttcaataaatatttgctaaatgagtg

SEQ ID NO: 2662 - DNA, 600 bp, Homo sapiens
agcggataacaggcttcatggagctctgtcaaaatgatcaaattctacttctgaagtcaggttgcttggaagtggttttagtgagaatgtgccgtgccttcaacccattaaacaacactgttctgtttgaaggaaaatatggaggaatgcaaatgttcaaagccttaggttctgatgacctagtgaatgaagcatttgactttgcaaagaatttgtgttccttgcagctgaccgaggaggagatcgctttgttctcatctgctgttctgatatctccagaccgagcctggcttatagaaccaaggaaagtccagaagcttcaggaaaaaatttattttgcacttcaacatgtgattcagaagaatcacctggatgatgagaccttggcaaagttaatagccaagataccaaccatcacggcagtttgcaacttgcacggggagaagctgcaggtatttaagcaatctcatccagagatagtgaatacactgtttcctccgttatacaaggagctctttaatcctgactgtgccaccgcgtgcaaatgaaggggacaagagaactgtctcatagtcatggaatgcatcaccattaagacaa

SEQ ID NO: 2663 - DNA, 600 bp, Homo sapiens; identical to SEQ ID NO: 2662

SEQ ID NO: 2664 - DNA, 1400 bp, Homo sapiens
gagtgcagtggggacccccctcaatgccctgggctctccatatcgagtcatcacctctgccatgggcccaccctcaggagcacttgcagcgcctccaggaatcaacttggttgccccacccagctctcagctaaatgtggtcaacagtgtcagcagttcagaggacatcaagcccttaccagggcttcccgggattggaaacatgaactacccatccaccagccccggatctctggttaaacacatctgtgctatctgtggagacagatcctcaggaaagcactacggggtatacagttgtgaaggctgcaaagggttcttcaagaggacgataaggaaggacctcatctacacgtgtcgggataataaagactgcctcattgacaagcgtcagcgcaaccgctgccagtactgtcgctatcagaagtgccttgtcatgggcatgaagagggaagctgtgcaagaagaaagacagaggagccgagagcgagctgagagtgaggcagaatgtgctaccagtggtcatgaagacatgcctgtggagaggattctagaagctgaacttgctgttgaaccaaagacagaatcctatggtgacatgaatatggagaactcgacaaatgaccctgttaccaacatatgtcatgctgctgacaagcagcttttcaccctcgttgaatgggccaagcgtattccccacttctctgacctcaccttggaggaccaggtcattttgcttcgggcagggtggaatgaattgctgattgcctctttctcccaccgctcagtttccgtgcaggatggcatccttctggccacgggtttacatgtccaccggagcagtgcccacagtgctggggtcggctccatctttgacagagttctaactgagctggtttccaaaatgaaagacatgcagatggacaagtcggaactgggatgcctgcgagccattgtactctttaacccagatgccaagggcctgtccaacccctctgaggtggagactctgcgagagaaggtttatgccacccttgaggcctacaccaagcagaagtatccggaacagccaggcaggtttgccaagctgctgctgcgcctcccagctctgcgttccattggcttgaaatgcctggagcacctcttcttcttcaagctcatcggggacacccccattgacaccttcctcatggagatgttggagaccccgctgcagatcacctgagccccaccagccacagcctccccacccaggatgacccctgggcaggtgtgtgtggacccccaccctgcactttcctccacctcccaccctgacccccttcctgtccccaaaatgtgatgcttataataaagaaaacctttctacaaaaaaaaaaaaaaaaaaaaaaccggaattc

SEQ ID NO: 2665 - DNA, 1400 bp, Homo sapiens
ggaggggtgttatctcatgagagctgtgatcctttaaagaaacctaaacatttcatagacttttgcacaatggcagaatgcagttaagtggtttaagtggtgttagctttgagggcaaggcaaagtgaggaagggctggtgcagggaaagcaagaaggctggagggatccagcgtatcttgccagtaaccagtgaggtgtatcagtaaggtgggattatgggggtagatagaaaaggagttgaatcatcagagtaaactgccagttgcaaatttgataggatagttagtgaggattattaacctctgagcagtgatatagcataataaagccccgggcattattattattatttcttttgttacatctattacaagtttagaaaaaacaaagcaattgtcaaaaaaagttagaactattacaacccctgtttcctggtacttatcaaataacttagtatcatgggggttgggaaatgaaaagtaggagaaaagtgagattttactaagacctgttttactttaccttcactaacaatggggggagaaaggagtacaaataggatctttgaccagcactgtttatggctgctatggtttcagagaatgtttatacattatttctaccgagaattaaaacttcagattgttcaacatgagagaaaggctcagcaacgtgaaataacgcaaatggcttcctctttccttttttggaccatctcagtctttatttgtgtaattcattttgaggaaaaaacaactccatgtatttattcaagtgcattaaagtctacaatggaaaaaaagcagtgaagcattagatgctggtaaaagctagaggagacacaatgagcttagtacctccaacttcctttctttcctaccatgtaaccctgctttgggaatatggatgtaaagaagtaacttgtgtctcatgaaaatcagtacaatcacacaaggaggatgaaacgccggaacaaaaatgaggtgtgtagaacagggtcccacaggtttggggacattgagatcacttgtcttgtggtggggaggctgctgaggggtagcaggtccatctccagcagctggtccaacagtcgtatcctggtgaatgtctgttcagctcttctgtgagaatatgattttttccatatgtatatagtaaaatatgttactataaattacatgtactttataagtattggtttgggtgttccttccaagaaggactatagttagtaataaatgcctataataacatatttatttttatacatttatttctaatgaaaaaaacttttaaattatatcgcttttgtggaagtgcatataaaatagagtatttatacaatatatgttactagaaataaaagaacacttttggaaaaaaaaaaaaaaaaaaaaa

SEQ ID NO: 2666 - DNA, 1400 bp, Homo sapiens; identical to SEQ ID NO: 2665

SEQ ID NO: 2667 - DNA, 600 bp, Homo sapiens
  misc_feature (481)..(481): n is a, c, g, or t
  misc_feature (551)..(551): n is a, c, g, or t
  misc_feature (564)..(564): n is a, c, g, or t
  misc_feature (575)..(575): n is a, c, g, or t
gtcaaatacaccttctttgttcctaatgacgtggactttagcatgcagagcagcaaagagagagcaaccaccaacatcatccagccgctgctccacgcacagtgggtgctgggggactggtctgagtgctctagcacctgcggggccggctggcagaggcgaactgtagagtgcagggacccctccggccaggcctctgccacctgcaacaaggctctgaaacccgaggatgccaagccctgcgaaagccagctgtgccccctgtgattcaggggggcaggggccagtcttgtgctcctggacatgcggtactgaggtgcagacaaggtctccactgtggtgactgggtcccttggccatatcaaggcagcacggcccacccaggcctcccattgccgcaacccctccagtactgcacaaattcctaagggggaagagaaaaggtatggggcggcaaaacctatcatcaactgtccawtgnaatggaacttgctcgggttcaattaaaggcataagttaaagtaaattcattatgatcaacagacctcacntcatctgttgcangatacaactantaaaaaaaaaaaaaaaaaaaaaaaa

SEQ ID NO: 2668 - DNA, 600 bp, Homo sapiens; identical to SEQ ID NO: 2667
  misc_feature (481)..(481): n is a, c, g, or t
  misc_feature (551)..(551): n is a, c, g, or t
  misc_feature (564)..(564): n is a, c, g, or t
  misc_feature (575)..(575): n is a, c, g, or t

SEQ ID NO: 2669 - DNA, 600 bp, Homo sapiens
tgcaaagagaattaggagagaggttaatgttacttttttccattttggaaataattttaatcaagtaactcaaatgtgacaaaatttatttttattttttgtggttatattcccaacaacattaaaaaatactcgaggcataaatgtagttgtctcctactctgcttctcttactatactcatacatttttaatatggtttatcaatgattcatgtttccctcaaatagtgatggtttacacctgtcatggaaacaatcctagagagctcagagcaattaaaccactattccatgcttttaagtagttttctccacctttttcttatgagtctcactagattgactgaggaatgtatgtctaaattcctggagaagatgatatggattggaaactgaaattcagagaaatggagtgttcaatagataccacgaattgtgaacaaagggaaaattctatacaactcaatctaagtcagtccactttgacttcgtactgtctttcacctttccattgttgcatcttgaattttttaaaatgtctagaattcaggatgctaggggctacttctccaaaaaaaaaaaaaaaaaaaaaaaaaaaa

SEQ ID NO: 2670 - DNA, 600 bp, Homo sapiens
ggcaaggagataggggtgtatgagctccagaggctgctcaacaggatggccatcaaattcaaaagcttcaagaccaagggctttggcctggatgcttgccgctgcatgatcaacctcatggataaagatggctctggcaagctggggcttctagagttcaagatcctgtggaaaaaactcaagaaatggatggacatcttcagagagtgtgaccaggaccattcaggcaccttgaactcctatgagatgcgcctggttattgagaaagcaggcatcaagctgaacaacaaggtaatgcaggtcctggtggccaggtatgcagatgatgacctgatcatagactttgacagcttcatcagctgtttcctgaggctaaagaccatgttcacattctttctaaccatggaccccaagaatactggccatatttgcttgagcctggaacagtggctgcagatgaccatgtggggatagaggcgctgtaggagcctggtcatctctaccagcagcagcagcagcgaggttctagcccaggagggtggggtgcttcttgtagccctcagctctccagtctctgctgatgaaatgggatccaggtgg

SEQ ID NO: 2671 - DNA, 1400 bp, Homo sapiens
tatgcctgccggggtggcggaacctgccagatggacgctttcatgcggcgcaagtgccagcagtgccggctgcgcaagtgcaaggaggcagggatgagggagcagtgcgtcctttctgaagaacagatccggaagaagaagattcggaaacagcagcagcaggagtcacagtcacagtcgcagtcacctgtggggccgcagggcagcagcagctcagcctctgggcctggggcttcccctggtggatctgaggcaggcagccagggctccggggaaggcgagggtgtccagctaacagcggctcaagaactaatgatccagcagttggtggcggcccaactgcagtgcaacaaacgctccttctccgaccagcccaaagtcacgccctggcccctgggcgcagacccccagtcccgagatgcccgccagcaacgctttgcccacttcacggagctggccatcatctcagtccaggagatcgtggacttcgctaagcaagtgcctggtttcctgcagctgggccgggaggaccagatcgccctcctgaaggcatccactatcgagatcatgctgctagagacagccaggcgctacaaccacgagacagagtgtatcaccttcttgaaggacttcacctacagcaaggacgacttccaccgtgcaggcctgcaggtggagttcatcaaccccatcttcgagttctcgcgggccatgcggcggctgggcctggacgacgctgagtacgccctgctcatcgccatcaacatcttctcggccgaccggcccaacgtgcaggagccgggccgcgtggaggcgttgcagcagccctacgtggaggcgctgctgtcctacacgcgcatcaagaggccgcaggaccagctgcgcttcccgcgcatgctcatgaagctggtgagcctgcgcacgctgagctctgtgcactcggagcaggtcttcgccttgcggctccaggacaagaagctgccgcctctgctgtcggagatctgggacgtccacgagtgaggggctggccacccagccccacagccttgcctgaccaccctccagcagatagacgccggcaccccttcctcttcctagggtggaaggggccctgggcgagcctgtagacctatcggctctcatcccttgggataagccccagtccaggtccaggaggctccctccctgcccagcgagtcttccagaaggggtgaaagggttgcaggtcccgaccactgacccttcccggctgccctccctccccagcttacacctcaagcccagcacgcagcgtaccttgaacagagggaggggaggacccatggctctccccccctagcccgggagaccaggggccttcctcttcctctgcttttatttaataaaaataaaaacagaaa

SEQ ID NO: 2672 - DNA, 1007 bp, Homo sapiens
gttcccagaagctccccaggctctagtgcaggaggagaaggaggaggagcaggaggtggagattcccagttaaaaggctccagaatcgtgtaccaggcagagaactgaagtactggggcctcctccactgggtccgaatcagtaggtgaccccgcccctggattctggaagacctcaccatgggacgcccccgacctcgtgcggccaagacgtggatgttcctgctcttgctggggggagcctgggcaggacactccagggcacaggaggacaaggtgctggggggtcatgagtgccaaccccattcgcagccttggcaggcggccttgttccagggccagcaactactctgtggcggtgtccttgtaggtggcaactgggtccttacagctgcccactgtaaaaaaccgaaatacacagtacgcctgggagaccacagcctacagaataaagatggcccagagcaagaaatacctgtggttcagtccatcccacacccctgctacaacagcagcgatgtggaggaccacaaccatgatctgatgcttcttcaactgcgtgaccaggcatccctggggtccaaagtgaagcccatcagcctggcagatcattgcacccagcctggccagaagtgcaccgtctcaggctggggcactgtcaccagtccccgagagaattttcctgacactctcaactgtgcagaagtaaaaatctttccccagaagaagtgtgaggatgcttacccggggcagatcacagatggcatggtctgtgcaggcagcagcaaaggggctgacacgtgccagggcgattctggaggccccctggtgtgtgatggtgcactccagggcatcacatcctggggctcagacccctgtgggaggtccgacaaacctggcgtctataccaacatctgccgctacctggactggatcaagaagatcataggcagcaagggctgattctaggataagcactagatctcccttaataaactcacaactctc

SEQ ID NO: 2673 - DNA, 1007 bp, Homo sapiens; identical to SEQ ID NO: 2672

SEQ ID NO: 2674 - DNA, 1400 bp, Homo sapiens
acgcctcaacatggattactggaagatcctggcggcgcagcacaagtgcaaaatgaacaaccagactaaaacgctggactgcctgatggccgcctccatccccgccgtggagatcttcatggtgaagatctttatgctgctggtggtggggatcaccagcgggatgtggatttggacctccaagactctgcagtcctggcagcaggtgtgcagccgtaggttaaagaagaagagccggagaaaaccggccagcgtgatcaccagcggtgggatttacaaaaaagcccagcatccccagaaaactcaccacgggaaatatgagatccctgcccagtcgcccacctgcgtgtgaacagggctggagggaagggcacaggggcgcccggagctaagatgtggtgcttttcttggttgtgtttttctttcttcttcttcttttttttttttttataaaagcaaaagagaaatacataaaaaagtgtttaccctgaaattcaggatgctgtgatacactgaaaggaaaaatgtacttaaagggttttgttttgttttggttttccagcgaagggaagctcctccagtgaagtagcctcttgtgtaactaatttgtggtaaagtagttgattcagccctcagaagaaaacttttgtttagagccctccgtaaatatacatctgtgtatttgagttggctttgctacccatttacaaataagaggacagataactgctttgcaaattcaagagcctcccctgggttaacaaatgagccatccccagggcccacccccaggaaggccacagtgctgggcggcatccctgcagaggaaagacaggacccggggcccgcctcacaccccagtggatttggagttgcttaaaatagactctggccttcaccaatagtctctctgcaagacagaaacctccatcaaacctcacatttgtgaactcaaacgatgtgcaatacatttttttctctttccttgaaaataaaaagagaaacaagtattttgctatatataaagacaacaaaagaaatctcctaacaaaagaactaagaggcccagccctcagaaacccttcagtgctacattttgtggctttttaatggaaaccaagccaatgttatagacgtttggactgatttgtggaaaggaggggggaagagggagaaggatcattcaaaagttacccaaagggcttattgactctttctattgttaaacaaatgatttccacaaacagatcaggaagcactaggttggcagagacactttgtctagtgtattctcttcacagtgccaggaaagagtggtttctgcgtgtgtatatttgtaatatatgatatttttcatgctccactattttattaaaaataaaatatgttctttaaaaaaa

SEQ ID NO: 2675 - DNA, 1400 bp, Homo sapiens
gaagcgcatgaagatggtgtcccagagcttcacccagcgctttcggctgtctcgggacaggaaagtggccaagtcgctggccgtcatcgtgagcatctttgggctctgctgggccccatacacgctgctgatgatcatccgggccgcctgccatggccactgcgtccctgactactggtacgaaacctccttctggctcctgtgggccaactcggctgtcaaccctgtcctctaccctctgtgccaccacagcttccgccgggccttcaccaagctgctctgcccccagaagctcaaaatccagccccacagctccctggagcactgctggaagtgagtggcccaccagagcctccctcagccacgcctctctcagcccaggtctcctgggcatctggccctgctgccccctacccggctcgttcccccaggggtgagccccgccgtgtctgtggccctctcttaatgccacggcagccaccctgccatggaggcgccttcctgggttggccagagggcccctcactggctggactggaggctgggtggccggccctgccccccacattctggctccaccggggagggacagtctggaggtcccagacatgctgcccaccccctgctggtgcccacccttcgcagttactggttggtgttcttcccaaagcaagcacctgggtgtgctccaggcttcctgccctagcagtttgcctctgcacgtgcacacacctgcacacccctgcacacacctgcacaccgtccctctccccggacaagcccaggacactgcctttgctgccttctgtctcttgcataagcctcaggcctggccctttcacccctcttcccaccaactctctctgcccccaaaagtgtcaaggggccctaggaacctcgaagctgttctctgcttttccattctgggtgttttcagaaagatgaagaagaaaacatgtctgtgaacttgatgttcgtgggatgtttaatcaagagagacaaaattgctgaggagctcagggctggattggcaggtgtgggctcccacgccctcctccctccgctaaggcttccggctgagctgtgccagctgcttctgcccaccccgcctctgggctcacaccagccctggtggccaagcctgccccggccactctgtttgctcacccaggacctctgggggttgttgggaggagggggcccggctgggcccgagggtcccaaggcgtgcaggggcggtccagaggaggtgcccgggcaggggccgcttcgccatgtgctgtgcacccgtgccacgcgctctgcatgctcctctgcctgtgcccgctgcgctgccctgcaaaccgtgaggtcacaataaagtgtatttttttaaaaaaaaaaaaaaaaaaaaaaaaaaa

SEQ ID NO: 2676 - DNA, 1400 bp, Homo sapiens; identical to SEQ ID NO: 2675

SEQ ID NO: 2677 - DNA, 1400 bp, Homo sapiens
catcctattgttgatgggcacttgagaactttccattttggcgctattacaaatagtgcaactatgaatgtactgcatgttaccatcttacttgagcctttaatggacttatttcttcaaatccttccaaaaattattataagcattgaaattatagtttcaagccaactgtggatacccttaccctttcctcctttatcacaaccaccgttacaagtatacttatatttccctaaaatacatttaaaacttacctaagtgacatttgtagttggagtaataggagcttccagctctaataaaacagctgtctctaacttattttatttccatcatgtcagagcaggtgaagagccagaagtgaagagtgactagtacaaattataaaaagccactagactcttcactgttagctttttaaaacattaggctcccatccctatggaggaacaactctccagtgcctggatcccctctgtctacaaatataagattttctgggcctaaaggatagatcaaagtcaaaaatagcaatgcctccctatccctcacacatccagacatcatgaattttacatggtactcttgttgagttctatagagccttctgatgtctctaaagcactaccgattctttggagttgtcacatcagataagacatatctctaattccatccataaatccagttctactatggctgagttctggtcaaagaaagaaagtttagaagctgagacacaaagggttgggagctgatgaaactcacaaatgatggtaggaagaagctctcgacaatacccgttggcaaggagtctgcctccatgctgcagtgttcgagtggattgtaggtgcaagatggaaaggattgtaggtgcaagctgtccagagaaaagagtccttgttccagccctattctgccactcctgacagggtgaccttgggtatttgcaatattcctttgggcctctgcttctctcacctaaaaaaagagaattagattatattggtggttctcagcaagagaaggagtatgtgtccaatgctgccttcccatgaatctgtctcccagttatgaatcagtgggcaggataaactgaaaactcccatttaagtgtctgaatcgagtgagacaaaattttagtccaaataacaagtaccaaagttttatcaagtttgggtctgtgctgctgttactgttaaccatttaagtggggcaaaaccttgctaattttctcaaaagcatttatcattcttgttgccacagctggagctctcaaactaaaagacatttgttattttggaaagaagaaagactctattctcaaagtttcctaatcagaaatttttatcagtttccagtctcaaaaatacaaaataaaaacaaacgtttttaatact

SEQ ID NO: 2678 - DNA, 1400 bp, Homo sapiens
agaagcctcagaaatcaaaaccaggcgtattctcatttctggatcccctggcttatgaaatctggatgtgcattgtctttgcttacattggagtcagcgtagttcttttcctagtcagcaggttcagtccttatgaatggcacttggaagacaacaatgaagaacctcgtgacccacaaagtcctcctgatcctccaaatgaatttggaatatttaacagtctttggttttccttgggtgcctttatgcagcaaggatgtgatatttctccaagatcactctccgggcgcattgttggaggggtttggtggttcttcaccctgatcataatttcttcctatactgccaatctcgctgctttcctgactgtggagaggatggtttctcccatagagagtgctgaagacttagctaaacagactgaaattgcatatgggaccctggactccggttcaacaaaagaatttttcagaagatccaaaattgctgtgtacgagaaaatgtggtcttacatgaaatcagcggagccatctgtgtttaccaaaacaacagcagacggagtggcccgagtgcgaaagtccaagggaaagttcgccttcctgctggagtcaaccatgaatgagtacattgagcagagaaaaccatgtgatacgatgaaagttggtggaaatctggattccaaaggctatggtgtggcaacccctaaaggctcagcattaggaacgcctgtaaaccttgcagtattgaaactcagtgaacaaggcatcttagacaagctgaaaaacaaatggtggtacgataagggggaatgtggagccaaggactccgggagtaaggacaagaccagcgctctgagcctgagcaatgtggcaggcgttttctatatacttgtcggaggtctggggctggccatgatggtggctttgatagaattctgttacaaatcacgggcagagtccaaacgcatgaaactcacaaagaacacccaaaactttaagcctgctcctgccaccaacactcagaattatgctacatacagagaaggctacaacgtgtatggaacagagagtgttaagatctagggatcccttcccactggaggcatgtgatgagaggaaatcaccgaaaacgtggctgcttcaaggatcctgagccagatttcactctccttggtgtcgggcatgacacgaatattgctgatggtgcaatgacctttcaataggaaaaactgattttttttttccttcagtgccttatggaacactctgagactcgcgacaatgcaaaccatcattgaaatctttttgctttgcttgaaaaaaaataattaaaataaaaaccaacaaaaatggacatgcatcaaacccttgatgtattaatatttattatagttttcatta

SEQ ID NO: 2679 - DNA, 600 bp, Homo sapiens
cagagacggcagccccatccttcccgcagcaccagcctgagccacagtggggcccatggccccagctggctgggtcgcccctcctcgggcgcctgcgctcctctgcagcctgagctccaccctcccctcttcttgcggcaccgcccacccacaccccgtctgccccttgaccccacacgccggggctggccctgccctcccccacggccgtccctgacttcccagctggcagcgcctcccgccgcctcgggccgcctcctccagactcgagagggctgagcccctcctctcctcgtccggcctgcagcccagaacgggcctccccgggggtccccggacgctggctcgggactgtcttcaaccctgccctgcaccttgggcacgggagagcgccacccgcccgcccccgccctcgctccgggtgcgtgaccggcccgccaccttgtacagaaccagcactcccagggcccgagcgcgtgccttccccgtgcggcccgtgcgcagccgcgctctgcccctccgtccccagggtgcaggcgcgcaccgcccaacccccacctcccggtgtatgcagtggtgatgcctaaaggaatgtcacgc

SEQ ID NO: 2680 - DNA, 1400 bp, Homo sapiens
aatgggtagaaaatgaatttgctagaacacacatttttaatgaaaagaagtaataaatgtaactattaagctaaaatgcaaatgtcagtactgaattcctgcttgttaattacataatatgtgatgctctagaaaatagtcacaagtattaataatgccttagatgatagtcttaaatattaggttgaggtctacctaacctaagctgcttcctggaaagcttcatgttgaaagaacctatgggtggcaccatgtggacttttctgtccctactgtgatgaatagccccacccttcttgctgtccccaacacacctgatgtcactttgagccatatagttgaagtacaaattaataggccttatgatatgcacgaattttactatagataatatatgttgtttctggttttgtttgccaatgagcataataaatgtaaaacctatatagtatccctgtgattattgtatgagcctttgtttgagatttgaaaaaaacatggctccatcacatattcccttttttcttttgatgtctactcaaatcatgaattaatcacatacctcatcattaatcttttcaaggtccttctattgttttgtctgattttctccatcatcctgattagcatgtttattccctcactacccccaggagatattcactgtaatgaatatgtctttggctatgtatgtgtccttgtgttatgttgtacagtgttgttttgagtctgttattatttacacagatgttattatgctatagcttctatttctgtttttgcttcttatttctcttataattctcacttatttcctattttttctactcatttctatttgttactcctttttactggacatgatgtttacaagatacaactgtgttactgtattccatctagtacggggcctttggtgtggcttactatttcattgtgtgcacccacccacccaccacactggacttttctagagatggacagcttggttacctccaccttcctgcactcattctcaaacatactgatgttcatacaaaccagcagagtgctgagggacgatatgtactattacaaaaccagacacttttacattcatggtccaacagaacacatggcctagaggcaatgttgcatataccttaatctttgatatgaataatatctttgttctttatatttcttaaaacagaaagggtggaaaatcactatacagaagcaatatccaaagatctcctgatcataaagacaaggggtcttttcagtcttccctctcctcaaaccttgtgtagcattgcacaatatagatctcagtcaacattcactgagtgccaagaatgtgagaaacactgtaccatgcctgtcatgcgaaatatttaaataaacagattgtcttacag

SEQ ID NO: 2681 - DNA, 896 bp, Homo sapiens
cctatcatcgcaaaactcatgatgctccggctgctcagttccctcctccttgtggccgttgcctcaggctatggcccaccttcctctcgcccttccagccgcgttgtcaatggtgaggatgcggtcccctacagctggccctggcaggtttccctgcagtatgagaaaagcggaagcttctaccacacctgtggcggtagcctcatcgcccccgactgggttgtgactgccggccactgcatctcgagctcccggacctaccaggtggtgttgggcgagtacgaccgtgctgtgaaggagggccccgagcaggtgatccccatcaactctggggacctctttgtgcatccactctggaaccgctcgtgtgtggcctgtggcaatgacatcgccctcatcaagctctcacgcagcgcccagctgggagacgccgtccagctcgcctcactccctccggctggtgacatccttcccaacgagacaccctgctacatcaccggctggggccgtctctataccaacgggccactcccagacaagctgcaggaggccctgctgccggtggtggactatgaacactgctccaggtggaactggtggggttcctccgtgaagaagaccatggtgtgtgctggaggggacatccgctccggctgcaatggtgactctggaggacccctcaactgccccacagaggatggtggctggcaggtccatggcgtgaccagctttgtttctgcctttggctgcaacacccgcaggaagcccacggtgttcactcgagtctccgccttcattgactggattgaggagaccatagcaagccactagaaccaaggcccagctggcagtgctgatcgatcccacatcctgaataaagaadaaagatctctcag

SEQ ID NO: 2682 - DNA, 600 bp, Homo sapiens
ctccagcacctccacctcctcttcaggcagcaggaggaatgcctttcagggtgtggtctactcggccaaccagtgcaaagccctcatcaccatcctggtggtcctcggtgccttcatggtcacctggggcccctacatggttgtcatcgcctctgaggccctctgggggaaaagctccgtctccccgagcctggagacttgggccacatggctgtcctttgccagcgctgtctgccaccccctgatctatggactctggaacaagacagttcgcaaagaactactgggcatgtgctttggggaccggtattatcgggaaccatttgtgcaacgacagaggacttccaggctcttcagcatttccaacaggatcacagacctgggcctgtccccacacctcactgcgctcatggcaggtggacagcccctggggcacagcagcagcacgggggacactggcttcagctgctcccaggactcaggtaacctgcgtgctttataagcctctcacctgtcgcgttttccctgtgttgcgtttcccccgtgtcgcgtttcccctgtgcaggctcaagagctggcggaggggcatttcccacggtg

SEQ ID NO: 2683 - DNA, 600 bp, Homo sapiens; identical to SEQ ID NO: 2682

SEQ ID NO: 2684 - DNA, 600 bp, Homo sapiens
acagagctggtgctgcggcggatctcagcctcgtgccagcacccgacagccttcgaggaagccatacccaagtccttcatgatcagcgcagacatggcccatgctgtgcatcccaactacctggacaagcatgaggagaaccaccggcctttattccacaagggccccgtgatcaaggtgaacagcaagcaacgctatgcttcaaacgcggtgtcagaggccctgatccgagaggtggccaacaaagtcaaggtccccctgcaggatctcatggtccggaatgacaccccctgtggaaccaccattggacctatcttggcttctcggctggggctgcgggtgctggatttaggcagcccccaactggccatgcactctatccgggagatggcctgcaccacaggagtcctccagaccctcaccctcttcaagggcttctttgagctgttcccttctctaagccataatctcttagtggattgagccctcttggaaagacttctctgccatccctttgcacctgagaggggaagttctcagctgagctgaagctggattattaaagtggattgtcactcagaaaaaaaaaaaaaaaaaaaa

SEQ ID NO: 2685 - DNA, 600 bp, Homo sapiens; identical to SEQ ID NO: 2684

SEQ ID NO: 2686 - DNA, 600 bp, Homo sapiens
ttgaaatccaaactactttcttaatatcactttggtctccatttttcccaggacaggaaatatgtccccccctaactttcttgcttcaaaaattaaaatccagcatcccaagatcattctacaagtaattttgcacagacatctcctcaccccagtgcctgtctggagctcacccaaggtcaccaaacaacttggttgtgaaccaactgccttaaccttctgggggagggggattagctagactaggagaccagaagtgaatgggaaagggtgaggacttcacaatgttggcctgtcagagcttgattagaagccaagacagtggcagcaaaggaagacttggcccaggaaaaacctgtgggttgtgctaatttctgtccagaaaatagggtggacagaagcttgtggggtgcatggaggaattgggacctggttatgttgttattctcggactgtgaattttggtgatgtaaaacagaatattctgtaaacctaatgtctgtataaataatgagcgttaacacagtaaaatattcaataagaagtcaaaaaaaaaaaaaaaaaaaaaaaaaaaaaaaaaaaaaaaaaaaaaaaaaaaaa

SEQ ID NO: 2687 - DNA, 600 bp, Homo sapiens
tgcgctggtgatcggtgccacggtgatggagggcttctacgtcatcttcgacagagcccagaagagggtgggcttcgcagcgagcccctgtgcagaaattgcaggtgctgcagtgtctgaaatttccgggcctttctcaacagaggatgtagccagcaactgtgtccccgctcagtctttgagcgagcccattttgtggattgtgtcctatgcgctcatgagcgtctgtggagccatcctccttgtcttaatcgtcctgctgctgctgccgttccggtgtcagcgtcgcccccgtgaccctgaggtcgtcaatgatgagtcctctctggtcagacatcgctggaaatgaatagccaggcctgacctcaagcaaccatgaactcagctattaagaaaatcacatttccagggcagcagccgggatcgatggtggcgctttctcctgtgcccacccgtcttcaatctctgttctgctcccagatgccttctagattcactgtcttttgattcttgattttcaagctttcaaatcctccctacttccaagaaaaacaattaaaaaaaaaaacttcattctaaaccaaaaaaaaaaaaaaaaaa

SEQ ID NO: 2688 - DNA, 600 bp, Homo sapiens
cggcagctgagattcgaaagcaccatgaaaagagaccccactgccgagcaattccaggaagagctggaaaaattccagcaggccatcgattcccgggaagatcccgtcagttgtgccttcgtggtactcatggctcacgggagggaaggcttcctcaagggagaagatggggagatggtcaagctggagaatctcttcgaggccctgaacaacaagaactgccaggccctgcgagctaagcccaaggtgtacatcatacaggcctgtcgaggagaacaaagggaccccggtgaaacagtaggtggagatgagattgtgatggtcatcaaagacagcccacaaaccatcccaacatacacagatgccttgcacgtttattccacggtagagggatacatcgcctaccgacatgatcagaaaggctcatgctttatccagaccctggtggatgtgttcacgaagaggaaaggacatatcttggaacttctgacagaggtgacccggcggatggcagaagcagagctggttcaagaaggaaaagcaaggaaaacgaaccctgaaatccaaagcaccctccggaaacggctgtatctgcagtag

SEQ ID NO: 2689 - DNA, 600 bp, Homo sapiens
ggggaagaattcagtgctgaagagactgaggaaacttttgtgaaagctgaaactgaaaaaagtgactatgacaccccaaactaccttctgtctccagcagctgctcatagacccaagagtcagaaatgtgtggcctataagttccgattggtggtaaaagctgacgggaaccaggagaccaacaatggctgtcacaaggtgaaaatcatgccctgccccttcccagtggccaaggaaccttcaacgaaaggcctcaatcccaaccccagccatcaaatgaccaaacgaaagagagtggtcctagtcaaagagaggaaagcagcccagacactgagtgccattctcctggccttcatcatcacatggaccccgtataacatcatggtcctggtttctaccttctgtgacaagtgtgtcccagtcaccctgtggcacttgggctattggttgtgctatgtcaatagcactgtcaaccccatctgctatgccctctgcaacagaaccttcaggaagacctttaagatgctgcttctctgccgatggaaaaagaaaaaagtggaagagaagttgtactggcaggggaacagcaagctaccctga

SEQ ID NO: 2690 - DNA, 600 bp, Homo sapiens; identical to SEQ ID NO: 2689

SEQ ID NO: 2691 - DNA, 1400 bp, Homo sapiens
ccaatcacagtgaatgctaaaatgaataaggacgtaaacagtttccccagcccaatgattgtttacgcagaaattctacaaggatatgtacctgttcttggagccaatgtgactgctttcattgaatcacagaatggacatacagaagttttggaacttttggataatggtgcaggcgctgattctttcaagaatgatggagtctactccaggtattttacagcatatacagaaaatggcagatatagcttaaaagttcgggctcatggaggagcaaacactgccaggctaaaattacggcctccactgaatagagccgcgtacataccaggctgggtagtgaacggggaaattgaagcaaacccgccaagacctgaaattgatgaggatactcagaccaccttggaggatttcagccgaacagcatccggaggtgcatttgtggtatcacaagtcccaagccttcccttgcctgaccaatacccaccaagtcaaatcacagaccttgatgccacagttcatgaggataagattattcttacatggacagcaccaggagataattttgatgttggaaaagttcaacgttatatcataagaataagtgcaagtattcttgatctaagagacagttttgatgatgctcttcaagtaaatactactgatctgtcaccaaaggaggccaactccaaggaaagctttgcatttaaaccagaaaatatctcagaagaaaatgcaacccacatatttattgccattaaaagtatagataaaagcaatttgacatcaaaagtatccaacattgcacaagtaactttgtttatccctcaagcaaatcctgatgacattgatcctactcctactcctactcctactcctgataaaagtcataattctggagttaatatttctacgctggtattgtctgtgattgggtctgttgtaattgttaactttattttaagtaccaccatttgaaccttaacgaagaaaaaaatcttcaagtagacctagaagagagttttaaaaaacaaaacaatgtaagtaaaggatatttctgaatcttaaaattcatcccatgtgtgatcataaactcataaaaataattttaagatgtcggaaaaggatactttgattaaataaaaacactcatggatatgtaaaaactgtcaagattaaaatttaatagtttcatttatttgttattttatttgtaagaaatagtgatgaacaaagatcctttttcatactgatacctggttgtatattatttgatgcaacagttttctgaaatgatatttcaaattgcatcaagaaattaaaatcatctatctgagtagtcaaaatacaagtaaaggagagcaaataaacaacatttggaaaaaaaaaaaaaaaaaaaa

SEQ ID NO: 2692 - DNA, 1148 bp, Homo sapiens
cttctttaaatttctttctaggatgttcacttcttctccacaatgaatgagtgtcactatgacaagcacatggactttttttataataggagcaacactgatactgtcgatgactggacaggaacaaagcttgtgattgttttgtgtgttgggacgtttttctgcctgtttatttttttttctaattctctggtcatcgcggcagtgatcaaaaacagaaaatttcatttccccttctactacctgttggctaatttagctgctgccgatttcttcgctggaattgcctatgtattcctgatgtttaacacaggcccagtttcaaaaactttgactgtcaaccgctggtttctccgtcaggggcttctggacagtagcttgactgcttccctcaccaacttgctggttatcgccgtggagaggcacatgtcaatcatgaggatgcgggtccatagcaacctgaccaaaaagagggtgacactgctcattttgcttgtctgggccatcgccatttttatgggggcggtccccacactgggctggaattgcctctgcaacatctctgcctgctcttccctggcccccatttacagcaggagttaccttgttttctggacagtgtccaacctcatggccttcctcatcatggttgtggtgtacctgcggatctacgtgtacgtcaagaggaaaaccaacgtcttgtctccgcatacaagtgggtccatcagccgccggaggacacccatgaagctaatgaagacggtgatgactgtcttaggggcgtttgtggtatgctggaccccgggcctggtggttctgctcctcgacggcctgaactgcaggcagtgtggcgtgcagcatgtgaaaaggtggttcctgctgctggcgctgctcaactccgtcgtgaaccccatcatctactcctacaaggacgaggacatgtatggcaccatgaagaagatgatctgctgcttctctcaggagaacccagagaggcgtccctctcgcatcccctccacagtcctcagcaggagtgacacaggcagccagtacatagaggatagtattagccaaggtgcagtctgcaataaaagcacttcctaaactctggatgcctctcggcccacccaggtgatgactgtcttagg

SEQ ID NO: 2693 - DNA, 1400 bp, Homo sapiens
  misc_feature (1118)..(1118): n is a, c, g, or t
gctaccacgcccagctacttctgtatttttagtagagacggggtttcactgtgttggccaggctggtctcgaactcctgacctcatgatctgcccgcctcagcctcccaaagtgctgggattacaagtgtgagccaccacacctggcctggaaggaacctcttaaaatcagtttacgtcttgtattttgttctgtgatggaggacactggagagagttgctattccagtcaatcatgtcgagtcactggactctgaaaatcctattggttcctttattttatttgagtttagagttcccttctgggtttgtattatgtctggcaaatgacctgggttatcacttttcctccagggttagatcatagatcttggaaactccttagagagcattttgctcctaccaaggatcagatactggagccccacataatagatttcatttcactctagcctacatagagctttctgttgctgtctcttgccatgcacttgtgcggtgattacacacttgacagtaccaggagacaaatgacttacagatcccccgacatgcctcttccccttggcaagctcagttgccctgatagtagcatgtttctgtttctgatgtaccttttttctcttcttctttgcatcagccaattcccagaatttccccaggcaatttgtagaggacctttttggggtcctatatgagccatgtcctcaaagcttttaaacctccttgctctcctacaatattcagtacatgaccactgtcatcctagaaggcttctgaaaagaggggcaagagccactctgcgccacaaaggttggatccatcttctctccgaggttgtgaaagttttcaaattgtactaataggctggggccctgacttggctgtgggctttgggaggggtaagctgctttctagatctctcccagtgaggcatggaggtgtttctgaattttgtctacctcacagggatgttgtgaggcttgaaaaggtcaaaaaatgatggccccttgagctctttgtaagaaaggtagatgaaatatcggatgtaatctgaaaaaaagataaaatgtgacttcccctgctctgtgcagcagtcgggctggatgctctgtggcntttcttgggtcctcatgccaccccacagctccaggaaccttgaagccaatctggggactttcagatgtttgacaaagaggtaccaggcaaacttcctgctacacatgccctgaatgaattgctaaatttcaaaggaaatggaccctgcttttaaggatgtacaaaagtatgtctgcatcgatgtctgtactgtaaatttctaatttatcactgtacaaagaaaaccccttgctatttaattttgtattaaaggaaaataaagttttgtttgttaaaaaaaaa

SEQ ID NO: 2694 - DNA, 600 bp, Homo sapiens
tccacttctccaagggcaacatcgccgaccgcacagacgggtacctgaagcgctgcacgttccacgaggcctccgacctctactgccccatcttcaagctgggctttatcgtggagaaggctggggagagcttcacagagctcgcacacaagggtggtgtcatcggggtcattatcaactgggactgtgacctggacctgcctgcatcggagtgcaaccccaagtactccttccggaggcttgaccccaagcacgtgcctgcctcgtcaggctacaacttcaggtttgccaaatactacaagatcaatggcaccaccacccgcacgctcatcaaggcctacgggatccgcattgacgtcattgtgcatggacaggccgggaagttcagcctgattcccaccattattaatctggccacagctctgacttccgtcggggtgggctccttcctgtgcgactggatcttgctaacattcatgaacaaaaacaaggtctacagccataagaaatttgacaagatggtggacactcctgcctccgagcctgcccaagcctccacacccacagaccccaaaggtttggctcaactctgagctcctt

SEQ ID NO: 2695 - DNA, 1400 bp, Homo sapiens
cttgtcatcaatccccttgtcgaaaactagaaaaaaaggagttgacccatataaattatctctaacgtctttgttgtttatggaaaagcccagatactggatatatcactatgtattttatgaacagaattgactgggactaatatcacaggatcaatcatctcagaatcttacttgatgcattatttattttgctttagatcttgaatacattttgagaataactaatgtggattgaaatgtagagatacactggagtgctttatttagcaatatttgatgaaagcatgctttctacgccattcaggaaggcagcacaaatttatctcagaaaggttcctgtgtattgcaaggtacaattttctccaataaatcaggagaacaggagtttgatgatgcaaagttgatctctgtacatttaagtgaaaagtctttataacttttcacccttaaaatatttcagcagacatgtctgcacatgacagtgtaaaaaagtttaatgtcaaatgcaaagtttttattcattccaagccaccactgtaaggaataaagcttagcttctgtacatggaaagagctaataattatccctctgtcagagatgagatttttaaatgcttatgatatttaatcataaaaagggattaatccaaccattttcaagtaaagccagaaattcttgcttcccatttctagaatagtttctagaacagtgctatgcacatattagatcttaataaacatttgctgagtgaaagtaagataaactcaactatctcttgggaagaactggcttcattcctagtacatcttttaaaaagttactaattttccagcagtacaaatattaacaattatattaacacctgcctcatgtcagtttatgcttctagagcaatgtctagtgaaacttatctgatggcatttattgaaaaccttctaaaaagtagactaaggaaaccataatcagaattactatgtcttttgattcccaatgagaagttctattttcatgttcttaatattacatacaagaaaatgcagttaggttatttcaattgacaattctgcctcctcttttgatttatcacttacccaaaattattaattttattaggcttttggaaaagaaaaaaaactttttgatgttttaggtgatttaaaaatataccgtgttggtggtgaatgactattgatgactgtgttaagtgcatctgtattgtaagtgaaatgtaattatttctgtgtaccatatggagtaactaaggtcattgtttttgacaattttgtttgaaattcatatatcttatttcaaaggatagcataatatctgcattatgctggaaaaaaatagacctttggagaatacttaaataaaacatgtgcatgcttgaacaggac

SEQ ID NO: 2696 - DNA, 1400 bp, Homo sapiens
agtggcgcggagcctgggggtggtcccaggccccgacggcccctcctgctgcccaacctcagcccagcacggcctcggggctccctggtcagccttttgggcgaggagctgcccccattctcagcccttgtctcctctccttccttatccccatccctgtcccctgccctggctggccagggccacagtgcctcccctcacggcccccccaggtgctctgctgcctggaagccccctcagcttctcattcccccactgggaacctttggacctccggacctcagtccccggatagtggatggcattgaggactctggcagcacagctgaggccccttcattccgattcagcaggaggcctgaactgccaaggccccgctcccaggcgccccctacagggaccaggcccagcccagaattggccagtgaggctgaggaggtgaaggaaaaggtttgccggctgaaccaggagatctctcgtctcaatcaggaggtgtctcagcttagccgggagctgcggcacatcatgggcctgctgcaggccaggctgggtcccccaggccacccagcaggctccgcttggaccccagaccctccttgtccacagctgaggccaccatgcctctctccttgtgcgtccagaccaccacccagcctccaggatactacgcttgctgaagttcactgcccagccagtgtggggaccatggagacagggactgcgctcctggacttgagaccttccatattgcccccctacccctcagagcctgaccctctgggaccctctccagtgccagaggcctcacccccaaccccaagcctcttgaggcacagtttccagtccaggtcagacacgttccactgaccctggcccagggcccaggcctgtctggggtgggcgctgccgctcaccactcagggaggacctgggccccttggcttcctgccttggggtcagcagccaccagctggcctggttggctctggatttctggactttttaatgaagcgtggttacctctgacgctattcccttttccaagccttccccaacctccccctctgtgaggggagccacctgagggctgtggaacccagcaggcatgagatgaaccgcagtgcccattgggctgggcagatgagatcctactttctccccaggacctggaggcaggctgtctctcaaggtggtcttttctgctgctagcaactcaaaaatcccaacagcactccctatcctttccctgaccccagaccgctgccaagcctgttctcccccattacaacatggtctcactcagggcctggactgctccaaaactcgcccaggtctccagctctcctctaccccccaacaccctgggctcacttttggataggaaataaactctttatttt

SEQ ID NO: 2697 - DNA, 1400 bp, Homo sapiens
tgggcgcggcgggcaatgcgctgtccgtgcacgtggtgctgaaggcgcgggccgggcgcgcggggcgcctgcgccaccacgtgctcagcctggcgctcgcgggcctgctgctgctgctggtcggcgtgccggtggagctctacagcttcgtgtggttccactacccctgggtcttcggcgacctgggctgccgcggctactacttcgtgcacgagctgtgcgcctacgccacggtgctgagcgtggcaggcctgagcgccgagcgctgcctagccgtgtgccagcccctgcgtgcccgcagcctgctgacgccacgccggacccggtggctggtggcgctctcgtgggccgcctcgctcggcctcgccctgcccatggccgtcatcatggggcagaagcacgaactcgagacggcggacggggagccggagcccgcctcgcgagtgtgcacggtgctggtgagccgcaccgcgctccaagtctttatccaggtgaatgtgctggtgtccttcgtgctccccttggcactaactgctttcctgaatggggtcacagtgagccacctgctggccctctgctcccaagtgccgtccacttctaccccgggcagctccacccccagccgcctggagctgctgagtgaggagggtctcctcagcttcatcgtatggaagaagacctttatccagggaggccaggtcagcctggtgagacataaagacgtgcgccggatccgcagcctccagcgcagcgtccaggttctcagagccatcgtggtcatgtatgtcatctgctggctgccgtaccatgcccgcaggctcatgtactgctacgtacctgatgacgcgtggactgacccactgtacaatttctaccactacttctacatggtgaccaacacacttttctacgtcagctcagctgtgactcctcttctctacaacgccgtgtcctcctccttcagaaaactcttcctggaagccgtcagctccctgtgtggagagcaccaccccatgaagcggttacccccgaagccccagagtcccaccctaatggatacagcttcaggctttggggatcccccagaaacccggacctgaatgtaatgcaagaatgaacagaacaagcaaaatgaccagctgcttagtcacctggcaaagcaggtgagcaacctcatcactaatcattcaagcttcgcagccagggcgacttctatcaacccctgctctgctgagaaccatcaagcgcagggaagccacgtgacccctcctagcctcaggctccctcgtctgtgtagtggagataaagaacagcacccatctcttagtgttgcctgagactaaagtgcttagcacagaacctggtgcgtagtagatgctcaataaatttttgctggcacg

SEQ ID NO: 2698 - DNA, 600 bp, Homo sapiens
ctgctggtggtgatggcatttgaccgctacgtggcagtgtgccggcccctccgctacaccgccatcatgaacccccagctctgctggctgctggctgtgattgcctggctgggtggcttgggcaactctgtgatccagtcaacattcactctgcagctcccattgtgtgggcaccggagggtggagggattcctctgcgaggtgcctgccatgatcaaactggcctgtggcgacacgagtctcaaccaggctgtgctcaatggtgtctgcaccttcttcactgcagtcccactaagcatcatcgtgatctcctactgcctcattgctcaggcagtgctgaaaatccactctgcagaggggaggcgaaaggcgttcaatacgtgcctctcccatctgctggtggtgttcctcttctatggctcagccagctatgggtatctgcttccggccaagaacagcaaacaggaccagggcaagttcatttccctgttctactcgttggtcacacccatggtgaatcccctcatctacacgctgcggaacatggaagtgaagggcgcactgaggaggttgctggggaaaggaagagaagttggctga

SEQ ID NO: 2699 - DNA, 1260 bp, Homo sapiens
cttgtggttcctctctacttggggaaatcaggtgcagcggccatggctacagcaagacccccctggatgtgggtgctctgtgctctgatcacagccttgcttctgggggtcacagagcatgttctcgccaacaatgatgtttcctgtgaccacccctctaacaccgtgccctctgggagcaaccaggacctgggagctggggccggggaagacgcccggtcggatgacagcagcagccgcatcatcaatggatccgactgcgatatgcacacccagccgtggcaggccgcgctgttgctaaggcccaaccagctctactgcggggcggtgttggtgcatccacagtggctgctcacggccgcccactgcaggaagaaagttttcagagtccgtctcggccactactccctgtcaccagtttatgaatctgggcagcagatgttccagggggtcaaatccatcccccaccctggctactcccaccctggccactctaacgacctcatgctcatcaaactgaacagaagaattcgtcccactaaagatgtcagacccatcaacgtctcctctcattgtccctctgctgggacaaagtgcttggtgtctggctgggggacaaccaagagcccccaagtgcacttccctaaggtcctccagtgcttgaatatcagcgtgctaagtcagaaaaggtgcgaggatgcttacccgagacagatagatgacaccatgttctgcgccggtgacaaagcaggtagagactcctgccagggtgattctggggggcctgtggtctgcaatggctccctgcagggactcgtgtcctggggagattacccttgtgcccggcccaacagaccgggtgtctacacgaacctctgcaagttcaccaagtggatccaggaaaccatccaggccaactcctgagtcatcccaggactcagcacaccggcatccccacctgctgcagggacagccctgacactcctttcagaccctcattccttcccagagatgttgagaatgttcatctctccagcccctgaccccatgtctcctggactcagggtctgcttcccccacattgggctgaccgtgtctctctagttgaaccctgggaacaatttccaaaactgtccagggcgggggttgcgtctcaatctccctggggcactttcatcctcaagctcagggcccatcccttctctgcagctctgacccaaatttagtcccagaaataaactgagaagtggaaaaaaaaaa

SEQ ID NO: 2700 - DNA, 1260 bp, Homo sapiens; identical to SEQ ID NO: 2699

SEQ ID NO: 2701 - DNA, 1400 bp, Homo sapiens
cttaacggcaccataaccacccctggctggcccaaggagtaccctcctaataagaactgtgtgtggcaagtggttgcaccaacccagtacagaatttctgtgaagtttgagttttttgaattggaaggcaatgaagtttgcaaatatgattatgtggagatctggagtggtctttcctctgagtctaaactgcatggcaaattctgtggcgctgaagtgcctgaagtgatcacatcccagttcaacaatatgagaattgaattcaaatctgacaatactgtatccaagaagggcttcaaagcacattttttctcagacaaagatgaatgctctaaggataatggtggatgtcagcacgaatgtgtcaacacgatggggagctacatgtgtcaatgccgtaatggatttgtgctacatgacaataaacatgattgcaaggaagctgagtgtgaacagaagatccacagtccaagtggcctcatcaccagtcccaactggccagacaagtacccaagcaggaaagaatgcacttgggaaatcagcgccactcccggccaccgaatcaaattagcctttagtgaatttgagattgagcagcatcaagaatgtgcttatgaccacttagaagtatttgatggagaaacagaaaagtcaccgattcttggacgactatgtggcaacaagataccagatccccttgtggctactggaaataaaatgtttgttcggtttgtttctgatgcatctgttcaaagaaaaggctttcaagccacacattctacagagtgtggcggacgattgaaagcagaatcaaaaccaagagatctgtactcacatgctcagtttggtgataacaactacccaggacaggttgactgtgaatggctattagtatcagaacggggctctcgacttgaattatccttccagacatttgaagtggaggaagaagcagactgtggctatgactatgtggagctctttgatggtcttgattcaacagctgtggggcttggtcgattctgtggatccgggccaccagaagagatttattcaattggagattcagttttaattcatttccacactgatgacacaatcaacaagaagggatttcatataagatacaaaagcataagatatccagataccacacataccaaaaaataacaccaaaacctctgtcagaacacaaaggaatgtgcataatggagagaagacatattttttttaaaactgaagatattggcacaaatgttttatacaaagagtttgaacaaaaaatccctgtaagaccagaattatctttgtactaaaagagaagtttccagcaaaaccctcatcagcattacaaggatatttgaactccatgcttgatggtattaataaagctggtgaaa

SEQ ID NO: 2702 - DNA, 600 bp, Homo sapiens
cccccgtacagcctgcgggaggtgaaagtctccgtggtggacacagagacctgccgccgggactatcccggccccgggggcagcatccttcagcccgacatgctgtgtgcccggggccccggggatgcctgccaggacgactccggggggcctctggtctgccaggtgaacggtgcctgggtgcaggctggcattgtgagctggggtgagggctgcggccgccccaacaggccgggagtctacactcgtgtccctgcctacgtgaactggatccgccgccacatcacagcatcagggggctcagagtctgggtaccccaggctccccctcctggctggcttattcctccccggcctcttccttctgctagtctcctgtgtcctgctggccaagtgcctgctgcacccatctgcggatggtactcccttccccgcccctgactgatggcaggaatccaagtgcatttcttaaataagttactatttattccgctccgccccctccctctcccttgagaagctgagtcttctgcatcagattattgcaacatttaacctgaatttaaaagcacacgaaacaaaaaaaaaaaaaaaaaaaaaa

SEQ ID NO: 2703 - DNA, 600 bp, Homo sapiens; identical to SEQ ID NO: 2702

SEQ ID NO: 2704 - DNA, 600 bp, Homo sapiens
taacatatgacctgaaacaactctaggtctgagtcctagagattacataaatagtgtgtagcccagaaaagtaaaataggtgtcacgctgttttttttaatgtcaacaccaataggaatccatttagattaatgtatgtaatttctgataaaagtaagagaaatgaggaactttcgaactgcaaatatgcctccaaactagcttttgataagtgtggtttctgttatttgaatggattcccatctttgtctctagcctggagaagagcaaaatggagggggaggggccagaaataggaggaggttttgaagaataaagcctcatatccaggaaaaagtgatcaagtgaaaaagctgcatcaagacccatttggcaagaggttgtccgaaaataattccttgatcatatctgaagtggttatttactcaaatcaatttctcccctgcgtcgctaagactgtcataaaatggccttgacatttaatcacaggttactttccagaaaggtttctaaagttacagattcagcttttcaaattgtcaaattcactttgaataataatagaacctgggctacattcctaactcatattaacagcac

SEQ ID NO: 2705 - DNA, 600 bp, Homo sapiens; identical to SEQ ID NO: 2704

SEQ ID NO: 2706 - DNA, 600 bp, Homo sapiens
attcccatcaaagacatcaaggaaaagtcaaatgtgggttgtatggagtttaaaaaggaatttggaagaaattggcatttgctgacaaatttcatatgtgtagcaatatttttaaatttctcagccatcattttaatatccaattgccttgtaattcgacagctctacagaaacaaagataatgaaaattacccaaatgtgaaaaaggctctcatcaacatacttttagtgaccacgggctacatcatatgctttgttccttaccacattgtccgaatcccgtataccctcagccagacagaagtcataactgattgctcaaccaggatttcactcttcaaagccaaagaggctacactgctcctggctgtgtcgaacctgtgctttgatcctatcctgtactatcacctctcaaaagcattccgctcaaaggtcactgagacttttgcctcacctaaagagaccaaggctcagaaagaaaaattaagatgtgaaaataatgcataaaagacaggattttttgtgctaccaattctggccttactggaccataaagttaattatagctttgaaagataaaaaaaaaaaaaaagcggccgc

SEQ ID NO: 2707 - DNA, 600 bp, Homo sapiens; identical to SEQ ID NO: 2706

SEQ ID NO: 2708 - DNA, 1400 bp, Homo sapiens
ataagctcttcatgcgtacaacagttttaattgctgatctgctgatttacatacctgcagtggttttgtactgttgttgcttaaaagaaatctcaactaagaaaaagattgctaatgcattatgcatcttgctgtatccaggccttattcttatagactatggacattttcaatataattctgtgagtcttggctttgctttgtggggtgttcttggaatatcttgtgactgcgacctcctagggtcactggcattttgcttagctataaattataaacagatggaactttaccacgccttgccatttttttgctttttacttggcaagtgttttaaaaaaggcctcaaaggaaaggggtttgtgttgctagttaagctagcttgtattgttgtggcttccttcgttctctgctggctgccattctttacagaaagggaacaaaccctgcaggttctaagaagactcttcccggttgatcgtggattatttgaggataaagtagccaatatttggtgcagcttcaatgtctttctgaagattaaggatattttgccacgtcacatccaattaataatgagcttttgttttacgtttttgagcctgcttcctgcatgcataaaattaatacttcagccctcttccaaaggattcaaatttacactggttagctgtgcgctatcattctttttattttctttccaagtacatgaaaaatccattctcttggtgtcactaccagtctgcttagttttaagtgaaattccttttatgtctacttggtttttacttgtgtcaacatttagtatgctacctcttctattgaaggatgaactcctaatgccctctgttgtgacaacaatggcattttttatagcttgtgtaacttccttttcaatatttgaaaagacttctgaagaagaactgcagttgaaatccttttccatttctgtgaggaaatatcttccatgttttacatttctttccagaattatacaatatttgtttcttatctcagtcatcactatggtgcttctgacgttgatgactgtcacactggatcctcctcagaaactaccggacttgttttctgtattggtgtgttttgtatcttgcttgaacttcctgttcttcttggtatactttaacattattattatgtgggattccaaaagtggaagaaatcagaagaaaatcagctagctgtattcctaaacaaattgtttcctaaacaaatgtgaaaatgtgaacagtgctgaaaggttttgtgaactttttgctatgtataaatgaaattaccattttgagaaccatggaaccacaggaaaggaaatggtgaaaagtcattgttgtctacacaaaataaatgtatatggagaccaaaaaaaaaaaaaaaaaaaa

SEQ ID NO: 2709 - DNA, 600 bp, Homo sapiens
  misc_feature (216)..(216): n is a, c, g, or t
  misc_feature (285)..(285): n is a, c, g, or t
  misc_feature (299)..(299): n is a, c, g, or t
  misc_feature (323)..(323): n is a, c, g, or t
  misc_feature (355)..(355): n is a, c, g, or t
  misc_feature (556)..(556): n is a, c, g, or t
  misc_feature (571)..(571): n is a, c, g, or t
  misc_feature (578)..(578): n is a, c, g, or t
gcacccaccagggtcaccatgccctgcaaagaggctgattgaggagtcctgctgagcccactgtgtggcagggggatggcaggttgggggtcctggggccagcaatgtggttcctgtgcactgagcccaccagccacagtgcccatgtcccctctggaagacaaactaccaatttctcgttcctgaagccactccctccgtgaccactggccccangctttcccacatggaaggtggctgcatgccaaggggaagagcgacacctccaggcttccgggagcccanagagcatgtggcangcagtggggcctcttcatcatcancctgcctggctggctcccttggctgtgggcangtacacccctgctggcagaagtacctggtggctgccctgttcgcatcagtggcgatgactttatttgcggagcatttctgcaagcgttgcctggatgcggtggtgcattgtgggccctctgggctcctgcctcaaaatgtcagtgagcaccatgctggaagtcaccatcactgtggcagcgcccaggaaggcatagggcancctaccacctccaanggggcangcgccctcatctggggttgggt

SEQ ID NO: 2710 - DNA, 600 bp, Homo sapiens
ttttacgtggagagttgaactactccagaaactaaagagtaatgtttctagaatgcacaaaacattattagtctgtgggtttagaaagactgaagtgacagattaagagttcttgatattagataactccaacttctggctgtagagcacccagccaagagaataagcagtgctttgaaaggatccactgggtgggttgtttttttttaaagtgccattctagaatgtccaaagggaatcaggattctgtggctgtagactgatcacagagtcaaggaagcagtggcaattctagatatctgagattttgctggttccagtttgcccaatggagttgagaatctcaatgattctagatgacttcttgtggttctgtaatgccaaaaggaatgaaggctccagggatacagagttgtccattaccaaagcctggaagttctcatcacctccaggtggactgcttggcagtgctaggaggtggactcaggacttcagaagcaacatttctggcctgacctggaaggtgaaggtgaaggtgagaccctgtagggcacagggctaattagtggacaagggaagggggaggcccaggctcgtgcc

SEQ ID NO: 2711 - DNA, 600 bp, Homo sapiens; identical to SEQ ID NO: 2710

SEQ ID NO: 2712 - DNA, 600 bp, Homo sapiens
gatcggctgctgagtgaggcccagaggatcacggggctgcgagcactggcagggctggtctacaacgcctcgggctccgagcactgctacgacatctaccggctctaccacagctgtgctgaccccactggctgcggcaccggccccgacgccagggcctgggactaccaggcctgcaccgagatcaacctgaccttcgccagcaacaatgtgaccgatatgttcccggacctgcccttcactgacgagctccgccagcggtactgcctggacacctggggcgtgtggccccggcccgactggctgctgaccagcttctgggggggtgatctcagagccgccagcaacatcatcttctccaacgggaacctggacccctgggcagggggcgggattcggaggaacctgagtgcctcagtcatcgccgtcaccatccaggggggagcgcaccacctcgacctcagagcctcccacccagaagatcctgcttccgtggttgaggcgcggaagctggaggccaccatcatcggcgagtgggtaaaggcagccaggcgtgagcagcagccagctctgcgtggggggcccagactcagcctctga

SEQ ID NO: 2713 - DNA, 600 bp, Homo sapiens; identical to SEQ ID NO: 2712

SEQ ID NO: 2714 - DNA, 1400 bp, Homo sapiens
tagtccagagagttaaaaaaattctctgcatgttggtcttttaagtctgttttgctctaatcctccattaagcgagcatacctcaagtgggtctattagcatttaatgaccttttatgccagttgtgccatcccttaagatgaaaagttccttttcttgtgttaatgtacaaagcttttcttttggcactgacaactgtgttctacctgggaattttgaatagccattttcatggctgtgtgttgtgtaacacaaatgtttttaaatggtattctcacccagtaggccagctctccaaacgttgcttagatgcttcaaaattagcatattttaagtttaccagtataaaataccaatgcaactactctacatagccaaatgtttgtaaatcacgtcttattttcctgaggtttttcactccaccaaatcttacaaatcattgaaagaaatatattctaacagtacgcactgaatagtgaaaataattagacattttaagaaccagagccatagaattattttaaattagtagaaaagaggagctatttccgaatctatagaataaagtaccacctaaaactgaattttatcatataagcaagtaatacctattagtcatacctaaatttttcagcacttcattcaattaaaatacatgaattttaaatattttacatgatgtgaataggcatgataatacttttagtataaaatctaaactttttccatttatcagaaatgataaaatccagttaccacatattcacgtttataaaatccttaattaaatgagtaacttctaaaatataacaatactaaatatcacactgtgatggaggtcccaaatatgtggtctatcaccactgaattcatgtaatagataagaaaaaaattagaggtggatgtcttgttttgtgtcatgaattactaaaatctcttagtagttgtggtatatttttgagtaaaattaccatttccagatttgagtttgaagggcttttatagttgtattttcctcctcactgttaataatcataatcctttttcagtattttagtggccttgaacaactggtttatctacaatctcaaatcctaagtgtataattatgtgcaatgttcaatacctcatataatacttgctcaacagtatagtggtaccaatggcattaagatggtgtttttgttctacatatttttcaataatttattctttctaatgttgaaattatatcaggctttaccggtttttttagttgtttaaataagtaatattttcaaaagaataaaataaccaatgatatctcttggaataatctgtaaaacgtagttataaaattctattttctacttaaaaaaaaaaaaaaaaaaaaaaaaaaaaaaaaaaaaaaaaaaaaaaaa

SEQ ID NO: 2715 - DNA, 1400 bp, Homo sapiens
aggagacccagaatatctagagcagccatcaagaagtgatttctcaaagcacttgaaagaagaaactattcaaataattaccaaggcatcacatgagcatgaagataaaagtcctgaaacagttttgcagtcggcaattaagttggaatatgcaaggttggttaagttggcccaagaagacaccccaccagaaaccgattatcgtttacatcatgtagtggtctactttatccagaaccaggcaccaaagaaaattattgagaaaacattactagaacaatttggagatagaaatttgagttttgatgaaaggtgtcacaacataatgaaagttgctcaagccaaactggaaatgataaaacctgaagaagtaaacttggaggaatatgaggagtggcatcaggattataggaaattcagggaaacaactatgtatctcataattgggctagaaaattttcaaagagaaagttatatagattccttgctgttcctcatctgtgcttatcagaataacaaagaactcttgtctaaaggcttatacagaggacatgatgaagaattgatatcacattatagaagagaatgtttgctaaaattaaatgagcaagccgcagaactcttcgaatctggagaggatcgagaagtaaacaatggtttgattatcatgaatgagtttattgtcccatttttgccattattactggtggatgaaatggaagaaaaggatatactagctgtagaagatatgagaaatcgatggtgttcctaccttggtcaagaaatggaaccacacctccaagaaaagctgacagattttttgccaaaactgcttgattgttctatggagattaaaagtttccatgagccaccgaagttaccttcatattccacgcatgaactctgtgagcgatttgcccgaatcatgttgtccctcagtcgaactcctgctgatggaagataaactgcacactttccctgaacacactgtataaactctttttagttcttaacccttgccttcctgtcacagggtttgcttgttgctgctatagtttttaacttttttttattttaataactgcaaaagacaaaatgactatacagactttagtcagactgcagacaataaagctgaaaatcgcatggcgctcagacattttaaccggaactgatgtataatcacaaatctaattgattttattatggcaaaactatgcttttgccaccttcctgttgcagtattactttgcttttatcttttctttctcaacagctttccattcagtctggatccttccatgactacagccatttaagtgttcagcactgtgtacgatacataatatttggtagcttgtaaatgaaataaagaataaagttttatttatggctaccta

SEQ ID NO: 2716 - DNA, 600 bp, Homo sapiens
tgcgggagctcagtgtagctgaagatgaagatgaggaggaggaggcggaggaggcggcacacagcggagagcgaacgcctggaggccggcgaggtggagctctcagagagcgaggacgacaccgatggcctgaccccgcagctggaggaggacgaggagcttcagggccacctggggccgccaaggggagcaagtggaaccggcgaaacgacatgggggagaccctgctgcaccgagcctgcatcgagggccagctgcgccgcgtccaggaccttgtgaggcagggccacccccttaaccctcgggactactgtggctggacacctctgcacgaggcctgcaactacgggcatctagaaattgtccgcttcctgctggaccacggggccgcagtggacgacccaggtggccagggctgcgaaggcatcacccccctccacgatgccctcaactgtggccacttcgaggtggctgagctgctgcttgaacggggggcgtccgtcaccctccgcactcgaaaggcctcagcgcgctggagacgctgcagcagtgggtgaagctgtaccgcggagacctggactggagacgcgggcggaattc

SEQ ID NO: 2717 - DNA, 600 bp, Homo sapiens
aagactttgttctgtgtgtttcaagaaattcaccatgtcagcaatatgaaggatgttatggaaggcgtgcttggcattcaattcctgcagaaaccggaaatcttccatgccctgcaatgtgctcatcaaactctcagcatatggacggccagctgtggcccatatcttggtcactctgaagcacaatatttatgaagctatagaacgttaagacctctttcacagcctctccttcctacaaagactcctccaaatcttaaaatgaagcaggaaaacaagcctaagaggactttcataccgacaacatctgaaaggactagaatgttcacaccacgatctggatttcttaattttttgtttttgtttttgttgttctctagttctacgggtttgattatttagtcatgtgaaaaatattgattactcacacatagatcaagagagacacggctcctgccttcatggagcttttaggggaaaatgaagtggctcttgcagctagagttgactcagaagccgaaattcctagaaatcaggtttctactgctaggcaattgaagtataaactattttataaacactgtcttctttcatcttcac

SEQ ID NO: 2718 - DNA, 600 bp, Homo sapiens
gctgtcatggcatatgaccgctacctggcaatttgctacccactccactacccactcctgatggggcccagacggtacatggggctggtggtcacaacctggctctctggatttgtggtagatggactggttgtggccctggtggcccagctgaggttctgtggccccaaccacattgaccagttttactgtgactttatgcttttcgtgggcctggcttgctcggatcccagagtggctcaggtgacaactctcattctgtctgtgttctgcctcactattccttttggactgattctgacatcttatgccagaattgtggtggcagtgctgagagttcctgctggggcaagcaggagaagggctttctccacatgctcctcccacctagctgtagtgaccacattctatggaacgctcatgatcttttatgttgcaccctctgctgtccattcccagctcctctccaaggtcttctccctgctctacactgtggtcacccctctcttcaatcctgtgatctataccatgaggaacaaggaggtgcatcaggcacttcggaagattctctgtatcaaacaaactgaaacacttgattga

SEQ ID NO: 2719 - DNA, 600 bp, Homo sapiens; identical to SEQ ID NO: 2718

SEQ ID NO: 2720 - DNA, 951 bp, Homo sapiens
atgcctggtcagaactacagaaccatatctgaatttatcctctctggcttctcagccttcccccagcagctcctgcctgtcttgttcctgctgtacctcctgatgttcctgttcacattgcttggcaaccttcttatcatggccacagtttggattgaacgcagactccacacacccatgtacctcttcttgtgtgccctctccatctctgagattctgttcactgttgccatcacccctcgcatgctggctgatctgctcttcacccatcgttccatcacctttgtggcttgtgccattcagatgttcttctccttcatgtttggcttcactcactccttccttctcatggtcatgggctatgatcactacgtgaccatctgccacccactgcattacaacatgctaatgagtccccgtggctgtgcccatcttgtggcctggacctgggctggtggctcggtcatggggatgatggtgacaatgatggtttttcacctcactttctgtgggtctaatgtgatccaccattttctctgtcatgtgctttccctcttgaagttggcctgtgggagcaagacatcatctgtcatcatgggtgtgatgctggtgtgtgtcacagccctgataggctgtttgttcctcatcatcctctcctttgtcttcattgtggctgccatcttgaggattccttctgctgagggccggcacaagactttctccacttgtgtatcccacctcactgtggtggtcatgcactatagttttgcctcccttatctacctcaaacccaagggcctccattctatgtacagtgatgccttgatggccaccacctatactgtcttcacccccttcctcagcccaatcattttcagtctaaggaacaaggagctgaagaatgccataaataaaaacttttgcagaaggttctgccctctaagctcctaa

SEQ ID NO: 2721 - DNA, 658 bp, Homo sapiens
ggacctctccagaatccggattgctgaatcttccctgttgcctagaagggctccaaaccacctcttgacaatgggaaactgggtggttaaccactggttttcagttttgtttctggttgtttggttagggctgaatgttttcctgtttgtggatgccttcctgaaatatgagaaggccgacaaatactactacacaagaaaaatccttgggtcaacattggcctgtgcccgagcgtctgctctctgcttgaattttaacagcacgctgatcctgcttcctgtgtgtcgcaatctgctgtccttcctgaggggcacctgctcattttgcagccgcacactgagaaagcaattggatcacaacctcaccttccacaagctggtggcctatatgatctgcctacatacagctattcacatcattgcacacctgtttaactttgactgctatagcagaagccgacaggccacagatggctcccttgcctccattctctccagcctatctcatgatgagaaaaaggggggttcttggctaaatcccatccatccccatataacaccaacagtgtacatgtttactgtcacttttgatatggtcttatccagtgtgaacagcaatttattatttttgctcatcaaaaaataaaggattttcttc

SEQ ID NO: 2722 - DNA, 600 bp, Homo sapiens
ccgagcagcaggggactggacagaaaatctcataagggctttcgaacaacaatattcaccaattcccaggattgaagtggatggtccctttggcacagccagtgaggatgttttccagtatgaagtggctgtgctggttggagcaggaattggggtcaccccctttgcttctatcttgaaatccatctggtacaaattccagtgtgcagaccacaacctcaaaacaaaaaaggttggtcatgcagcattaaactttgacaaggccactgacatcgtgacaggtctgaaacagaaaacctcctttgggagaccaatgtgggacaatgagttttctacaatagctacctcccaccccaagtctgtagtgggagttttcttatgtggccctcggactttggcaaagagcctgcgcaaatgctgtcaccgatattccagtctggatcctagaaaggttcaattctacttcaacaaagaaaatttttgagttataggaataaggacggtaatctgcattttgtctctttgtatcttcagtaatttacttggtctcgtcaggtttgagcagtcactttaggataagaatgtgcctctcaagccttg

SEQ ID NO: 2723 - DNA, 1400 bp, Homo sapiens
tctgccctttctgactttgctgatgccttgcctgagcctttgcgtgtcgcaaagccaaataaatatcaatttctagtaatggacttgcccatggtgagtgaagatcgcctccactgcatggatattcttttcgccttcaccgctagggtactcggtggctctgatggcctagatagtatgaaagcaatgatggaagagaagttcatggaagccaatcctctcaagaagttgtatgaacccatagtcaccaccaccaagagaaaggaagaggaaagaggtgctgctattattcaaaaggcctttcgaaagtacatgatgaaggtgaccaagggtgaccaaggtgaccaaaatgacttggaaaacgggcctcattcaccactccagactctttgcaatggagacttgtctagctttggggtggccaagggcaaggtccactgtgactgagccctcacctccacgcctacctcatagcttcacagccttgccctcagcctctgagctccaggggtcagcagcttagtgtatcaacagggagtggattcaccaaattagccattccattttcttttctggctaaataaatgatatttcaatttcattttaaatgatacttacagagatataagataaggctacttgacaaccagcggtactattttaataaggaagaagacaccaggaaggactgtaaaaggacattccaattttaggattggaatagttcaagccgggcgcagtggctcatgcctggaatcccagcactttgagaggccaaggcaggtggatcacgaggtcaagagatcgagaccatcctggccaaccatgatgaaactccgtctctactaaaatacaaaaattagctgggcatggttgcgtgcgcctgtagtcccagctacttgggaggctgaggcaggagaatcgcttaaacctgggagacggaggttgcagtgagccaagatcgtgtcactgcactccagcctggtgacagagtgagactctgtttcaaaaaagaaaagaaaagaaacatggttcaaattatatctaaacaaaaaagaataagaaacaaaaaacacattaaaattttaagttgtattttctatgtttctagatacatcatttttgtttgatattttcctgatgcaagtatgtggtttatcacatgtagctcttttgcatgctaaatgaaaattcaagacttgccaataaatgaatagcttattgcagacattttttaccaacattaattattttgggtttgtttaaaacctagaggcacaatcttgacttgtcaattactaccctttcacaagctaccatctcagatatatatatatatataaattcaataaagctttctgtttgtgttccataaaaaaaaaaaaaaaaaaaaaaaaaaa

SEQ ID NO: 2724 - DNA, 1400 bp, Homo sapiens; identical to SEQ ID NO: 2723

SEQ ID NO: 2725 - DNA, 600 bp, Homo sapiens
aaacagaagagaggctgccgggaccagcatatttccgttgcagccaaatggattttattttttcattttattgattctcagaagcagaaagcatcactttaaaagttcgtttgttcatgcaaactatatttgcattcttacattagttaagctaagcagcaaaaagaaaacacacacacacactcacatttagcccatgtcatttaattgtcagtttctttgacataaagcgcatcttctccacatgggcttcacgtggtttggagatgggtgggggaaaacaatcaggtttcttcaggctgaggaggacttgctcaggccgattccaaacattgtgctcgttcaatgcgtagaaatgatttgcatgatggcatgccgtgatcagaagtcatgcatgagatccatacaccacaggacactactaatctagtcccttgcactgggtcagcctttggacaggacccagccctgcaccgttcactgtatttggagaaaatggtaagagttccataccgggctacaattctttgagttcttaaaagtccttcatacaccttctgggtagggaaacaaccaactaattgactaacaccaccaacg

SEQ ID NO: 2726 - DNA, 1400 bp, Homo sapiens
tctgcagtgcttataaaatacattgttgcctatttagggagtaacattttctagtttttgtttctggttaaaatgaaatatgggcttatgtcaattcattggaagtcaatgcactaactcaataccaagatgagtttttaaataatgaatattatttaataccacaacagaattatccccaatttccaataagtcctatcattgaaaattcaaatataagtgaagaaaaaattagtagatcaacaatctaaacaaatccctcggttctaagatacaatggattccccatactggaaggactctgaggctttattcccccactatgcatatcttatcattttattattatacacacatccatcctaaactatactaaagcccttttcccatgcatggatggaaatggaagatttttttgtaacttgttctagaagtcttaatatgggctgttgccatgaaggcttgcagaattgagtccattttctagctgcctttattcacatagtgatggggtactaaaagtactgggttgactcagagagtcgctgtcattctgtcattgctgctactctaacactgagcaacactctcccagtggcagatcccctgtatcattccaagaggagcattcatccctttgctctaatgatcaggaatgatgcttattagaaaacaaactgcttgacccaggaacaagtggcttagcttaagtaaacttggctttgctcagatccctgatccttccagctggtctgctctgagtggcttatcccgcatgagcaggagcgtgctggccctgagtactgaactttctgagtaacaatgagacacgttacagaacctatgttcaggttgcgggtgagctgccctctccaaatccagccagagatgcacattcctcggccagtctcagccaacagtaccaaaagtgatttttgagtgtgccagggtaaaggcttccagttcagcctcagttattttagacaatctcgccatctttaatttcttagcttcctgttctaataaatgcacggctttacctttcctgtcagaaataaaccaaggctctaaaagatgatttcccttctgtaactccctagagccacaggttctcattccttttcccattatacttctcacaattcagtttctatgagtttgatcacctgatttttttaacaaaatatttctaacgggaatgggtgggagtgctggtgaaaagagatgaaatgtggttgtatgagccaatcatatttgtgattttttaaaaaaagtttaaaaggaaatatctgttctgaaaccccacttaagcattgtttttatataaaaacaatgataaagatgtgaactgtgaaataaatataccatattagctacccaccaaaaaaaaaaaaaaaaaa

SEQ ID NO: 2727 - DNA, 600 bp, Homo sapiens
gtagcattttttaaattgtgcatgagctcaaagggggaacaaaatagatacacccatcatggtcatctatcatcaagagaatttggaattctgagccagcactttctttctgatgatgcttgttgaacggtccactttctttgatgagtggaatgacaagcaatgtctgatgcctttttgtgcccagactgttttcctctctctttccctaatgtgccataaggcctcagaatgaatgagaattgtttctggtaacaatgtagctttgagggatcagttcttaacttttcagggtctacctaactgagcctagatatggaccatttatggatgacaacaattttttttttgtaaatgacaagaaattcttatgcagccttttacctaagaaattttctgtcagtgccttatcttatgaagaaacagaacctctctagctaatgtgtggtttctccttccctgcccccacccctaggctcacctctgcagtcttttaccccagttctcccatttgaataccataccttgctggaaacagtgtgtaaaatgactgaagtgatgatgcccgaagatgaaatagatgccaaattagatggacat

SEQ ID NO: 2728 - DNA, 600 bp, Homo sapiens; identical to SEQ ID NO: 2727

SEQ ID NO: 2729 - DNA, 600 bp, Homo sapiens
aattagcttgtgttcagccacataaaaatgctaataaaagtgacgctcaatctacagtttattcatatattcaagaccatgtatgtgtatctatagccactggttcctccatgagatcagatggaacagacaatgcctatgtggctgatggcaccatgtgtggtccagaaatgtactgtgtaaataaaacctgcagaaaagttcatttaatgggatataactgtaatgccaccacaaaatgcaaagggaaagggatatgtaataattttggtaattgtcaatgcttccctggacatagacctccagattgtaaattccagtttggttccccagggggtagtattgatgatggaaattttcagaaatctggtgacttttatactgaaaaaggctacaatacacactggaacaactggtttattctgagtttctgcatttttctgccgtttttcatagttttcaccactgtgatctttaaaagaaatgaaataagtaaatcatgtaacagagagaatgcagagtataatcgtaattcatccgttgtatcagaaagcgatgacgtgggacattaatattgcacagaacttccatagcaaataa

SEQ ID NO: 2730 - DNA, 600 bp, Homo sapiens; identical to SEQ ID NO: 2729

SEQ ID NO: 2731 - DNA, 600 bp, Homo sapiens
caggaggagcgtcctgagacagcgaggacctgcaggcttggcccctgtccccgaaacatctcagatccctccaagaagagctacgtagttcagtggctgtcccgcccggaccccgactcgcccatccggaagatctcgtcaaagggccactgccaaggcgacaagtcaatattctgtaggatggaagtcttgtcccgctattgctccatcccaggctacaacaagctgtcctgcaagtcctgtaacctgtacaacaacctcaccaacgtggagggcaggatagagccaccgcctgggaagcacaacgacattgacgtgttcatgcctaccctcccagtgcccactgtagccatggaggtgcggccatcaccaagcacccccctggaggtccctctcaatgcctccagcaccaatgccacagaggatcacccagaaaccaatgccgtagatgaaccctacaaaatccatggcctggaagatgaagtccagccacccaacctaatccctcgacgaccgagcccctatgaaaagaccagaaaccaaagaatccaagagctcattgatgagatgcggaagaaagagatgctcggaaagttctaa

SEQ ID NO: 2732 - DNA, 600 bp, Homo sapiens; identical to SEQ ID NO: 2731

SEQ ID NO: 2733 - DNA, 600 bp, Homo sapiens
tttttttgttctatttttttccacgtactccacagccaacatcacgaggtgtaatttttaatttgatcagaactgttaccaaaaaacaactgtcagttttattgagatgggaaaaatgtaaacctatttttattacttaagactttatgggagagattagacactggaggtttttaacagaacgtgtatttattaatgttcaaaacactggaattacaaatgagaagagtctacaataaattaagatttttgaatttgtacttctgcggtgctggtttttctccacaaacacccccgcccctccccatgcccagggtggccgtggaagggacggtttacggacgtgcagctgagctgtccgtgtcccatgctccctcagccagtggaacgtgccggaactttttgtccattccctagtaggcctgccacagcctagatgggcagtttttgtctttcaccaaatttgaggactttttttttttgccattatttcttcagttttcttttcttgcactgatctttctcctctccttctgtgactccagtgactcagacgttagacctcttgatgttttcccactggtccctgaggctctgttc

SEQ ID NO: 2734 - DNA, 600 bp, Homo sapiens; identical to SEQ ID NO: 2733

SEQ ID NO: 2735 - DNA, 600 bp, Homo sapiens
ttgctctcgactcaagaaggttaacattttctgattcatgttagactttgaagagactaaagaaaattttcaagaggaacatatgcctgagaacctttgcatgaatttaaaatttcaattatccattcttataagaaggaagatgattgtaaagaaatatctccgaagttaaaatctgtaataggaattgattcattctctaatgaaaacaaaacataaaaacatcacactaatcttggaggaataagaaaaattgtacatccattaaatgtacaattgattgcaacatcttgattgttttaaccattaacttgtcaaattacaatcacagttaagaaaatgatgtaaaattctgttttgtggatctctttcctagattagcttctgaaatcattattagctatatcatttgaggttttctacaatttggtataactaagaatttaaaaatgttttatcatatatatttgtataattaattactggcatggttaaagtggttttcactttttaaatggagaaaatttcagttaaattaataggataaaccaggttgcgaactggtgacctgtaggccatgttagcactgcaaaaaaaaaa

SEQ ID NO: 2736 - DNA, 600 bp, Homo sapiens; identical to SEQ ID NO: 2735

SEQ ID NO: 2737 - DNA, 600 bp, Homo sapiens
agtgttgacagtggcccaccccctaagagaaagaagaaaaagaagttctgttatctgtgtatattgttgcttattgttttgtttattttattatgttgtctttatcgactttgtaaaaaaagtaaaccaataaaaaagcagcaagatgttcaaactccatctgcaaaagaagaggaaaaaattcagcgtcgacctcatgagttacctccccagagtcaaccttgggtgatgccttcccagagtcaacctcctgtgacgccttcccagagtcatcctcgggtgatgccttctcagagtcaacctcctgtgatgccttcccagagtcatcctcagttgacgccttcccagagtcaacctcctgtgatgccttcccagagtcatcctcagttgacgccttcccagagtcaacctcctgtgacaccctcccagaggcaacctcagttgatgccttcccagagtcaacctcctgtgacgccctcctagagccagcctcagttgatgccttcccagagtcaacctcctgtgacgccctcccagagccaacctcgggtgacaccctcccagagtcaacctcatgtgacaccttaccggagtaaaagt

SEQ ID NO: 2738 - DNA, 600 bp, Homo sapiens; identical to SEQ ID NO: 2737

SEQ ID NO: 2739 - DNA, 600 bp, Homo sapiens
agttcacagaggtggctggggtcaagctcctttaggactgggtggatggagaagacaccttgtgctcatgggcccccgcctgcccacccagctgctgttccaggagagcaaccctggggtgcactacgagtacaccatccacagggaggcaggtggccacgacgaggtcccgccgcccgtgttctcctggcattatgggccctggaccaagtgcacagtcacctgcggcagaggtgagaagtggggcaggcacagccccacctgcaggggcttagtgtctggacagggacactggcttcagctcccagctcactgctgggccaccacgggtttggaagtttgcttctctgagcctcagttctccatctgtgagatgaggctagcgattgccctgtgtcccaggcccgctgggagggtacatggatgaggcaggtgggtgctggctcgcggcgcatgttcagtgtgctccagctcttggcgttctccctccaggggacacagctccccctcgatagaccagtccagtggcccctcaccacactgacttatttccctaaactatttataaaaagtagggcaatttcattaactctgactctt

SEQ ID NO: 2740 - DNA, 600 bp, Homo sapiens
gaccaactgatgaaccagaatccttggaagctctaggtcctacctcagaaaatctcatcgtcatggttctgcttcaagaacagaatttgggaattaggtataagttcaatgttcccatcactcgaactggcagtggagataatgaagttggctttacatggaatcatcagccttggtcagaatgctcagctacttgtgctggaggtaagatgcccactaggcagcccacccagagggcaagatggagaacaaaacacattctgagctatgctttgtgtttgttaaaaaagctaattggaaacatttcttgcaggtttgcttcaagctgtaatttagcaaaagaaactttgctttaattatattatattccatttgttttcaacctcatgtaatttgtgcagatttgttggtaaaatacatcttggcacaatgagtgtctctgctggtgcttctcccaagactatcttgaaggtgggctgtttgcctttcgtgaacacattcttggtaaagaacatcaaaagttttaaaaaagaaaatgagcaagaatcagacatcacagatgcaacttcttgtaatgggagatgagaatgtacggctgtg

SEQ ID NO: 2741 - DNA, 600 bp, Homo sapiens; identical to SEQ ID NO: 2740

SEQ ID NO: 2742 - DNA, 1400 bp, Homo sapiens
attcacaatctttagaaagaatgagattcacaataattaactcttcctctcttctgataaattccccatacctcccaatccaagtagcatctgtagctacataacctatatacctccagcagctggacatggggaggcgacagtcctatctagacatcatacacatttgccaagaaaggatctctggggcttccgggggtgagattcaagcaggacaataacaagaggctggacaccctacagatgtctttgatgttttcagttgtttgatatatctcccctgtagggcatgttgaggaaggaggagggctgatcaaggccaagctggtctagcctgacatcctagctcctgactgaacactatagacttcccagcagcatttcacccagcagccagagccggctttaagtccccaacccttacagacaccactgccaccaccaccaaccacgaccaccaccaccaccaccactcaccaccatcatcacctccggaaagtgtagtcctgccctaacccaagtcacccccgacagtaaattttaccttcatgttgagaaagcttcctggtgcttaatcaagagctggagttcaatgagtcctagacagtgagaggggcctgagcttcagctcaatggaagcctgctgtgtgccacaagacggaaaagtggaagaagctgcagtgggagacaaagcctcggtcccccacccatccacacacacctacactcacacacgcgcacatgggcgcgcacgaactaccattcaggcagtcagtgggcaagaggaaagataagtaagtaccatacacacctaaaagatgagagaattcatccagacatattacagccagtttggggcccctgactgcaatgtgaaacctctcgctgctgctaggtttacaaacaagcccattgtcctgtgcctcctaatatcatttgtactgaagaccccatctggggacttgagactttggtcccagcccagactcctcagacttttctctcagttgggatgcttcactcgctgggggtgtttgtttgccctctcatttttcagtacttctacagaattttctctagagtcagtcattatgaaatgtacttccctccatcttaacctatcaactttctgcccctccttcaaggcccagtataaatgccacctcctccatgaagccttccctaattccaccccaaacccccaccttcaacaatatttcaacgcttctgcaatgatgaaaaagaaacatagttgtagtacttagcctacctagaccagcaagcattcatttttagctcgctcattttttaccatgttttccagtctgtttaacttctgcagtgccttcactacactgccttacataaaccaaatcacaataaagttcatattcagtaca

SEQ ID NO: 2743 - DNA, 1400 bp, Homo sapiens; identical to SEQ ID NO: 2742

SEQ ID NO: 2744 - DNA, 600 bp, Homo sapiens
attccctggttatactttgtcaatagttttctcattgctacagtgtattggtttaattgtcacaagcttaatttaaaagacattggattacctttggatccatttgtcaactggaagtgctgcttcattccacttacaattcctaatcttgagcaaattgaaaagcctatatcaataatgatttgttaatattattaattaaaagttacagctgtcataagatcataattttatgaacagaaagaactcaggacatattaaaaaataaactgaactaaaacaacttttgccccctgactgatagcatttcagaatgtgtcttttgaagggctataccagttattaaatagtgttttattttaaaaacaaaataattccaagaagtttttatagttattcagggacactatattacaaatattactttgttattaacacaaaaagtgataagagttaacatttggctatactgatgtttgtgttactcaaaaaaactactggatgcaaactgttatgtaaatctgagatttcactgacaactttaagatatcaacctaaacatttttattaaatgttcaaatgtaagcaagaaaaaaaaaa

SEQ ID NO: 2745 - DNA, 600 bp, Homo sapiens; identical to SEQ ID NO: 2744

SEQ ID NO: 2746 - DNA, 600 bp, Homo sapiens
agctttacaagagaaaacccatatttgatgggcagagattatatccctatcttctttttcatgtaaaccactggtcacaaatgaactgatctctgtatcccattattactataagaggtgggaatcccaaaactgcttagattgcagtacatgagtttacacaaagacttcaacaattgcacatcttcattctcccaactgagtgtagtatgtggagcataaaacagcatattcttagtatttcatgaatatcagatggtctttaaatgtctctttatggatgtattgttcacattatggctttaaaataatgaatatgtaaaagtgaggtagtgaacatcctaaatttctacactggaattactaaataatcttatttcataaaatgggaaatatatgttaaatgacatcactggatgaacttgaagatcttttacttgttaacaaaaaaatactatggacagctttctgattgttggggtaaatagcaaatgttcaaactttgcaggcattttgacattcatcataacaacacaattcctagacattgtattatataattaaagccaaaacctctaaagctaaaaaaaaaaaaaaaaa

SEQ ID NO: 2747 - DNA, 600 bp, Homo sapiens; identical to SEQ ID NO: 2746

SEQ ID NO: 2748 - DNA, 1400 bp, Homo sapiens
tacttcatggcagttttactctgtgaagctcctcagatatgttagctactatgactattttattgcttcctgtgaaatcacattctgtatttttctttttgtcttcacaacacaagaagtcaaaaaaataaaagaatttaagtctgcctatttcaaaagtatttggaactggctagaattgctacttttgctgttgtgttttgtggctgtttccttcaacacatactataatgtacaaatttttctcttacttggacagctgttgaaaagtactgaaaaatattcagatttctattttcttgcatgctggcacatttattacaataatataattgctattaccatcttttttgcatggataaagatattcaaattcataagctttaacaagacaatgtctcagctgtcatcaaccttgtcccgttgtgttaaagacatagtaggatttgccatcatgttttttataatattctttgcttatgcccagttaggatttcttgtttttggatcacaagttgatgacttttccacttttcagaattccatatttgcacaatttcgaattgttcttggagattttaattttgctggtattcagcaagccaatcctatcttgggacccatttacttcatcactttcatcttttttgtgttctttgtcctgctgaatatgttcttggcaattattaatgatacctattctgaagtgaaagctgactattcaataggcagaaggccagattttgaacttggcaaaatgattaaacagagttacaaaaatgttctcgagaaattcagactgaagaaagctcaaaaagatgaagacaagaaaaccaaaggcagcggagatttggctgaacaagccagaagagaaggctttgacgaaaatgagattcaaaacgcagagcagatgaaaaaatggaaagagaggcttgagaaaaagtattattctatggaaattcaagatgactaccagcctgtcactcaagaagaatttcgagatggcaccacaaccaagtacaaaatgagattctctctgagtgcctgacaaaacgaatttaagtaccagccaagtacacacgatgatagcttcaaggaatacaactgactttatgatatgaattttcaaggaacgtatcttatatggattttgaagaatcttgtttgcttataagaacttcaagaagcctaagcttggctttaattttcttgtactctctgtactcctcaagcactggaacacgatcctctttctgggcattcctaggggagaaaataaaatttgtaatgttctagagatcatttggaaaaaaagatccaaaagttgtcttaatatgagacatactgttactaaacataagttcaaataaaaagttgttctgaaaaaaaaaaaaaaaaaa

SEQ ID NO: 2749 - DNA, 1400 bp, Homo sapiens; identical to SEQ ID NO: 2748

SEQ ID NO: 2750 - DNA, 600 bp, Homo sapiens
cgctcagccacaccattccctctggtcagcctcttcttcatgttcattgggtttatcctgaacaacatcggacacatccgtccccaccggacgatactggcctttgtctctggcatcttctttatcctctcaggcctctctctcgtggtgggcctggtgctctacatctccagcatcaacgatgagatgctcaacaggaccaaggatgcagagacctacttcaactacaagtatgggtggtcgtttgccttcgccgccatctccttccttttaacggaggtaaagcccgtcaccctaagtatggataggctgggcctgggcactgccccactgagccggggagagtggggatgggggagaagggacattccacaaccattttggaccccggaccacccactctacttcccttcctcatcccagaatgtgtcactgtcttacctttctgggtctcctccggccaggatgtccccaggaccctgctcctgtccccacgtccacttcccaccccactcgagctgtgtcctgtgcagaccccagccaagggagatgaggcaggccccagcagcgagcccatcctctgctgtcttctccctgtag

SEQ ID NO: 2751 - DNA, 600 bp, Homo sapiens; identical to SEQ ID NO: 2750

SEQ ID NO: 2752 - DNA, 600 bp, Homo sapiens
aggatctacagccgcaagaacaacatcgtcctcagtgccggcatcctcttcgtggctgcaggcctcagtaacatcatcggtatcatcgtctacatttccagcaacacaggtgacccgagtgacaagcgggacgaagacaaaaagaaccattacaactacggctggtctttttactttggagctctgtctttcattgtggctgagaccgtgggcgtcctggctgtaaacatttacattgagaaaaataaagagttgaggtttaagaccaaacgggaattccttaaggcgtcttcctcttctccttatgccaggatgccgagctacaggtaccggcgacggcgctcgaggtccagctcaaggtccaccgaggcctcgccctccagggacgtgtcgcccatgggcctgaagatcacaggggccatccccatgggggagctgtccatgtacacgctgtccagggagcccctcaaggtgaccaccgcagccagctacagccccgaccaggaggccagcttcctgcaggtgcatgactttttccagcaggacctgaaggaaggtttccacgtcagcatgctgaaccgacggacgacccctgtgtga

SEQ ID NO: 2753 - DNA, 1400 bp, Homo sapiens
aacatctggaggaagaagaaaggctatgccgggagtctttggcagattcctggggtgaatgcaggtcttgcctggaaaataactgcatgagaatttatacaacctgccaacctagctggtcctctgtgaaaaataagattgaacggtttttcaggaagatatatcaatttctatttcctttccatgaagataatgaaaaagatctccccatcagtgaaaagctcattgaggaagatgcacaattgacccaaatggaggatgtgttcagccagttgactgtggatgtgaattctctctttaacaggagttttaacgtcttcagacagatgcagcaagagtttgaccagacttttcaatcacatttcatatcagatacagacctaactgagccttacttttttccagctttctctaaagagccgatgacaaaagcagatcttgagcaatgttgggacattcccaacttcttccagctgttttgtaatttcagtgtctctatttatgaaagtgtcagtgaaacaattactaagatgctgaaggcaatagaagatttaccaaaacaagacaaagctcctgaccacggaggcctgatttcaaagatgttacctgggcaggacagaggactgtgtggggaacttgaccagaatttgtcaagatgtttcaaatttcatgaaaaatgccaaaaatgtcaggctcacctatctgaagactgtcctgatgtacctgctctgcacacagaattagacgaggcgatcaggttggtcaatgtatccaatcagcagtatggccagattctccagatgacccggaagcacttggaggacaccgcctatctggtggagaagatgagagggcaatttggctgggtgtctgaactggcaaaccaggccccagaaacagagatcatctttaattcaatacaggtagttccaaggattcatgaaggaaatatttccaaacaagatgaaacaatgatgacagacttaagcattctgccttcctctaatttcacactcaagatccctcttgaagaaagtgctgagagttctaacttcattggctacgtagtggcaaaagctctacagcattttaaggaacattttaaaacctggtaagaagatctaatgcatcctatatccagtaagtagaattatctcttcatctgggacctggaaatcctgaaataaaaaaggataatgcaataaacacagttgcaggaaagtatgttagctatatactatgaagtactcttagtttacttatgttgaatggcttagctattaatactcaaattgagttaaaatgaaaattcctccttaaaaaatcaaacgtaatatgtattacatttcatggtacattagtagttctttgtatattgaataaatactaaatcacctaaa

SEQ ID NO: 2754 - DNA, 1400 bp, Homo sapiens; identical to SEQ ID NO: 2753

SEQ ID NO: 2755 - DNA, 600 bp, Homo sapiens
ggttggaggacgaggaggacgaggaagaggctgaaggtggggggctggccagccttcgccaattcttggagagtggggttctggggtcaggtgggggacccccacggggtcctggcttcttccgggaggagatcaccaccttcatcgatgagacacctctgccttctccgactgcctcaccagggcactctcctcgtcggccccggccactgggcctctcaccccgccgactctcccttgggtcccctgagagcagagccgttggacttcctttgggactaagcgcagggagacgctgctccctgacggggggtgaagaaagtgcaagggcttggggaggatcctggggcccaggcaaccccatctttccccagctgaccctgtgagcccaagcaggcctgctgaactcagaggagaaagcctgagtgagtaacacctcattctggccgagagtagggcagctgcctccagactctggggagacgggcgctagatttggggctcagaaggccctgctctctcccatccaagtgaccagatgccctactcagcttccatcacccctagcaatatgtattaaagtctgaagtgttgccatgg

SEQ ID NO: 2756 - DNA, 600 bp, Homo sapiens
ctgatgggcgaggaaaacggcatgccacgaagccatgtcccaacaacgtagaaaaatctaacaggatctatcaatgttctcctccatacagagtctcttccaacgaaactgagataatgaaagaaatcatgcaaaatggaccagttcaagccataatgcaagtccatgaagatttcttccattataagacagggatatacagacatgttaccagcacaaataaagaatcagaaaaatatcgaaagcttcagacacatgcagtcaaactcactggatggggcacactgagaggagcacaagggcagaaagaaaaattttggattgctgccaattcctggggaaagtcatggggagagaatggctatttcaggattcttcgaggagtaaatgagtccgacattgaaaagttgattatcgcagcttggggccaactgacgagttctgatgaaccataacatatcattaaatttccataaggtcatgcctttaagtaaccccctaaattgaagtttagcaatatgacattcttggtgacagtggaatctttgtctcttcaccgtgttaacataatctatctattttcttattttcccctctgga

SEQ ID NO: 2757 - DNA, 600 bp, Homo sapiens; identical to SEQ ID NO: 2756

SEQ ID NO: 2758 - DNA, 1400 bp, Homo sapiens
ctttgtgtttgatgtgatgaacctactcaatgtgatatataacaccatagatgttcaagtggccttggtaggtatggaaatctggtctgatggggataagataaaggtggtgcccagcgcaagcaccacgtttgacaacttcctgagatggcacagttctaacctggggaaaaagatccacgaccatgctcagcttctcagcgggattagcttcaacaatcgacgtgtgggactggcagcttcaaattccttgtgttccccatcttcggttgctgttattgaggctaaaaaaaagaataatgtggctcttgtaggagtgatgtcacatgagctgggccatgtccttggtatgcctgatgttccattcaacaccaagtgtccctctggcagttgtgtgatgaatcagtatctgagttcaaaattcccaaaggatttcagtacatcttgccgtgcacattttgaaagataccttttatctcagaaaccaaagtgcctgctgcaagcacctattcctacaaatataatgacaacaccagtgtgtgggaaccaccttctagaagtgggagaagactgtgattgtggctctcctaaggagtgtaccaatctctgctgtgaagccctaacgtgtaaactgaagcctggaactgattgcggaggagatgctccaaaccataccacagagtgaatccaaaagtctgcttcactgagatgctaccttgccaggacaagaaccaagaactctaactgtcccaggaatcttgtgaattttcacccataatggtctttcacttgtcattctactttctatattgttatcagtccaggaaacaggtaaacagatgtaattagagacattggctctttgtttaggcctaatctttctttttacttttttttttcttttttctttttttttaaagatcatgaatttgtgacttagttctgccctttggagaacaaaagaaagcagtcttccatcaaatcaccttaaaatgcacggctaaactattcagagttaacactccagaattgttaaattacaagtactatgctttaatgcttctttcatcttactagtatggcctataaaaaaaataataccacttgatgggtgaaggctttggcaatagaaagaagaatagaattcaggttttatgttattcctctgtgttcacttcgccttgctcttgaaagtgcagtatttttctacatcatgtcgagaatgattcaatgtaaatatttttcattttatcatgtatatcctatacacacatctccttcatcatcatatatgaagtttattttgagaagtctacattgcttacattttaattgagccagcaaagaaggcttaatgatttattgaaccataatgtcaataaaaacacaacttttgaggc

SEQ ID NO: 2759 - DNA, 600 bp, Homo sapiens
gccagagactggaagcgtaggtacgatgtgggcatcagtgctgccatctggatcgttgtggggactgcctgtttgccatttcccatcctgagaagcacagacttaaacaacaacaagtcctgctttgctgatcttggatacaagcaaatgaatgcagttgcgttggtcgggatgattacagttgctgagcttgcaggatttgtgatcccagtgatcatcatcgcatggtgtacctggaaaactactatatccttgagacagccaccaatggctttccaagggatcagtgagaggcagaaagcactgcggatggtgttcatgtgtgctgcagtcttcttcatctgcttcactccctatcatattaactttattttttacaccatggtaaaggaaaccatcattagcagttgtcccgttgtccgaatcgcactgtatttccaccctttttgcctgtgccttgcaagtctctgctgccttttggatccaattctttattactttatggcttcagagtttcgtgaccaactatcccgccatggcagttctgtgacccgctcccgcctcatgagcaaggagagtggttcatcaatgattggctaa

SEQ ID NO: 2760 - DNA, 600 bp, Homo sapiens
cctctggcccctggtgacatttgtggtgggcgttctcattgtggtcctgaccatctgtgccaagagcttggcggtcaaggcggaagccatgaagaagcgcaagttctcttaaaggggaaggaggcttgtagaaagcaaagtacagaagctgtactcatcggcacgcgtccacctgcggaacctgtgtttcctggcgcaggagatggacagggccacgacagggctctgagaggctcatccctcagtggcaacagaaacaggcacaactggaagacttggaacctcaaagcttgtattccatctgctgtagcaatggctaaagggtcaagatcttagctgtatggagtaactatttcagaaaaccctataagaagttcattttctttcaaaagtaacagtatattatttgtacagtgtagtatacaaaccattatgatttatgctacttaaaaatattaaaatagagtggtctgtgttattttctatttccttttttatgcttagaacaccagggtttaaaaaaaaaaaaaaggtgaggacatctgggtctcatttgcttctgctaggttaaacttttacttgacaacaaggattcctgct

SEQ ID NO: 2761 - DNA, 600 bp, Homo sapiens; identical to SEQ ID NO: 2760

SEQ ID NO: 2762 - DNA, 600 bp, Homo sapiens
agtgaagcatttcgcctgaccattacacgcaaagatattcaaactctaaaccatctgaattggctcaatgatgagatcatcaatttctacatgaatatgctgatggagcgaagtaaagagaagggcttgccaagtgtgcatgcatttaatacctttttcttcactaaattaaaaacggctggttatcaggcagtgaaacgttggacaaagaaagtagatgtattttctgttgacattcttttggtgcccattcacctgggagtacactggtgtctagctgttgtggactttagaaagaagaatattacctattacgactccatgggtgggataaacaatgaagcctgcagaatactcttgcaatacctaaagcaagaaagcattgacaagaaaaggaaagagtttgacaccaatggctggcagcttttcagcaagaaaagccagattcctcagcagatgaatggaagtgactgtgggatgtttgcctgcaaatatgctgactgtattaccaaagacagaccaatcaacttcacacagcaacacatgccatacttccggaagcggatggtctgggagatcctccaccgaaaactcttgtga

SEQ ID NO: 2763 - DNA, 600 bp, Homo sapiens
aatgtgctgctcatgaacctgctcatcgccatgttcagctacacgttccaggtggtgcagggcaacgcagacatgttctggaagttccagcgctacaacctgattgtggagtaccacgagcgccccgccctggccccgcccttcatcctgctcagccacctgagcctgacgctccgccgggtcttcaagaaggaggctgagcacaagcgggagcacctggagagagacctgccagaccccctggaccagaaggtcgtcacctgggagacagtccagaaggagaacttcctgagcaagatggagaagcggaggagggacagcgagggggaggtgctgcggaaaaccgcccacagagtggacttcattgccaagtacctcggggggctgagagagcaagaaaagcgcatcaagtgtctggagtcacagatcaactactgctcggtgctcgtgtcctccgtggctgacgtgctggcccagggtggcggcccccggagctctcagcactgtggcgagggaagccagctggtggctgctgaccacagaggtggtttagatggctgggaacaacccggggctggccagcctccctcggacacatga

SEQ ID NO: 2764 - DNA, 600 bp, Homo sapiens
aactccaccataaagcaactgctggcattttgctggtcagttcctgctcttttttcttttggtttagttctatctgaggccgatgtttccggtatgcagagctataagatacttgttgcttgcttcaatttctgtgcccttactttcaacaaattctgggggacaatattgttcactacatgtttctttacccctggctccatcatggttggtatttatggcaaaatctttatcgtttccaaacagcatgctcgagtcatcagccatgtgcctgaaaacacaaagggggcagtgaaaaaacacctatccaagaaaaaggacaggaaagcagcgaagacactgggtatagtaatgggggtgtttctggcttgctggttgccttgttttcttgctgttctgattgacccatacctagactactccactcccatactaatattggatcttttagtgtggctccggtacttcaactctacttgcaaccctcttattcatggcttttttaatccatggtttcagaaagcattcaagtacatagtgtcaggaaaaatatttagctcccattcagaaactgcaaatttgtttcctgaagcacattaa

SEQ ID NO: 2765 - DNA, 600 bp, Homo sapiens; identical to SEQ ID NO: 2764

SEQ ID NO: 2766 - DNA, 1400 bp, Homo sapiens
ctttgctgccacttccggaagatggtcctccccaggtccccgatggtcccccagacctgctgcttgagtcccagtggcaccactattcaggtgaggcttcgagctctgaggaagagcctccatccccagatgataaagagaaccaggccccaaaacggactggcccacatctgcgcttcgagatcagcagtgaggatgggttcagcgttgaggcagagagcttggagggggcgtggagaactctgatcgagaaagtgcaagaggcccgagggcatgcccgactcagacatctctcctttagtggaatgagtggggcgagactcctgggcatccaccatgatgctgtcatcttcctggccgagcagctccccggagcccagcgttgccagcactataagttccgttaccaccagcagggagagggccaggaggagccgcccctgaatccccatggggctgctcgggcagaggtctatctccggaagtgcacctttgacatgttcaacttcctggcctcccagcaccgggtgctccctgagggggccacctgtgatgaggaagaggatgaggtgcagctcaggtcaaccagacgtgccaccagcctggagctgcccatggccatgcgttttcgtcaccttaagaagacgtccaaagaagctgtgggtgtctacagatcagccatccacgggcgaggcctgttctgtaagcgcaacatcgacgcgggggagatggtcatcgagtactctggcattgtcatccgctcggtgttgactgacaagcgggagaagttctacgatgggaagggcatcgggtgctatatgttccgcatggatgactttgatgtagtggacgccacgatgcatggcaatgccgcccgcttcatcaaccactcctgtgagcccaactgcttctctcgggtcatccacgtggagggccagaaacacattgttatcttcgccctgcgccgcatcctgcgtggtgaggagctcacctacgactacaagttccccatcgaggatgccagcaacaagctgccctgcaactgtggcgccaagcgctgccgtcggttccttaactgaggccgtggctgcccaccacgacccctcacacctcctgctgccgtcgctgccatcttgcccctagcctgggggctccctagcccctcccagagcatctcacccccaccctcatgttcagggtggatgtgggcatgcaggtgacaagggccctgcctccacccctccagcccatccagcaatcgccccctttctgccctgggggcccaggatgtagatattgtacaaaggtttctaaatcccttcttttctatgcacttttttatttaagaggtggggtcccaggtgggaacccccccacaataaagtctgtcaatgtttgga

SEQ ID NO: 2767 - DNA, 1400 bp, Homo sapiens
ccagtcaaaagaaatcttgcggtatatgaaagaattcactctgctactatctgctgcaaatgtatgcttggaccctattatttatttctttctatgccagccgtttagggaaatcttatgtaagaaattgcacattccattaaaagctcagaatgacctagacatttccagaatcaaaagaggaaatacaacacttgaaagcacagatactttgtgagttcctaccctcttccaaagaaagaccacgtgtgcatgttgtcatcttcaattacataacagaaatcaataagatatgtgccctcatcataaatatcatctctagcactgccatccaatttagttcaataaaattcaaatataagtttccatgcttttttgtaacatcaaagaaaacatacccatcagtaatttctctaatactgacctttctattctctattaataaaaaattaatacatacaattattcaattctattatattaaaataagttaaagtttataaccactagtctggtcagttaatgtagaaatttaaatagtaaataaaacacaacataatcaaagacaactcactcaggcatcttctttctctaaataccagaatctagtatgtaattgttttcaacactgtccttaaagactaacttgaaagcaggcacagtttgatgaagggctagagagctgtttgcaataaaaagtcaggtttttttcctgatttgaagaagcaggaaaagctgacacccagacaatcacttaagaaaccccttattgatgtatttcatggcactgcaaaggaagaggaatattaattgtatacttagcaagaaaattttttttttctgatagcactttgaggatattagatacatgctaaatatgttttctacaaagacttacgtcatttaatgagcctggggttctggtgttagaatatttttaagtaggctttactgagagaaactaaatattggcatacgttatcagcaacttcccctgttcaatagtatgggaaaaataagatgactgggaaaaagacacacccacaccgtagaacatatattaatctactggcgaatgggaaaggagaccattttcttagaaagcaaataaacttgatttttttaaatctaaaatttacattaatgagtgcaaaataacacataaaatgaaaattcacacatcacatttttctggaaaacagacggattttacttctggagacatggcatacggttactgacttatgagctaccaaaactaaattctttctctgctattaactggctagaagacattcatctatttttcaaatgttctttcaaaacatttttataagtaatgtttgtatctatttcatgctttactgtctatatactaataaagaaatgttttaatactg

SEQ ID NO: 2768 - DNA, 1400 bp, Homo sapiens
  misc_feature (709)..(709): n is a, c, g, or t
ctggatcgaaacctgccagacatgatgcagctatggagtgaaatatttaacaacccgtgctttgaagaagaggagcacttcaaggtgctggtgaagatgaccgcccaggagctcgccaatggaattcctgactctgggcacctgtacgcatccatcagggcaggccggaccctcacgcccgcaggggacctgcaggagaccttcagcgggatggatcaggtgcggctgatgaagaggattgcagaaatgacagatatcaaacccatcctgaggaagctcccgcgtatcaagaaacacttgttaaatggtgataatatgaggtgttcagtgaatgcgactcctcagcagatgcctcagacagaaaaagcggtcgaagacttccttagaagcatcggtcggagtaaaaaggaacggaggcctgtgcgcccacacacggtcgagaaacctgtgcccagcagctctggtggagatgcccacgttccccatggctcccaggtcattaggaagctggtcatggaacccaccttcaagccctggcagatgaagactcacttcctgatgcccttcccggtgaattacgtgggtgaatgcatccgaactgtcccctacacggacccagatcatgccagtcttaaaatccttgcacgtttgatgactgccaaattcttgcatacagaaattcgagaaaaaggcggtgcttatggtggangcgcaaaactcagccacaatgggattttcaccctttactcttacagggacccaaatacaatagagacgctccagtcttttgggaaggctgtcgactgggctaagtctggaaaattcacacagcaagacatcgacgaagccaaactttctgtcttctcaaccgtagatgctcctgtcgctccttcagacaaaggaatggaccacttcttgtacggcctctcggatgagatgaagcaggcccacagagagcagctctttgctgtcagccacgacaagctcctggccgtgagcgataggtacctcggcactgggaagagcacacacggcctggccatcctcggacccgagaacccgaaaattgccaaggacccatcctggatcatccgatgagcagccgtggcgctcgactgcacaggagcccgagacaatacacctccaagctgaatatgaaaagtcagaaatgctactgctttttccaagaatattatgtcattgagtgtcgccaaagcccttgactggcgagtcaaaaactcagatctatcttaagagtgaccaggaagaggttcattgaaataatcatgcatgaagcgccaaagatgcaccatgtagaattttcactttgtactggcaggctcgttttacctgattctagaatatttaagaatctaaaaataaagggcaactctgactta

SEQ ID NO: 2769 - DNA, 600 bp, Homo sapiens
tgtgaagggaaatgagggctttagtttcctgggcagggaggggcagcttctgaggttgccaaaggcccccactggatggaacctgttagctgctcctctccgcagccagaaatgctgccggctgcacccagagggagcagtgaggcaggacagatggacaggttcctcctgcgctgtaattccctgctccctggagactgggaaaaggccgcagggcagggggactgggcggtggtggctggtggtttaaaggttgaactttctctgaagctcctttccccttgctcttggtccctgccccgcaagcaaacctgccccctctgcctcccagtgcacccaatgaccccctcccttggggcgactcctgatgaagcacaactccccgcagggcccccagcccacaggggtggccatatttgggcagttcccagtcctgtgggctcggctatctggggagcagattttgggtctggatctccctggggagtgggtcctgggcttggatctttccctagggggccctcttactccttcctctctcctcctccttccccattgctgtaaatatttcaacgaaatggaaaagaaaaaaaaaaagac

SEQ ID NO: 2770 - DNA, 600 bp, Homo sapiens; identical to SEQ ID NO: 2769

SEQ ID NO: 2771 - DNA, 600 bp, Homo sapiens
tatgacgaatatgtaacatttaacggatcatatctcctggatggaaaccccttaagcaagatttgtattcccacaattacaccaccaccttcactgtcagatccacttaaagagctttttcgacaacaggaagttgtaaggatgaaactacgtttgcaacacagtattgaaagggaaaaactcattgtatccaacgaacaagaagttttgcgagttcattacagagctgcaagaacattggcaaatcaaacactgccatttagtgcttgtactgttttgctggatgccgaagtatacaatgtaccattggactctcagtctgatgacagtaaaacttctgtgagggatcgctttaatgcaagacaattcatgtcttggttacaagatgtggatgataaatttgacaaattaaagacctgtcttttaatgaggcaacaacatgaagctgcggctttaaatgctgtccagaggttagaatggcagctcaaactccaggaacttgatcctgccacctataaatctatcagcatttacgaaatccaggagttttatgttccccttgttgatgttaacgacgactttgaattgactcctatatag

SEQ ID NO: 2772 - DNA, 1400 bp, Homo sapiens
ttaggtcagcccaggggagaaagataactgctaaaattcccctgtaccccatcctttcttgtcctttccccttcagatggagacttcattatgttaatgaacaagatatgaagaaaatggcactcattgtggccttgttgaattatgttgtgtatgttttaacatctctgatgctgtgttactaaaattacaaggacctgctttttaaaaggccagaacaattgtctgaaattagtaacaatgctgcatctagattggagtgctgcacaaacaaacataagagcaaagcaaaactgtatcacatagggtttttggtcactcacaacctgaattcaccacagctggaatagctgtggaaaacaaaataaaacaacaaaattaataatgaaatggaggggaattctagaattatatgctaaatgcatattttatgatttgctgtattaactgatgataaaactaatggcagaaaaagaagttgagcaatttctatgtaatgtacagatactagcattgcacatatagtctgctttctgttcctccagaatttgagtcctgttaatgtagtagaaaaaaaaaaaagaaattttctttttcttttgtgctggtcttgcaagtttgtctaccagtaagagagcaaagtttccttcctttcttctctttcttcattttctttttttcttttttgccttttattcctttaaaatttcgcctggcaaaaaataaataaatggaactatcactttataagaatcattttctagtaatgcaaacaaattattttttacaaaaaaacaaaataaataaaattagacttccttccctcactatatatctttatgcagtcagaatatttccaacagtgttttttgcaaattagagcaggacaaacttttatgtttacagggcacgtctgttgtaatgcaaagcatatttggcaagcagttcatcaccaggacactagctatgattctagaagtcaaaaggtgtctatagaactagtggggcttctgcatgtgaaaaacggttttccataggcattaaagtgctgaatgctcagtctgatcaacaagtgggcacctgcactaccactttttagaggaaattcactccctcgtaagcattggaaggtcaaattattttgaagtgattttttttaaaaaaaagtcttctgtttattaacaggaaaatttatttatttgacaggattttgagtaatgtaggaatacaaaaggtaaattagcagcacatataatttttttttaatttatgatccattttgtatggtctcaaagttggatgacctcattactaatatttgttgtaaaagtgaaacttgtttgccaaccaataaacaactgattgagatttagaagatattgtaaaaaaaaaaaaaaaaa

SEQ ID NO: 2773 - DNA, 600 bp, Homo sapiens
gtcagtgtctctaagattgtggtgcacaaggactggaactccaaccaggtctccaaagggaacgacattgccctgctcaaactggctaaccccgtctccctcaccgacaagatccagctggcctgcctccctcctgccggcaccattctacccaacaactacccctgctacgtcacaggctggggaaggctgcagaccaacggggctctccctgatgacctgaagcagggccggttgctggttgtggactatgccacctgctccagctctggctggtggggcagcaccgtgaagacgaatatgatctgtgctgggggtgatggcgtgatatgcacctgcaacggagactccggtgggccgctgaactgtcaggcatctgacggccggtgggaggtgcatggcatcggcagcctcacgtcggtccttggttgcaactactactacaagccctccatcttcacgcgggtctccaactacaacgactggatcaattcggtgattgcaaataactaaccaaaagaagtccctgggactgtttcagacttggaaaggtcacagaaggaaaataatattatataaagtgacaactatgcaaatcac

SEQ ID NO: 2774 - DNA, 600 bp, Homo sapiens; identical to SEQ ID NO: 2773

SEQ ID NO: 2775 - DNA, 1400 bp, Homo sapiens
gtttagctcattttttctccttggaaaaacgctgatgcagactttggcacaaatgatggctgactctccctcttcttattcttcctcctcttcttcctcttcctcctcttcttcctcttcctcttcttcatcttcttcctcttcctcgcttcacaatgaacaggtgttacaagttgtggttcctggtataaatttacccgtcaatcaactgacctatttcttcacggcagttctcattagtggtgttgtacatgaaattggacatgggatagcagctattagggaacaagttcgatttaatggctttgggatttttctcttcattatttatcctggagcatttgttgatctgttcaccactcatttgcaacttatatcgccagtccagcagctaaggatattttgtgcaggtatctggcataattttgtccttgcactcttgggtattttagctcttgttctcctcccagtaattctcttgccattttactacactggagttggggtgctcatcactgaagttgctgaggactctcctgccattggacccagaggcctttttgtgggagaccttgtcacccatctacaggattgtcctgttactaatgtgcaagattggaatgaatgtttagataccatcgcctatgagccccaaattggttactgtataagtgcatcaactttacagcagttaagtttcccagttagagcatacaaacgactagatggttcaactgaatgctgtaacaatcacagcctcacagatgtgtgcttttcctacagaaataattttaataagcgtttgcatacatgtcttcctgcccggaaagcagttgaagcaactcaagtttgcagaaccaataaagactgtaaaaaaagctcaagttcaagtttctgtataataccttctttggaaactcacactcgcttaataaaagtaaaacacccacctcagattgatatgttatacgtaggacatcctctgcatcttcactacacagtgagcatcaccagttttatcccacgttttaactttctaagcatagatctgccagtggttgtggagacatttgtcaagtacctgatttccctctcaggagctctggctattgttaatgcagtaccctgctttgctttggatggacaatggattctaaactctttcttggatgccacccttacctcagtgattggagacaatgatgtcaaagatctaatagggtttttcatcttgctgggtggcagtgtacttttggctgccaatgtgaccctgggactctggatggttacagcacggtaatgtttgcactcatctgacagaatccctgagttacagtatacagctatgtggtaatattcattgccattgaaattcttacttggtatgaaatataaagtgt

SEQ ID NO: 2776 - DNA, 1400 bp, Homo sapiens
agccaaacacgtatgcagactttgagttcctcgccttctggcagacacagtacaacaacatgaatgctgtcaacctcttcttcgcctggatcaagatattcaagtacatcagcttcaacaaaaccatgacccagctctcctccacgctggcccgctgtgccaaggacatcctgggcttcgccgtcatgttcttcattgttttcttcgcctatgcccaactcggctacctgcttttcgggacccaagtggaaaactttagcactttcatcaagtgcattttcactcagttccggataatcctcggggactttgactacaatgctatcgacaatgccaaccgcatcctgggccctgcctactttgtcacctatgtcttcttcgtcttcttcgtgctcctgaacatgttcctggccatcatcaatgacacatattcagaggtcaaggaggagctggctggacagaaggatgagctgcaactttctgacctcctgaaacagggctacaacaagaccctactaagactgcgtctgaggaaggagagggtttcggatgtgcagaaggtcctgcagggtggggagcaggagatccagtttgaggatttcaccaacaccttaagggaactgggacacgcagagcatgaaatcactgagctcacggccaccttcaccaagtttgacagagatgggaatcgtattctggatgagaaggaacaggaaaaaatgcgacaggacctggaggaagagagggtggccctcaacactgagattgagaaactaggccgatctattgtgagcagcccacaaggcaaatcgggtccagaggctgccagagcaggaggctgggtttcaggagaagaattctacatgctcacaaggagagttctgcagctggagactgtcctggaaggagtagtgtcccagattgatgctgtaggctcaaagctgaaaatgctggagaggaaggggtggctggctccctccccaggcgtgaaggaacaagctatttggaagcacccgcagccagccccagctgtgaccccagacccctggggagtccagggtgggcaggagagtgaggttccctataaaagagaagaggaagccttagaggagaggagactctcccgtggtgagattccaacgttgcagaggagttaagtgtgaggcactcccggagcaaagtctatgaaggatcttctgcaagaggctgcctcctggtccactgaacctggaaactgagtgggctttaaccaggagataaaaatggagcctgaagggaatcaggcaaggaaatgaactcaggattcagagatctttgaattaatatgtggtgggttctgacattattcttccataagaccatgtgggtttccatggtggctatcaataaaactccttagt

SEQ ID NO: 2777 - DNA, 600 bp, Homo sapiens
agcacggagcaccacctggtctgccgcatgctgcttgactacaaagccgaagtcaatgcccgagatgacgactttaaatctcccctccacaaggcagcctggaactgtgaccacgtgctcatgcacatgatgctggaagctggcgccgaagccaatctcatggatatcaacggctgtgctgccatccagtacgtgctgaaggtcacctccgtgcgccctgctgcccagcctgagatctgctaccagctcctgttgaaccatggggctgcccgaatataccctccacagttccataaggtgatacaggcctgccattcttgtcctaaagcaattgaagttgtagtcaatgcctatgaacacatcagatggaacacaaagtggagaagagctatccccgatgatgacttggagaaatactgggatttttaccactctctctttactgtgtgctgtaactctccaaggactctcatgcacttatcgagatgtgccattagaagaacattacacaacagatgccatagagcaattcctttgctttccctcccattgtcattgaaaaagtacttgcttttagagccagagggaattatttattaa

SEQ ID NO: 2778 - DNA, 600 bp, Homo sapiens; identical to SEQ ID NO: 2777

SEQ ID NO: 2779 - DNA, 600 bp, Homo sapiens
ggtggctgccaccatgctgctgctgctgccgccactgtcaccaggcgccctgtggacagcggcccaggccctgacgctatgacacacagcgcgagcccatgagaggacagaggcggtgggacagcctggccacagagggcaaggactgtgccggagtccctgggggaggtgctggcgcgggatgaggacgggccaccctggcaccggaaggccagcagagggcacggcccgccagggctgggcaggctcaggtggcaaggacggagctgtcccctagtgagggactgtgttgactgacgagccgaggggtggccgctccagaagggtgcccagtcaggccgcaccgccgccagcctcctccggccctggagggagcatctcgggctgggggcccacccctctctgtgccggcgccaccaaccccacccacactgctgcctggtgctcccgccggcccacagggcctccgtccccaggtccccagtggggcagccctccccacagacgagccccccacatggtgccgcggcacgtcccccctgtgacgcgttccagaccaacatgacctctccctgctttgtaaaaaaaaaaaaaaaaaaa

SEQ ID NO: 2780 - DNA, 1400 bp, Homo sapiens
tacaatgtcatctctctggttgttctactcaacatgttaatagctatgatgaataattcttaccaactgattgctgaccatgcagatatagaatggaaatttgcacgaacaaagctttggatgagttattttgaagaaggaggtactctgcctactcccttcaatgtcatcccgagccccaagtctctctggtacctgatcaaatggatctggacacacttgtgcaagaaaaagatgagaagaaagccagaaagttttggaacaatagggaggcgagctgctgataacttgagaagacatcaccaataccaagaagttatgaggaacctggtgaagcgatacgttgctgcaatgattagagatgctaaaactgaagaaggcctgaccgaagagaactttaaggaactaaagcaagacatttctagtttccgctttgaagtcctgggattactaagaggaagcaaactttccacaatacaatctgcgaatgcctcgaaggagtcttcaaattcggcagactcagatgaaaagagtgatagcgaaggtaatagcaaggacaagaaaaagaatttcagcctttttgatttaaccaccctgattcatccgagatcagcagcaattgcctctgaaagacataacataagcaatggctctgccctggtggttcaggagccgcccagggagaagcagagaaaagtgaattttgtgaccgatatcaaaaactttgggttatttcatagacgatcaaaacaaaatgctgctgagcaaaatgcaaaccaaatcttctctgtttcagaagaagttgctcgtcaacaggctgcaggaccacttgagagaaatattcaactggaatctcgaggattagcttcacggggtgacctgagcattcccggtctcagtgaacaatgtgtgttagtagaccatagagaaaggaatacggacacactggggttacaggtaggaaagagagtgtgtccattcaagtcagagaaggtggtggtggaggacacggttcctataataccaaaggagaaacatgcaaaagaagaggactctagtatagactatgatctaaacctcccagacacagtcacccacgaagattacgtgaccacaagattgtgatacttgaaggaggaagcgtttaccatacacatacgtattttccgtagtgctctgggtgggggaaaatgtttaaattgtattagcaaatgctaacttacactttatagcatttatcagctgtggcatattacctgtaacatgtttaaattaaggcaaaggcaatcaaaaacctttttgttttgtagcctgcttttgctttcacaatttgtcttacaattgtttttgttaataaataaatgcaccttgaaaaaaaaaaaaaaaaaaaaaaaaaaaaa

SEQ ID NO: 2781 - DNA, 1400 bp, Homo sapiens; identical to SEQ ID NO: 2780

SEQ ID NO: 2782 - DNA, 1400 bp, Homo sapiens
aatgtgaacactgacgaactgaaaagctaacaccgactgcccgcccctcccctgccacacacacagacacgtaataccagaccaacctcaatccccgcaaactaaagcaaagctaattgcaaatagtattaggctcactggaaaatgtggctgggaagactgtttcatcctctgggggtagaacagaaccaaattcacagctggtgggccagactggtgttggttggaggtggggggctcccactcttatcacctctccccagcaagtgctggaccccaggtagcctcttggagatgaccgttgcgttgaggacaaatggggactttgccaccggcttgcctggtggtttgcacatttcaggggggtcaggagagttaaggaggttgtgggtgggattccaaggtgaggcccaactgaatcgtggggtgagctttatagccagtagaggtggagggaccctggcatgtgccaaagaagaggccctctgggtgatgaagtgaccatcacatttggaaagtgatcaaccactgttccttctatggggctcttgctctaatgtctatggtgagaacacaggccccgccccttcccttgtagagccatagaaatattctggcttggggcagcagtcccttcttcccttgatcatctcgccctgttcctacacttacgggtgtatctccaaatcctctcccaattttattcccttattcatttcaagagctccaatggggtctccagctgaaagcccctccgggaggcaggttggaaggcaggcaccacggcaggttttccgcgatgatgtcacctagcagggcttcaggggttcccactaggatgcagagatgacctctcgctgcctcacaagcagtgacacctcgggtcctttccgttgctatggtgaaaattcctggatggaatggatcacatgagggtttcttgttgcttttggagggtgtgggggatattttgttttggtttttctgcaggttccatgaaaacagcccttttccaagcccattgtttctgtcatggtttccatctgtcctgagcaagtcattcctttgttatttagcatttcgaacatctcggccattcaaagcccccatgttctctgcactgtttggccagcataacctctagcatcgattcaaagcagagttttaacctgacggcatggaatgtataaatgagggtgggtccttctgcagatactctaatcactacattgctttttctataaaactacccataagcctttaacctttaaagaaaaatgaaaaaggttagtgtttgggggccgggggaggactgaccgcttcataagccagtacgtctgagctgagtatgtttcaataaaccttttgatatttctcaaaaaaaaaaaaaaaaaaaaaaa

SEQ ID NO: 2783 - DNA, 600 bp, Homo sapiens
ctgatccgaatgagtatgcctttagaataccgcaccataatcactgaagtccttggagaactgcagttcaacttctatcaccgttggtttgatgtgatcttcctggtcagcgctctctctagcatactcttcctctatttggctcacaaacaggcaccagagaagcaaatggcaccttgaacttaagcctactacagactgttagaggccagtggtttcaaaatttagatataagaggggggaaaaatggaaccagggcctgacattttataaacaaacaaaatgctatggtagcatttttcaccttcatagcatactccttccccctcaggtgatactatgaccatgagtagcatcagccagaacatgagagggagaactaactcaagacaatactcagcagagagcatcccgtgtggatatgaggctggtgtagaggcggagaggagccaagaaactaaaggtgaaaaatacactggaactctggggcaagacatgtctatggtagctgagccaaacacgtaggatttccgttttaaggttcacatggaaaaggttatagctttgccttgagattgactcattaaaatcagagactgt

SEQ ID NO: 2784 - DNA, 600 bp, Homo sapiens
aaccggcagtgacctcactgaagacaaaaactgccctagccaggtactgagggttgcatgaatctgcaggagacagagatccccttgcatgggaaacataaagcagaattgggagggactttgtggagacagggctggacttgaaaggaagaagaagtctaaaagaaaacatcatttgcaaagggagagaggggcaagcatgatatgttgttagaacaggagcccactttgaaggtataacaggttcctgccagtgagaaatggggagaataagccagaaaagtaccctaggaccagcccgttcaggactttgaatgccagccaaaggccacgtctgacttgggaggcagagggcagctactgcaggtttccgagcagagggtcatacacagggctggacctcacgcagactggcatggccatgggtccagaggatactactgggaaggggatggcagctactgccaccttccagatggttccatggagttctgatctttgggcatggccaggggaagcagaagggagactctaggagttgaaatgggtcagacccggtgtttgggtgaaggtaaggaatgagggaagaggagctctttg

SEQ ID NO: 2785 - DNA, 600 bp, Homo sapiens; identical to SEQ ID NO: 2784

SEQ ID NO: 2786 - DNA, 600 bp, Homo sapiens
  misc_feature (514)..(514): n is a, c, g, or t
  misc_feature (519)..(519): n is a, c, g, or t
  misc_feature (561)..(561): n is a, c, g, or t
acccaggctcatggaatcactgcaaatctatctgctcttcagacaatacgaagaccctctgagatgctacagaggagaggaagcggagtttcacatctggttaccattttctttttgtcattggcttaggatttaactaaccatgaaaagaactactgaaatattacactataacatggaacaataaaggtactggtatgttaatggataatccgcatgacagataatatgtagaaatattcataaagttaactcacatgacccaaatgtagcaagtttcctaaggtacaatagtggattcagaacttgacgttctgaggcacatcctcactgtaaacagtaatgctatatgcatgaagcttctgtttattgttttccatatttaaggaaacaacatcccataatagaaatgagcatgcagggctaaggcatataggatttttctgcaggactttaaagctttgaaaggccaatatcccataggctaactttaaacatgtatttttatttttgntttgntttttacttttcatatttatattagcatacaaggacaattgnatatatgtaacatttttaaaattttaaaaaaaaaaaaaa

SEQ ID NO: 2787 - DNA, 1400 bp, Homo sapiens
cctgcccctctccagccagctccctggagtcgtgtgtcctggcggtgtccctgcaagaactggttctgccagcctgctcaattttggtcctgctgtttttgatgagccttttgtctgtttctccttccaccctgctggctgggcggctgcactcagcatcaccccttcctgggtggcatgtctctctctacctcatttttagaaccaaagaacatctgagatgattctctaccctcattcacatctagccaagccagtgacctttgctctggtggcactgtgggagacaccacttgtctttaggtgggtctcaaagatgatgtagaatttcctttaatttctcgcagtcttcctggaaaatattttcctttgagcagcaaatcttgtagggatatcagtgaaggtctctccctccctcctctcctgttttttttttttgaggcagagttttgctcttgttgcccaggctggagtgtgatgggctcgatcttggctcaccacaacctctgcctcctgggttcaagcaattctcctgcctcagcctcttgagtagcttggtttataggcgcatgccaccatgcctggctaattttgtgtttttagtagagacagggtttctccatgttggtcaggctggtctcaaactcccaacctcaggtgatctgccctccttggcctcccagagtgctgggattacagggggagccactgtgccggtcccgtcccctccttttttaggcctgaatacaaagtagaagatcactttccttcactgtgctgagaatttctagatactacagttcttactcctctcttccctttgttattcagtgtgaccaggatgggcgggaggggatctgtgtcactgtaggtactgtgcccaggaaggctgggtgaagtccccatctaaattgcaggatggcgaaattatccccatctgtcctaatgggcttccctcctctttgccttttgaactcacttcaaagatgtaggcctcatcttacaggtcctaaatcactcatctggcctggataatctcactgccctggcacattcccatttgtgctggggtatcctgtgtttccttgtcctggtttgtgtgtgtgtgtgtgtgtgtgtgtgtgtgtgtgtgtgtttgtgtgtgtgtgtctgtctattttgatccggcccaagttcctaagtagagcaagaattcatcaaccagctgcctttgtttcatttcacctcagcacgtaccatcgtcctttggggggttgtttgtttttgttttttgctttaaccaaaatgtttgtaaatcttaacctcctgcctaggatttgtacagcatttggtgtgtgcttataagccaataaatattcaatgtgagttccaaaaaaaaaaaaaaaaaaaaaaaaaaaaaa

SEQ ID NO: 2788 - DNA, 1400 bp, Homo sapiens
ttccatctgctcgggcgaagatccgcatcacctccagccccatttttatcaccttctacatcctggtgtttgtggtggcgctggtgggcattgcccgggccgtggtatccatgacggtgagcacctcgaacgctgcaactgttgctgataagatcctgtgggagatcacccgcttcttcctgctggccatcgagctgagtgtgatcatcctgggcctggcctttggcacctgggagagtaagtccagcatcaagcgggtgctggccatcaccacagtgctgtccctggcctactctgtcacccaggggaccctggagatcctgtaccctgatgcccatctctcagctgaggactttaatatctatggccatgggggccgccagttctggctggtcagctcctgcttcttcttcctggtctactctctggtggtcatccttcccaagaccccgctgaaggagcgcatctccctgccttctcggaggagcttctacgtgtatgcgggcatcctggcactgctcaacctactgcaggggctggggagtgtgctgctgtgcttcgacatcatcgaggggctctgctgtgtagatgccacaaccttcctgtacttcagcttcttcgctccgctcatctacgtggctttcctccggggcttcttcggctcggagcccaagatcctcttctcctacaaatgccaagtggacgagacagaggagccagatgtacacctaccccagccctacgctgtggcccggcgggagggcctggaggctgcaggggctgctggggcctcagctgccagctactcgagcacgcagttcgactctgccggcggggtggcctacctggatgacatcgcttccatgccctgccacactggcagcatcaacagcacagacagcgagcgctggaaggccatcaatgcctgagggcagctgccagggcctgtggaggacaggccagagaggaggccagcaggcccagagtccccaggggaggaggaccaggtcaagggacgttctgtgggcagtagccctgtgtggccctgttcccaccatgagtctggaggccccacctccctggggctcccaatcccctttgccatctctgctctcactggggaccctcctccccttcccacctgctctcatactgctcagtgacatggcccaggctttccttccagggccatgcttggcaaggttggctgagggcaccctccttctctgcacccttggcacgagggcagggctggctctcccaatgcctccatcccatccccatggtgctttggcctcctcaaagcatccaccatggtggatggactgaagtgtgtatattttcttgatctattttttaataaaaaggaaaaggagcaaaaaaaaaaaaaaaaagttttg

SEQ ID NO: 2789 - DNA, 1400 bp, Homo sapiens
ctacaacatatgagattgttctctggcagccggtaacagctgaccttattgtgaagaaaaaacaagtccatttttttgtaaatgcatctgatgtcgacaatgtgaaagcccatttaaatgtgagcggaattccatgcagtgtcttgctggcagatgtggaagatcttattcaacagcagatttccaacgacacagtcagcccccgagcctccgcatcgtactatgaacagtatcactcactaaatgaaatctattcttggatagaatttataactgagaggcatcctgatatgcttacaaaaatccacattggatcctcatttgagaagtacccactctatgttttaaaggtttctggaaaagaacaagcagccaaaaatgccatatggattgactgtggaatccatgccagagaatggatctctcctgctttctgcttgtggttcataggccataatcgaatgtggagaaagaaccgttctttctatgcgaacaatcattgcatcggaacagacctgaataggaactttgcttccaaacactggtgtgaggaaggtgcatccagttcctcatgctcggaaacctactgtggactttatcctgagtcagaaccagaagtgaaggcagtggctagtttcttgagaagaaatatcaaccagattaaagcatacatcagcatgcattcatactcccagcatatagtgtttccatattcctatacacgaagtaaaagcaaagaccatgaggaactgtctctagtagccagtgaagcagttcgtgctattgagaaaattagtaaaaataccaggtatacacatggccatggctcagaaaccttatacctagctcctggaggtggggacgattggatctatgatttgggcatcaaatattcgtttacatcaaacccacctgtagagaagcttttgccgctgtctctaaaatagcttggcatgtcattaggaatgtttaatgcccctgattttatcattctgcttccgtattttaatttactgattccagcaagaccaaatcattgtatcagattatttttaagttttatccgtagttttgataaaagattttcctattccttggttctgtcagagaacctaataagtgctactttgccattaaggcagactagggttcatgtctttttaccctttaaaaaaaattgtaaaagtctagttacctactttttctttgattttcgacgtttgactagccatctcaagcaactttcgacgtttgactagccatctcaagcaagtttaatcaaagatcatctcacgctgatcattggatcctactcaacaaaaggaagggtggtcagaagtacattaaagatttctgctccaaattttcaataaatttctgcttgtgcctttagaaataca

SEQ ID NO: 2790 - DNA, 1257 bp, Homo sapiens
ccttagcgttacacccggtggtcgggcaaccattcctgaaggctgagggaagcagcaattctgtggtacatgcagagaccaaattgcaaaactatggggagctggggccaggaaccactggggccagcagctcaggagcaggccttcactgggggggcccaactcagtcttctgcttatggaaaactctatcgggggcctacaagagtcccaccaagagggggaagagggagaggagttccttactaacccagagacttcagtgtcctgaaagattcctttcctatccatccttccatccagttctctgaatctttaatgaaatcatttgccagagcgaggtaatcatctgcatttggctactgcaaagctgtccgttgtattccttgctcacttgctactagcaggcgacttaggaaataatgatgttggcaccagttccccctggatgggctatagccagaacatttacttcaactctaccttagtagatacaagtagagaatatggagaggatcattacattgaaaagtaaatgttttattagttcattgcctgcacttactggtcggaagagagaaagaacagtttcagtattgagatggctcaggagaggctctttgatttttaaagttttggggtggggggttgtgtgtggtttctttcttttgaattttaatttaggtgttttgggtttttttcctttaaagagaatagtgttcacaaaatttgagctgctctttggcttttgctataagggaaacagagtggcctggctgatttgaataaatgtttctttcctctccaccatctcacattttgcttttaagtgaacactttttccccattgagcatcttgaacatactttttttccaaataaattactcatccttaaagtttactccactttgacaaaagatacgcccttctccctgcacataaagcaggttgtagaacgtggcattcttgggcaagtaggtagactttacccagtctctttccttttttgctgatgtgtgctctctctctctctttctctctctctctctctctctctctctctctgtctgtctcgcttgctcgctctcgctgtttctctctctttgaggcatttgtttggaaaaaatcgttgagatgcccaagaacctgggataattctttactttttttgaaataaaggaaaggaaattcaaaaaaaaaaaaaaaaaaaaaaaaaaaaaaaaaaaaaaaaaaaaaaaaaaaaaaaaaaaaaaaaaa

SEQ ID NO: 2791 - DNA, 1257 bp, Homo sapiens; identical to SEQ ID NO: 2790

SEQ ID NO: 2792 - DNA, 600 bp, Homo sapiens
cccagttccttccttcagggtggcctggacagagaagaatgatggccagagggctccccttgccaataacctcctgcccacctcccaactccagtctgggaagacagacctgtcatctgtggaacccattgtgacgatgagttagaagaggttgggaagagggagtgggaggggtctgtctccacctgaggcagggaaagagagcctattctcacacatgatcttcagagtgctggaaacacactcctgcagaaggctgtaggactcttgaattcctaggaaactgtccagcctcctagccccatgtgatgtgaaaactaaaaggcaccaccaactagacatgtgttcataaattcccatctaagaaacactgggaggcacagcagcctgtatctctgaggaagaggagcgaggacaacgttggcccagatgggggctgaatcattcaactgcctccatctgtggggcagctgctgccttacagcccttcctactagactgagcatcccgaaggagacctaaatcatactttgggtgtggtgacccagatgcacagagctctgcttgaaacaggtacacgggccagggaaatgccagcaa

SEQ ID NO: 2793 - DNA, 600 bp, Homo sapiens; identical to SEQ ID NO: 2792

SEQ ID NO: 2794 - DNA, 600 bp, Homo sapiens
gcggggaccaaaggaggggccgcggtagccggaggacgcccgaccggagccagcgcccggagactgtcgaaggtcaccaaatcagtgaccatcgttgtcctgtccttcttcctgtgttggctgcccaaccaggcgctcaccacctggagcatcctcatcaagttcaacgcggtgcccttcagccaggagtatttcctgtgccaggtatacgcgttccctgtgagcgtgtgcctagcgcactccaacagctgcctcaaccccgtcctctactgcctcgtgcgccgcgagttccgcaaggcgctcaagagcctgctgtggcgcatcgcgtctccttcgatcaccagcatgcgccccttcaccgccactaccaagccggagcacgaggatcaggggctgcaggccccggcgccgccccacgcggccgcggagccggacctgctctactacccacctggcgtcgtggtctacagcggggggcgctacgacctgctgcccagcagctctgcctactgacgcaggcctcaggcccagggcgcgccgtcggggcaaggtggccttccccgggcggtaaagaggtgaaaggatgaaggagggctgggg

SEQ ID NO: 2795 - DNA, 600 bp, Homo sapiens
gccgccttctcccagtgtgaggagtggagcttcttccacgcctactactactgcttcatcacgttgactaccattgggttcggggactacgtggccctgcagaccaagggtgccctgcagaagaagccgctctacgtggcctttagctttatgtatatcctggtggggctgacggtcatcggggccttcctcaacctggtcgtcctcaggttcttgaccatgaacagtgaggatgagcggcgggatgctgaagagagggcatccctcgccggaaaccgcaacagcatggtcattcacatccctgaggagccgcggcccagccggcccaggtacaaggcggacgtcccggacctgcagtctgtgtgctcctgcacctgctaccgctcgcaggactatggcggccgctcggtggcaccgcagaactccttcagcgccaagcttgccccccactacttccactccatctcttacaagatcgaggagatctcaccaagcacattaaaaaacagcctcttcccatcgcctattagctccatctctcctgggttacacagctttaccgaccaccagaggctgatgaaacgccggaagtccgtttag

SEQ ID NO: 2796 - DNA, 600 bp, Homo sapiens; identical to SEQ ID NO: 2795

SEQ ID NO: 2797 - DNA, 600 bp, Homo sapiens
tgggcttcgcgctgccgctgggcgtcatggtagcctgctacgcgcttctgggccgcacgctgctggccgccagggggcccgagcgccggcgtgcgctgcgcgtcgtggtggctctggtggcggccttcgtggtgctgcagctgccctacagcctcgccctgctgctggatactgccgatctactggctgcgcgcgagcggagctgccctgccagcaaacgcaaggatgtcgcactgctggtgaccagcggcttggccctcgcccgctgtggcctcaatcccgttctctacgccttcctgggcctgcgcttccgccaggacctgcggaggctgctacggggtgggagctcgccctcagggcctcaaccccgccgcggctgcccccgccggccccgcctttcttcctgctcagctcccacggagacccacagtctctcctgggacaactagggctgcgaatctagaggagggggcaggctgagggtcgtgggaaaggggagtaggtgggggaacactgagaaagaggcagggacctaaagggactacctctgtgccttgccacattaaattgataacatggaaatgaaaaaaaaaaaaaaaa

SEQ ID NO: 2798 - DNA, 1400 bp, Homo sapiens
cggcatgcctggcttgtttgaccaaagagccctctttccacgagactgaagtctggggaggaggctacagttgcctctccgcctcctccctggccccggcccttccctcacttccatccatctctagacccccccaaggctttctgtgtcgctgccccgggcgggtgtatccctcacagcacctcacgactgtgcctcaaagcctgcatcaataaatgaaaacggtctgcaccgctgcgggcgtgacgctcccggacgcgagtgggtgtggaattgctttcctcgggccaccgtgggggcacctctggcctcccgtgacccccaggccgagggtccccgggcacccaggtcggtcaagtctcggccctctcaggcccgcgtctctgcctggaggagactgtgtagggtccggcgtggggatcagccgggatgggctgcgcgtctccagcctctgcacacacattggcgggtggggtgcagggagggagaggcaggggagagagaatggcatctcgcgtggagggctgtcgtttgaactctcccagcgcgagagaccctgccccgcccccttcctggagcgttgactcccttctcgtctcgaggcctgtggcgtctgggtccgttggggcagaaccatggaggaaaagccttcgaaagtgtcgctcaagtcttccgaccgccaaggctcggacgaggagagcgtgcatagcgacactcgggacctgtggaccacgaccacgctgtcccaggcacagctgaacatgccgctgtccgaggtctgcgagggcttcgacgaggagggccgcaacattagcaagacccgcgggtggcacagcccggggcggggctcgttggacgaggggtacaaggccagccacaagccggaggaactggacgagcacgcgctggtggagctggagttgcaccgcggcagctccatggaaatcaatctgggggagaaggacactgcatcccagatcgaggccgaaaagtcttcctcaatgtcatcactcaatattgcgaagcacatgccccatcgagcctactgggcagagcagcagagcaggctgccactgcccctgatggaactcatggagaatgaagctctggaaatcctcaccaaagccctccggagctaccagttagggatcggcagggaccacttcctgactaaggagctgcagcgatacatcgaagggctcaagaagcgccggagcaagaggctgtacgtgaattaaaaacgccaccttgggctcgagcagcgacccgaaccagccccgtgccagcccggtccccagacccaagcctgaccccatccgagtggaatttgagtcctaaagaaataaaagagtcgatgcatgaaaaaaaaaaaaaaaaaaaaaaaaaaaaaaaaaaaaaaa

SEQ ID NO: 2799 - DNA, 600 bp, Homo sapiens
gactgggatgggaggggaggggagcagtgttgatgccaaaatacccacggggtctaccagccatggggtttgcttgcttaggagtagttgtttcagaggtgattacaggcctgggtttgactgtgcttaccaatgagtggtttttgagctatgagaaagtggatgggagtgggaggaggagagatgggtgaagacaaaagagttctttatgagcctcgatgttccctggtaaacttttaaaaaggccttctctcatgatctaagtcttggactggtggcatcatgtaactgctaaccttacagtaaaaacccaagaatgggtcaaaaatgtcttcccagtttctccaagctgcttctggaatgcaggtctgtcggctgggtgctctccagcagctgctcctgcctgattcaactgtagcctgtaatgggtaaaagccacatttaggaggtggtctgatcatagaacaccttaggaagaaagtccatgagactttctgactaggaaaccatgtggtttgaacttgaagaaaaatgtagacccatctgggttaattttcctacaatctgactcaactgccaggtgaaaaaaaaaaaaaaaaa

SEQ ID NO: 2800 - DNA, 600 bp, Homo sapiens; identical to SEQ ID NO: 2799

SEQ ID NO: 2801 - DNA, 600 bp, Homo sapiens
acattcctctggctcaagtggagagtttctagggtgatggtatggatgctgttgggtgcactgctcttatcctgtggtagtaccgcatctctgatcaatgagtttaagctctattctgtctttaggggaattgaggccaccaggaatgtgactgaacacttcagaaagaagaggagtgagtattatctgatccatgttcttgggactctgtggtacctgcctcccttaattgtgtccctggcctcctactctttgctcatcttctccctggggaggcacacacggcagatgctgcaaaatgggacaagctccagagatccaaccactgaggcccacaagagggccatcagaatcatcctttccttcttctttctcttcttactttactttcttgctttcttaattgcatcatttggtaatttcctaccaaaaaccaagatggctaagatgattggcgaagtaatgacaatgttttatcctgctggccactcatttattctcattctggggaacagtaagctgaagcagacatttgtagtgatgctccggtgtgagtctggtcatctgaagcctggatccaagggacccattttctcttag

SEQ ID NO: 2802 - DNA, 600 bp, Homo sapiens
ttgctcaatatcttgtactgtgtgaagattactaacttccaacactcagtgtttctcctgctgaagcggaatatctccccaaagatccccaggctgctgctggcctgtgtgctgatttctgctttcaccacttgcctgtacatcacgcttagccaggcatcaccttttcctgaacttgtgactacgagaaataacacatcatttaatatcagtgagggcatcttgtctttagtggtttctttggtcttgagctcatctctccagttcatcattaatgtgacttctgcttccttgctaatacactccttgaggagacatatacagaagatgcagaaaaatgccactggtttctggaatccccagacggaagctcatgtaggtgctatgaagctgatggtctatttcctcatcctctacattccatattcagttgctaccctggtccagtatctccccttttatgcagggatggatatggggaccaaatccatttgtctgatttttgccaccctttactctccaggacattctgttctcattattatcacacatcctaaactgaaaacaacagcaaagaagattctttgtttcaaaaaatag

SEQ ID NO: 2803 - DNA, 600 bp, Homo sapiens; identical to SEQ ID NO: 2802

SEQ ID NO: 2804 - DNA, 600 bp, Homo sapiens
ttctggttaaacagcttgcttaccgtgttctactgcatcaaggtctcttctttcacccatcacatctttctctggctgaggtggagaattttgaggttgtttccctggatattactgggttctctgatgattacttgtgtaacaatcatcccttcagctattgggaattacattcaaattcagttactcaccatggagcatctaccaagaaacagcactgtaactgacaaacttgaaaattttcatcagtatcagttccaggctcatacagttgcattggttattcctttcatcctgttcctggcctccaccatctttctcatggcatcactgaccaagcagatacaacatcatagcactggtcactgcaatccaagcatgaaagcgcgcttcactgccctgaggtcccttgccgtcttatttattgtgtttacctcttactttctaaccatactcatcaccattataggtactctatttgataagagatgttggttatgggtctgggaagcttttgtctatgctttcatcttaatgcattccacttcactgatgctgagcagccctacgttgaaaaggattctaaagggaaagtgctag

SEQ ID NO: 2805 - DNA, 600 bp, Homo sapiens
aatcctaaatgtgtggtgactgctttgtagtgaactttcatatactataaactagttgtgagataacattctggtagctcagttaataaaacaatttcagaattaaagaaattttctatgcaaggtttacttctcagatgaacagtaggactttgtagttttatttccactaagtgaaaaaagaactgtgtttttaaactgtaggagaatttaataaatcagcaagggtattttagctaatagaataaaagtgcaacagaagaatttgattagtctatgaaaggttctcttaaaattctatcgaaataatcttcatgcagagatattcagggtttggattagcagtggaataaagagatgggcattgtttcccctataattgtgctgtttttataacttttgtaaatattactttttctggctgtgtttttataacttatccatatgcatgatggaaaaattttaatttgtagccatcttttcccatgtaatagtattgattcatagagaacttaatgttcaaaatttgctttgtggaggcatgtaataagataaacatcatacattataaggtaaccacaattacaaaatggcaaaaca

SEQ ID NO: 2806 - DNA, 600 bp, Homo sapiens; identical to SEQ ID NO: 2805

SEQ ID NO: 2807 - DNA, 1400 bp, Homo sapiens
gagaagatgcaggacagccggcagaaagcagtgcggcccctggagctggcctactgcctgcagaagtgcaacgtgcccttgtttgtccaacatgatgctgcccaactgtacctcaaactctggaacctgattaaggaccagatcactgatgtgcacttggtggagagactgcaggccctgtatacgatccgggtgaaggactccttgatttgcgttgactgtgccatggagagtagcagaaacagcagcatgctcaccctcccactttctctttttgatgtggactcaaagcccctgaagacactggaggacgccctgcactgcttcttccagcccagggagttatcaagcaaaagcaagtgcttctgtgagaactgtgggaagaagacccgtgggaaacaggtcttgaagctgacccatttgccccagaccctgacaatccacctcatgcgattctccatcaggaattcacagacgagaaagatctgccactccctgtacttcccccagagcttggatttcagccagatccttccaatgaagcgagagtcttgtgatgctgaggagcagtctggagggcagtatgagctttttgctgtgattgcgcacgtgggaatggcagactccggtcattactgtgtctacatccggaatgctgtggatggaaaatggtcttgcttcaatgactccaatatttgcttggtgtcctgggaagacatccagtgtacctacggaaatcctaactaccactggcaggaaactgcatatcttctggtttacatgaagatggagtgctaatggaaatgcccaaaaccttcagagattgacacgctgtcattttccatttccgttcctggatctacggagtcttctaagagattttgcaatgaggagaagcattgttttcaaactatataactgaccttatttataattagggatattatcaaaatatgtaaccatgaggcccctcaggtcctgatcagtcagaatggatgctttcaccagcagacccggccatgtggctgctcggtcctgggtgctcgctgctgtgcaagacattagccctttagttatgagcctgtgggaacttcaggggttcccagtggggagagcagtggcagtgggaggcatctgggggccaaaggtcagtggcagggggtatttcagtattatacaactgctgtgaccagacttgtatactggctgaatatcagtgctgtttgtaatttttcactttgagaaccaacattaattccatatgaatcaagtgttttgtaactgctattcatttattcagcaaatatttattgagcatctcttctccataagatagtgtgataaacacggtcatgaataaagttattttccccgaaaaaaaaaaaaaaaaaaaaaaaaaa

SEQ ID NO: 2808 - DNA, 381 bp, Homo sapiens
atgccggagccagcgaagtccgctcccgcgcccaagaagggctcgaagaaagccgtgactaaggcgcagaagaaggacggcaggaagcgcaagcgcagccgcaaggagagctactccgtatacgtgtacaaggtgctgaagcaggtccaccccgacaccggcatctcctctaaggccatgggaatcatgaactccttcgtcaacgacatcttcgaacgcatcgcaggtgaggcttcccgcctgccgcattacaacaagcgctcgaccatcacctccagggagatccagacggccgtgcgcctgctgctgcccggggagttggccaagcacgccgtgtccgagggcaccaaggccgtcaccaagtacaccagcgctaagtaa

SEQ ID NO: 2809 - DNA, 600 bp, Homo sapiens
gcttccctcatctccccacactgggtgctgtctgcggcccactgccaaagccgcttcatgagagtgcgcctgggagagcacaacctgcgcaagcgcgatggcccagagcaactacggaccacgtctcgggtcattccacacccgcgctacgaagcgcgcagccaccgcaacgacatcatgttgctgcgcctagtccagcccgcacgcctgaacccccaggtgcgccccgcggtgctacccacgcgttgcccccacccgggggaggcctgtgtggtgtctggctggggcctggttccactgtcttccccagtgagtctcccagatacgttgcattgtgccaacatcagcattatctcggacacatcttgtgacaagagctacccagggcgcctgacaaacaccatggtgtgtgcaggcgcggagggcagaggcgcagaatcctgtgagggtgactctgggggacccctggtctgtgggggcatcctgcagggcattgtgtcctggggtgacgtcccttgtgacaacaccaccaagcctggtgtctataccaaagtctgccactacttggagtggatcagggaaaccatgaagaggaactga

SEQ ID NO: 2810 - DNA, 600 bp, Homo sapiens; identical to SEQ ID NO: 2809

SEQ ID NO: 2811 - DNA, 600 bp, Homo sapiens
ggaatattgagtacatcgccaagtgcctcaaagaccacaaggccaccagttccaaggggagtgaatggaagaaggtggcgaaagtcatagaccgattcttcatgtggatttttttcattatggtgtttgtgatgactattttgatcatagcaagagcggattagtcacagatattggctttgctatctgggtagaaattaatacaattccctgtgatctattccaatgttcttccaagatttttgttcatctataatttaggggttatgttgtctgtgctttttatttttagcttcaaatgaatgtcgaagctatctgctctgttaaattaagcagaagatccaaaatttcaagggtaggaagatggaagaaatagggaaagagcccttttatagcccaccgtagtggtgggtgactggcctctagtttatataattatttacctctttggcagtacagataacaaaatacactttactggtaaaatttaaaacaaaaaaggcaaaacaaaacaaactcattttccccttagttcccattaaaatatgcatttgaaaaatgaaatagtcatatatatattagtgtgatttaagtctcaat

SEQ ID NO: 2812 - DNA, 1400 bp, Homo sapiens
cccagcgaagccaaacgtccccacagcctccacggcgcccccagcggactcccgggaccgacggaggtcctaccagatgcctgtgcgggatgaggagtcggaatcccagagaaaagctcgctcccgtctcatgcgccagtctcggaggtccacacagggtgtgactcttacagacctgaaggaggcagagaaggctgcagggaaggccccagagtcagagaagccggcgcagagcctggacccttcccgaaggccccgcgtccctggagtggagaactctgacagccctgcccagagagcagaggcgcccgacgggcagggtccgggaccgcaggcggccagggagcaccgcaaggtcggaaaggagtggagggggcctgcggagggggaggaggcggagccggctgaccgcagccaggagtccagcaccctggagggcggcccctcggcccgcaggcagcggtggcagcgggacctcaacccagaacctgagccagaatcggaagagccagacggaggctttaggacgctgtatgcagagctgcgcagggagaacgagcggcttcgcgaggccctgaccgagaccacgctgcggctggcgcagctcaaggtggagctggagcgggccacgcagaggcaagaacgcttcgctgagaggccagccctcctggaactggagagattcgagcgcagggccctggaacgcaaggccgcagagctggaggaggagctgaaggccctgtctgacctccgcgctgacaaccagcgcctcaaggatgagaatgcagcgttgatccgcgtcatcagcaaactctccaagtgacccggagggactttcccgcacccgtatttatacagctgcttctgccacacgcaccccttcccccgtgtgaacacgagtgacagggctccgggggaagtctcagagaagccatagcccccctgggacctccggactgggaggggagcagagtccccaggagccgagggggccacccgaggccaggatggaggtgggaggccgagccaagcagggggacgttgccagaggggaccagggccagagacgggaccaggaaggaactgaggaccaagaagtgcaaggatcagtagccaggaccagagtggccgcctggaggtccccatctcacgtgtgatgccaccccgtcacccctcccctcctgagcagggatccaagaatgtgccaagagtcccgccagcctcagccaggtgggcctgtatatagggtccatgtgcaatagggagggacgtcttctattttttgctgccccctccccgcccactgtctggggcagggggagaaggtattttcgagataaagcacaggcaccacaaataaaagtcgtgaagttgccactcaaaaaaaaaaaaaaaaaaaa

SEQ ID NO: 2813 - DNA, 1400 bp, Homo sapiens
tctctgcattagtgggactgaggagccagagaagaccctgagagctaaccctgagttgtgcggttctctgcacctgaacgggagtccaagtagctgcatagccagtaggccttcctgggtggaagacattggggataacctgtactatggacactaccacgggtttggggacactgctgaaagcatcccagaactgaacagtgtggtcgagcattccaagtccgtgaaggtgcaggagcggtacgacagtgccgtgctgggcaccatgcacctgcaccacggctcctagagacgctgacctggctctcggaaacgcaggagtccttcctggtagccagctcagaatacccatgtagcagcaacttgaacgaatgtcacaacttgtactttttttatatacttcaactttctgaaaaagtaaacttcgacaagttcccagcaactgcttgtttgtgcatgagtagggcttactaagtgcatagatgtttctacagtgaggtgtcctttttataaggtgcacttttggagtttttctgatgccaatctcaacattgtctttttaatactgtcaccagatattgccatttttctttttgttaaaagattatatgatcaagataaattggggtggtaaatcaggtgcctggtaatttatctctttgcacatgggcatcattttaaaaagcttgcttccactcttttctgtagaatttgacggaacacagctatttccctatgcaaggtacagccttacaaagatttctgcagtgatttgtgtgaagaagagaatgtttgtctttttcaatgaagctttgcagatcaccatgtggttgaaggttttagttgtggacacagtggtccctccttaatgatgaagatcactgccttgggcttcatggaaaacaggcccagcctggggctgcgtttggatttattgtttttattccacacttcctacttggtctctggaggttttaccacatgtaacagattcctttatatgtagtgaaaatcactatttgtagaaactgtcaggtcaaaatatttaactgactgttgacatgtattttcttttttccttgttttgttttttggggttttctgctttaagatatataccactatgtatatccagttaactgagagaattttgactctcttaataaaactgcattaagtttttgattttgtagaaattagcttttgtctaggcaactagtggttatactctgcaaatattgtaatgaatttttacttttttgatttttgtaataaaaattggtgcagataaaatgtcaaatgaacaaaccagtgttctaagagtgttactaacattttgttctaaaactgtccttcacaaattgaataaaaaactctcacactcaaaaaaaaaaaaaaaa

SEQ ID NO: 2814 - DNA, 600 bp, Homo sapiens
tgggaaggaccaagcctcagcaccccagggctgcggggctcttgttggccgcacgtggcagtgcagctggagaggaagcctggggcacgtcctgtgcggtgccaccaaggccccacccctgccccttttccttccaggttctgttactcacagaagtgtttctggtgggctctgcgggagaagacactaagggccccacaggcttgtttcatggtgttgcaagccaagctggcccctgcctgttcctgtagctctggggccaggtcagccgtggccccacctaccagaactgtgctctgctggcagctgtgcttttgccaaacccagggcctcagcgaccatgacttctgctaaaaagcaatcatgagtgcgtggctggggacagacctctctgaagtgtctcctgttgtgaggggctcactttggagccactgaagagccgactgtgccacccacttgcgagcctcagtcccttccaagctgcactggtcattgggaattgtgtaaacacctctggggataagctgaggtgactaaatgatatatttatattataagattaaactgactttcttggccttaaaaaaaaaaaaaaaaaaa

SEQ ID NO: 2815 - DNA, 1400 bp, Homo sapiens
ctgtttgtcggggctgagcagctcaccaatcaggacttcctgaaagctggtgacaaggagaacatttttaacgcagaccatttccctctctggtaccgaagagccgctgagcagattccagggagcttcgtctactcgatcccattcagcactggaccagtcaataaaagcaatgtggtgacagcaagtacatccatccagctcctggatgaacggaaatctcctgtggtggcagctgtaggcattcagatgaaacttgaatttttccaaaggaagttctggactgccagcagacagtgtgcttccctggatggcaaatgctccatcagctgtgatgatgagactgtgaattgttacctcatagacaataatggatttattttggtgtctgaagactacacacagactggagacttttttggtgagatcgagggagctgtgatgaacaaattgctaacaatgggctcctttaaaagaattaccctttatgactaccaagccatgtgtagagccaacaaggaaagcagcgatggcgcccatggcctcctggatccttataatgccttcctctctgcagtaaaatggatcatgacagaacttgtcttgttcctggtggaatttaacctctgcagttggtggcactccgatatgacagctaaagcccagaaattgaaacagaccctggagccttgtgatactgaatatccagcattcgtctctgagcgcaccatcaaggagactacagggaatattgcttgtgaagactgctccaagtcctttgtcatccagcaaatcccaagcagcaacctgttcatggtggtggtggacagcagctgcctctgtgaatctgtggcccccatcaccatggcacccattgaaatcaggtataatgaatcccttaagtgtgaacgtctaaaggcccagaagatcagaaggcgcccagaatcttgtcatggcttccatcctgaggagaatgcaagggagtgtgggggtgcgccgagtctccaagcccagacagtcctccttctgctccctctgcttttgatgctcttctcaaggtgacactgactgagatgttctcttggcatgctaaatcatggataaactgtgaaccaaaatatggtgcaacatacgagacatgaatatagtccaaccatcagcatctcatcatgattttaaactgtgcgtgatataaactcttaaagatatgttgacaaaaagttatctttttactttgccagtcatgcaaatgtgagtttgccacatgataatcacccttcatcagaaatgggaccgcaagtggtaggcagtgtcccttctgcttgaaacctattgaaaccaatttaaaactgtgtactttttaaataaagtatattaaaatcataaaaaaaaaaaaaaaa

SEQ ID NO: 2816 - DNA, 600 bp, Homo sapiens
gcagcaaggacctgcaggacgtgtccatcactgtgctcaacgtcactctgaacgactctggcctctacacctgcaatgtgtcccgggagtttgagtttgaggcgcatcggccctttgtgaagacgacgcggctgatccccctaagagtcaccgaggaggctggagaggacttcacctctgtggtctcagaaatcatgatgtacatccttctggtcttcctcaccctgtggctgctcatcgagatgatatattgctacagaaaggtctcaaaagccgaagaggcagcccaagaaaacgcgtctgactaccttgccatcccatctgagaacaaggagaactctgcggtaccagtggaggaatagaacaggagcagtgtgacatgaggtggcctgaacacctgagggactggacatcccatgttcagcaatgtcaatggcatcaggagggcgccccaagggccccatcgcttcccttcatgcatccattgttctgttcattcattcatccatacatccacctgcctctgagctttcacctctgactccctaactccatcagacctctacgcaccataagactctgccagaactgagaagccgg

SEQ ID NO: 2817 - DNA, 600 bp, Homo sapiens; identical to SEQ ID NO: 2816

SEQ ID NO: 2818 - DNA, 600 bp, Homo sapiens
tttttggcttcctggggcccctggtggccgtggccagctgccacagtgccctcctgtgctgggcagcccgacgctgccggccgctgggcacagccattgtggtggggttttttgtctgctgggcaccctaccacctgctggggctggtgctcactgtggcggccccgaactccgcactcctggccagggccctgcgggctgaacccctcatcgtgggccttgccctcgctcacagctgcctcaatcccatgctcttcctgtattttgggagggctcaactccgccggtcactgccagctgcctgtcactgggccctgagggagtcccagggccaggacgaaagtgtggacagcaagaaatccaccagccatgacctggtctcggagatggaggtgtaggctggagagacattgtgggtgtgtatcttcttatctcatttcacaagactggcttcaggcatagctggatccaggagctcaatgatgtcttcattttattccttccttcattcaacagatatccatcatgcacttgctatgtgcaaggcctttttaggcactagagatatagcagtgaccaaaacagacacaaatcctgccc

SEQ ID NO: 2819 - DNA, 600 bp, Homo sapiens
tattagttattctgaatatactaaaaaaatccagctagattgcagtttaataattaaactgtacatactgtgcatataatgaatttttatcttatgtaaattatttttagaacacaagttgggaaatgtggcttctgttcatttcgtttaattaaagctacctcctaaactatagtggctgccagtagcagactgttaaattgtggtttatatactttttgcattgtaaatagtctttgttgtacattgtcagtgtaataaaaacagaatctttgtatatcaaaatcatgtagtttgtataaaatgtgggaaggatttatttacagtgtgttgtaattttgtaaggccaactatttacaagttttaaaaattgctatcatgtatatttacacatctgataaatattaaatcataacttggtaagaaactcctaattaaaaggttttttccaaaattcaggttattgaaaatttttcattttattcatttaaaaactagaataacagatatataaaagtgttaatctttgtgctatatggtatgaaatacaatattgtactcagtgttttgaattattaaagtttctagaaagcaaaaaaa

SEQ ID NO: 2820 - DNA, 600 bp, Homo sapiens
cggcacagctatggtgttcgctttaatggtttccaggctgatgacagtattattcctaccgaaatccgcaaccgtgtcgaagcccatggccatggtgttacccatgaccatgaagattccaatgagagcttgagctcggatgagcgccatggccatggccccagtgggaagcccatgcttcaccatggcgagaagggtgtgcaagaagcaggctgggaccttgatgacaacaatgacaagagcgactgccttgccattaaggagcaattcaagtgtgatactaacagtacctggggccttaatgatgatgagctcatggcccatggccaagagaaggacagtagctcagagtctgaggatagttgccccccaagccctgggtgctccttcactgaagggttctccttcgatctctttaatcctgactacgtcccaaaggtcgacaagtggtcccggttcctcttccctctggcctttgggttgttcaacattgtttactgggtataccatatgtattagtcccccagtgctccagaacagcgggagcactgtgctgtgctcctttcagtttcttttgggtttgtttttccctctttcctt

SEQ ID NO: 2821 - DNA, 1400 bp, Homo sapiens
acctgtgcctctcggcgcttcctctttggggttctgttcgccatctgcttctcttgtctggcggctcacgtctttgccctcaacttcctggcccggaagaaccacgggccccggggctgggtgatcttcactgtggctctgctgctgaccctggtagaggtcatcatcaatacagagtggctgatcatcaccctggttcggggcagtggcgagggcggccctcagggcaacagcagcgcaggctgggccgtggcctccccctgtgccgtcgccaacatggactttgtcatggcactcatctacgtcatgctgctgctgctgggtgccttcctgggggcctggcccgccctgtgtggccgctacaagcgctggcgtaagcatggggtctttgtgctcctcaccacagccacctccgttgccatatgggtggtgtggatcgtcatgtatacttacggcaacaagcagcacaacagtcccacctgggatgaccccacgctggccatcgccctcgccgccaatgcctgggccttcgtcctcttctacgtcatccccgaggtctcccaggtgaccaagtccagcccagagcaaagctaccagggggacatgtaccccacccggggcgtgggctatgagaccatcctgaaagagcagaagggtcagagcatgttcgtggagaacaaggccttttccatggatgagccggttgcagctaagaggccggtgtcaccatacagcgggtacaatgggcagctgctgaccagtgtgtaccagcccactgagatggccctgatgcacaaagttccgtccgaaggagcttacgacatcatcctcccacgggccaccgccaacagccaggtgatgggcagtgccaactcgaccctgcgggctgaagacatgtactcggcccagagccaccaggcggccacaccgccgaaagacggcaagaactctcaggtctttagaaacccctacgtgtgggactgagtcagcggtggcgaggagaggcgggcggatttggggagggccctgaggacctggccccgggcaagggactctccaggctcctcctccccctggcaggccagcaacatgtgccccagatctggaagggcctccctctctgccagtgtttgggtgggtgtcatgggtgtccccacccactcctcagtgtttgtggagtcgaggagccaaccccagcctcctgccaggatcacctcggcggtcacactccagccaaatagtgttctcggggtggtggctgggcagcgcctatgtttctctggagattcctgcaacctcaagagacttcccaggcgctcaggcctggatcttgctcctctgtgaggaacaagggtgcctaataaatacatttctgctttattaaaaaaaaaaaaaaaaaa

SEQ ID NO: 2822 - DNA, 1400 bp, Homo sapiens; identical to SEQ ID NO: 2821

SEQ ID NO: 2823 - DNA, 1400 bp, Homo sapiens
ccttggagagaaaccgttgctagcttgctggtcccgaaagattgcaactttggctgctacagaaaggatagaacctttttggggggagggtggggagggagatatttatttgtgcccagaagcagttatgtatgcttcttgtcttggttactgtacaagatacaaatgactcgagttgtggattgcaagaaactcttttattaaacttggaacaaccatttaaatgaaggattttgtgagatagaattcaattaaagcgatttgaatgcacagtaagtggataatctgagtacaatgaaatttcttaagttttagaacatgagataaagttgtatactctactttcatgttaaaatgttaatcatgattactttaagcccacatccactgagtaaagagtcactttaaactttataaatcaaagagatattaggaacattcagaattatttgtgttttgtttttgttttacattgttgctgcactggcaataagtatgtggcactgtttttatttgtttatgttatttaaatacacacccagacacacacacacacagtttttgctttttctggaaaatctttctttctcttctctctccatgaaaattaaaacacacaagtgaatgaagtaattacatagtccaagattagaaatacaagtaaaatatataggtataggtagatagagtgcctttctgtttcttttcttttcttttttctttttttgttcttccttcctttcttccctcctccccctcatccttccctttctccttcttttcccttttttttttttttttgacctgggagtaataaagttactttttaaatgcacgtatgcaatcttttattcctcttgttttatggataagagatttgttcaggtcaaaagttgcaaaactgttctgaagcttaatattagagacccaagtaagattgtttttagtcttgcttgaggaatgcacactccatttaaaaaattgtgcgctctgtagatttggattttacagcagcaattacttggctaaattagagtactgcaatcttgtaagtagaaaacagccaccatgacaataaacaaaaacacttaaaaatatttttagcttgttttacctacatctagtttcatttcatcttgctttgctttgttgactctgctaccgctgatgtttgccttgtcaatatcagaataggggcatcagtgtcccgtgaaatacattttgttgtgctatgagcctctgtaatcaaatgcttgtactcagaagagagtgtaaaatcagcatttctatgtaacatatatctctaattatctgtgtaattttataacatactttgacaaccccagtgagttacttaataataaagatcttaaaataatgcaaaaaaaaaaaaaaaaaaa

SEQ ID NO: 2824 - DNA, 429 bp, Homo sapiens
atggccacgtctctggattttaaaacttatgtagatcaggcatgtagagctgctgaggagtttgtcaatatttactatgagacaatggataaaagaagacgggcactaaccaggctgtatctggacaaggccaccttaatatggaatggaaatgctgtttcagggctggatgccctaaataatttttttgacacattgccttctagtgagttccaggtcaatatgttagattgccaaccagttcatgagcaagcaactcagtcccaaactacagttcttgttgtgaccagtggaactgtgaagtttgatggaaacaaacaacatttcttcaaccagaacttcctgctgactgctcagtccactcccaacaatactgtgtggaagattgcaagtgattgcttccgttttcaagattggtctagtagttaa

SEQ ID NO: 2825 - DNA, 429 bp, Homo sapiens; identical to SEQ ID NO: 2824

SEQ ID NO: 2826 - DNA, 600 bp, Homo sapiens
acagcatggctgcctcgccctccccaaagaaagatgtgctgagtctctccggtttatcctctgacccagcagacctggacccctgagtcctgccccactttcccactcacctttctccactgggtgccaagtcctagctcctcctcctgggctatattcctgacaaaagttccatatagacaccaaggaggcggaggcgctcctccctgcctcagtggctctgggtacctgcaagcagaacttccaaagagagttaaaagcagcagccccggcaactctggctccaggcagaaggagaggcccggtgcagctgaggttcccgacaccagaagctgttgggagaaagcaatacgtttgtgcagaatctctatgtatattctattttattaaattaattgaatctagtatatgcgggatgtacgacattttgtgactgaagagacttgtttccttctacttttatgtgtctcagaatatttttgaggcgaaggcgtctgtctcttggctattttaacctaaaataacagtctagttatattccctcttcttgcaaagcacaagctgggaccgcgagcacattgcagccccaacggtggccca

SEQ ID NO: 2827 - DNA, 600 bp, Homo sapiens; identical to SEQ ID NO: 2826

SEQ ID NO: 2828 - DNA, 600 bp, Homo sapiens
atctttgagcatcgctacttcaaggccaatgacacgctgggcttcatgcttatgttggctgtgctcatggcagctacccatgctgtctacggcaagctgctcctcttcgagtatcgtcaccgcaagatgaagccagtgcagatggtgccagccatcagccagaactggacattccatggtcccggggccaccggccaggctgctgccaactggatcgccggctttggccgtgggcccatgccaccaaccctgctgggtatccggcagaatgggcatgcagccagccggcggctactgggcatggacgaggtcaagggtgaaaagcagctgggccgcatgttctacgcgatcacactgctctttctgctcctctggtcaccctacatcgtggcctgctactggcgagtgtttgtgaaagcctgtgctgtgccccaccgctacctggccactgctgtttggatgagcttcgcccaggctgccgtcaacccaattgtctgcttcctgctcaacaaggacctcaagaagtgcctgaggactcacgccccctgctggggcacaggaggtgccccggctcccagagaaccctactgtgtcatgtga

SEQ ID NO: 2829 - DNA, 600 bp, Homo sapiens
cccgacggcgcccccggcgcgctgggcttcctgctgctgctggccgtggtggtgggcgccacgcacctcgtctacctccgcctgctcttcttcatccacgaccgccgcaagatgcggcccgcgcgcctggtgcccgccgtcagccacgactggaccttccacggcccgggcgccaccggccaggcggccgccaactggacggcgggcttcggccgcgggcccacgccgcccgcgcttgtgggcatccggcccgcagggccgggccgcggcgcgcgccgcctcctcgtgctggaagaattcaagacggagaagaggctgtgcaagatgttctacgccgtcacgctgctcttcctgctcctctgggggccctacgtcgtggccagctacctgcgggtcctggtgcggcccggcgccgtcccccaggcctacctgacggcctccgtgtggctgaccttcgcgcaggccggcatcaaccccgtcgtgtgcttcctcttcaacagggagctgagggactgcttcagggcccagttcccctgctgccagagcccccggaccacccaggcgacccatccctgcgacctgaaaggcattggtttatga

SEQ ID NO: 2830 - DNA, 600 bp, Homo sapiens; identical to SEQ ID NO: 2829

SEQ ID NO: 2831 - DNA, 600 bp, Homo sapiens
gtcttctattgcaagaagatcacgaccttcgatcgcccggcctacttgtggctgaagcagagggcctataacctgagtctctggtgccttctgggctactttataatcaatttgttacttacagtccaaattggcttaacattctatcatcctccccaaggaaacagcagcattcggtatccctttgaaagctggcagtacctgtatgcatttcagctcaattcaggaagttatttgcctttagtggtgtttcttgtttcctctgggatgctgattgtctctttgtatacacaccacaagaagatgaaggtccattcagctggtaggagggatgtccgggccaaggctcacatcactgcgctgaagtccttgggctgcttcctcttacttcacctggtttatatcatggccagccccttctccatcacctccaagacttatcctcctgatctcaccagtgtcttcatctgggagacactcatggcagcctatccttctcttcattctctcatattgatcatggggattcctagggtgaagcagacttgtcagaagatcctgtggaagacagtgtgtgctcggagatgctggggcccatga

SEQ ID NO: 2832 - DNA, 1400 bp, Homo sapiens
ggacttcaattcagattcttggcttttaaaaggatgtcttctagtaacactgttttttctgacatctttgtttccaaggttcttggttgggtataagaaccttgtatacttaccaacagcctttctgctaagttctgttttttggatatttatgacttggttcatcttattttttcctgatttagcaggagcccctttctatttcagtttcattttcagcatagtagcctttctatactttttctataagacttgggcaactgatccaggcttcactaaggcttctgaagaagaaaagaaagtgaatatcatcacccttgcagaaactggctctctggacttcagaacattttgtacatcatgtcttataaggaagccattaaggtcactccactgccatgtatgcaactgctgtgtggctcgatatgatcaacactgcctgtggactggacggtgcataggttttggcaaccatcactattacatattcttcttgtttttcctttccatggtatgaggctggattatatatggatctttcatctatttgtccagtcattgtgccacaacattcaaagaagatggattatggacttacctcaatcagattgtggcctgttccccttgggttttatatatcttgatgctagcaactttccatttctcatggtcaacatttttattattaaatcaactctttcagattgcctttctgggcctgacctcccatgagagaatcagcctgcagaagcagagcaagcatatgaaacagacgttgtccctcaggaagacaccatacaatcttggattcatgcaggacctggcagatttctttcagtgtggctgctttggcttggtgaagccctgtgtggtagattggacatcacagtacaccatggtctttcacccagccagggagaaggttcttcgctcagtatgaagaaaagcaacccaaaactctcaatctgatttgtttttgtttatgtcgatgccctgtagtttgaaagtgaagtaaagatttagaattcacctaagtccaaaggaaaacacgtggtttttaaagccattaggtaaaaaaagttctcaataaaggcattacaattttttaggtttagaaagatggacttttctgataaatcttggcagacatctaaaaaaaaaaccatatttttcacaagaaaatgcaagttactttttttggaaataatactcactgattatggataaaatggaatattttcagatactatattggctgtttcaaaatagtactattctttaaacttgtaatttttgctaagttatttgtctttgttgtatctataaatatgtaaaaaatatttaaatagatgtacctgttttgctttcacacttaataaaaaattttttttttgtagttg

SEQ ID NO: 2833 - DNA, 1400 bp, Homo sapiens
tacttgctgtttattctgcacattaatgcctgtgtttattactgggcttcaaactatgaaggaattggcactactagatgggtgtatgatggggaaggaaacgagtatctgagatgttattattgggcagttcgaactttaattaccattggtggccttccagaaccacaaactttatttgaaattgtttttcaactcttgaattttttttctggagtttttgtgttctccagtttaattggtcagatgagagatgtgattggagcagctacagccaatcagaactacttccgcgcctgcatggatgacaccattgcctacatgaacaattactccattcctaaacttgtgcaaaagcgagttcggacttggtatgaatatacatgggactctcaaagaatgctagatgagtctgatttgcttaagaccctaccaactacggtccagttagccctcgccattgatgtgaacttcagcatcatcagcaaagtcgacttgttcaagggttgtgatacacagatgatttatgacatgttgctaagattgaaatccgttctctatttgcctggtgactttgtctgcaaaaagggagaaattggcaaggaaatgtatatcatcaagcatggagaagtccaagttcttggaggccctgatggtactaaagttctggttactctgaaagctgggtcggtccttctagcagcaggaggaggaaaccgtcgaactgccaatgtggtggcccacgggtttgccaatcttttaactctagacaaaaagaccctccaagaaattctagtgcattatccagattctgaaaggatcctcatgaagaaagccagagtgcttttaaagcagaaggctaagaccgcagaagcaacccctccaagaaaagatcttgccctcctcttcccaccgaaagaagagacacccaaactgtttaaaactctcctaggaggcacaggaaaagcaagtcttgcaagactactcaaattgaagcgagagcaagcagctcagaagaaagaaaattctgaaggaggagaggaagaaggaaaagaaaatgaagataaacaaaaagaaaatgaagataaacaaaaagaaaatgaagataaaggaaaagaaaatgaagataaagataaaggaagagagccagaagagaagccactggacagacctgaatgtacagcaagtcctattgcagtggaggaagaaccccactcagttagaaggacagttttacccagagggacttctcgtcaatcactcattatcagcatggctccttctgctgagggcggagaagaggttcttactattgaagtcaaagaaaaggctaagcaataaatgtttgattatctttagatgtgatatagctagttcccaaagtgattgtacctaggatt

SEQ ID NO: 2834 - DNA, 600 bp, Homo sapiens
gttttctattgtgccaaggttgccagcgtccgtcacccactcttcatctggttgaagatgaggatatccaagctggtcccatggatgatcctggggtctctgctatatgtatctatgatttgtgttttccatagcaaatatgcagggtttatggtcccatacttcctaaggaaatttttctcccaaaatgccacaattcaaaaagaagatacactggctatacagattttctcttttgttgctgagttctcagtgccattgcttatcttcctttttgctgttttgctcttgattttctctctggggaggcacacccggcaaatgagaaacacagtggccggcagcagggttcctggcaggggtgcacccatcagcgcgttgctgtctatcctgtccttcctgatcctctacttctcccactgcatgataaaagtttttctctcttctctaaagtttcacatcagaaggttcatctttctgttcttcatccttgtgattggtatatacccttctggacactctctcatcttaattttaggaaatcctaaattgaaacaaaatgcaaaaaagttcctcctccacagtaagtgctgtcagtga

SEQ ID NO: 2835 - DNA, 600 bp, Homo sapiens
agagacagacacttttgatgccgcaccgcagcctgccagggaagctgcctttgcatcagactctctaaggactggaaggtcacgatcatctcagagcatttgtaaggcaggagaaagtacagatgccctcagcttgcctcatgtcaaactgaaataagttcttcattttctttccaggcatagcagttctttagccatacatatcattgcatgaactatttcgaaagcccttctaaaaagttgaaattgcaagaatcgggaagaacatgaaaggcagtttataagcccgttaccttttaattgcatgaaaatgcatgtttagggatggctaaaattccaaggtgcatcgacattaacccactcatttagtaatgtaccttgagttaaaaagcctgagaaaccaaacacagctaatgctatggggtgtatgaatatgtcaagtttaggtcatttagaagatttgacactgtattttgaaattatgggagtaaacaccttcaaatttcaggcatttctgctttgtgactaaatacaaactacattttcaagattaggccataatgtatatttaaacacaatggctatcaacagctgctaata

SEQ ID NO: 2836 - DNA, 600 bp, Homo sapiens; identical to SEQ ID NO: 2835

SEQ ID NO: 2837 - DNA, 600 bp, Homo sapiens
tgcatctccctggtggcctccatctgcaacctcctggccatcgccgtcgacaggtacgtcaccatcttttacgcgctccgctaccacagcatcatgaccgtgaggaaggccctcaccttgatcgtggccatctgggtctgctgcggcgtctgtggcgtggtgttcatcgtctactcggagagcaaaatggtcattgtgtgcctcatcaccatgttcttcgccatgatgctcctcatgggcaccctctacgtgcacatgttcctctttgcgcggctgcacgtcaagcgcatagcagcactgccacctgccgacggggtggccccacagcaacactcatgcatgaagggggcagtcaccatcaccattctcctgggcgtgttcatcttctgctgggcccccttcttcctccacctggtcctcatcatcacctgccccaccaacccctactgcatctgctacactgcccacttcaacacctacctggtcctcatcatgtgcaactccgtcatcgacccactcatctacgctttccggagcctggaattgcgcaacacctttagggagattctctgtggctgcaacggcatgaacttgggatag

SEQ ID NO: 2838 - DNA, 600 bp, Homo sapiens; identical to SEQ ID NO: 2837

SEQ ID NO: 2839 - DNA, 600 bp, Homo sapiens
tttgatcgctatgtggccatctgcaacccccttaggtactccgtgatcatgagcaaggctgcctacatgcccatggctgccagctcctgggctattggtggtgctgcttccgtggtacacacatccttggcaattcagctgcccttctgtggagacaatgtcatcaaccacttcacctgtgagattctggctgttctaaagttggcctgtgctgacatttccatcaatgtgatcagcatggaggtgacgaatgtgatcttcctaggagtcccggttctgttcatctctttctcctatgtcttcatcatcaccaccatcctgaggatcccctcagctgaggggaggaaaaaggtcttctccacctgctctgcccacctcaccgtggtgatcgtcttctacgggaccttattcttcatgtatgggaagcctaagtctaaggactccatgggagcagacaaagaggatctttcagacaaactcatcccccttttctatggggtggtgaccccgatgctcaaccccatcatctatagcctgaggaacaaggatgtgaaggctgctgtgaggagactgctgagaccaaaaggcttcactcagtga

SEQ ID NO: 2840 - DNA, 600 bp, Homo sapiens; identical to SEQ ID NO: 2839

SEQ ID NO: 2841 - DNA, 600 bp, Homo sapiens
ctgtatgccctgctcttcttctccgtctatgcccagctctggctggtgcttctgtatgggcacaagcgtctcagctatcagacggtgttcctggccctctgtctgctctgggccgccttgcgtaccaccctcttctccttctacttccgagatactccccgcgccaaccgcctggggcccttgcccttctggcttctctactgctgccccgtctgcctgcagttcttcaccttgacgcttatgaacctctactttgcccaggtggtgttcaaggccaaggtgaagcgtcggccggagatgagccgaggcttgctcgctgtccgaggggcctttgtgggggcctcgctgctctttctgctggtgaacgtgctgtgtgctgtgctctcccatcggcgcgcacagccctgggccctgctgcttgtccgcgtcctggtgagcgactccctgttcgtcatctgcgcgctgtctcttgctgcctgcctctgcctcgtcgccagcgggcgccctccactagcatctacctggaggccaaggtagggctgcagcactgatgcccaggtgtcttttgggtctctcggcagcggttctcagggtgtagag

SEQ ID NO: 2842 - DNA, 600 bp, Homo sapiens
ggctatttgtgtcaatacccgaaatgatgtactggatgacagcaaatgcacacatcaagagaaagttaccattcagaggtgcagtgagttcccttgtccacagtggaaatctggagactggtcagaggtaagatgggagggctgttatttcccctaggtcatctcttacattctagttctggtgctctctatctgtttaagacaaacccttgtgcacctttctcccacctctccctttctcccttgtctcccttgagaaaacaactccagttctctgcctgcaccatgactgtcgtactggatgtaactagtctaccagtgacctcagggcactttgggcttggctagatcactcactgttgtagcttctgttgtgattttgaagttgcagtccatcaccttccctcctctttgagccctagctaagtcactgaaaggaaatcatggatttattaatcataaagctatactagctcacatctgaagtcaacatgaagtttcctacttccttgtctttgaaataagagaattagaccccagggagtgacctctctgacttacccatccaactgcccaaaaaaaaaaaaaaaaaaaaaaaaa

SEQ ID NO: 2843 - DNA, 600 bp, Homo sapiens; identical to SEQ ID NO: 2842

SEQ ID NO: 2844 - DNA, 600 bp, Homo sapiens
ggcgcaccaggttggagagacaattggcatcagtgaagagattatgggcctgaccatcttggctgctgggacctccatccctgatcttatcaccagtgtcatagtggcccggaaggggttaggggacatggctgtgtccagctctgttggaagcaacatttttgacatcactgtagggctcccactgccctggctcctgtacaccgtcattcacagattccagccagtggctgtcagcagcaatggccttttctgtgccatcgtccttctcttcatcatgctgctcttcgtcatcctctctatcgccctctgcaagtggcgaatgaacaaaatcctgggcttcatcatgtttggcctctactttgtgttcctggtggtgagcgttctcctagaagacagaattcttacatgccccgtctccatctagcaggaaaagccatatcttgcaccagcagcatgaatggtccctccacactctgggctctgggctccttgacctcttgagaagaggcagctggcacacagccctgggtgccaagtgtccctccttggtgaatttgaggagagatggattcacactgggcccattcacttcacagg

SEQ ID NO: 2845 - DNA, 1400 bp, Homo sapiens
tcgttatgttgcagttagctggggggtggtggtggctgtgacaggcaccgtgggcaatgtgctcaccctactggccttggccatccagcccaagctccgtacccgattcaacctgctcatagccaacctcacactggctgatctcctctactgcacgctccttcagcccttctctgtggacacctacctccacctgcactggcgcaccggtgccaccttctgcagggtatttgggctcctcctttttgcctccaattctgtctccatcctgaccctctgcctcatcgcactgggacgctacctcctcattgcccaccctaagctttttccccaagttttcagtgccaaggggatagtgctggcactggtgagcacctgggttgtgggcgtggccagctttgctcccctctggcctatttatatcctggtacctgtagtctgcacctgcagctttgaccgcatccgaggccggccttacaccaccatcctcatgggcatctactttgtgcttgggctcagcagtgttggcatcttctattgcctcatccaccgccaggtcaaacgagcagcacaggcactggaccaatacaagttgcgacaggcaagcatccactccaaccatgtggccaggactgatgaggccatgcctggtcgtttccaggagctggacagcaggttagcatcaggaggacccagtgaggggatttcatctgagccagtcagtgctgccaccacccagaccctggaaggggactcatcagaagtgggagaccagatcaacagcaagagagctaagcagatggcagagaaaagccctccagaagcatctgccaaagcccagccaattaaaggagccagaagagctccggattcttcatcggaatttgggaaggtgactcgaatgtgttttgctgtgttcctctgctttgccctgagctacatccccttcttgctgctcaacattctggatgccagagtccaggctccccgggtggtccacatgcttgctgccaacctcacctggctcaatggttgcatcaaccctgtgctctatgcagccatgaaccgccaattccgccaagcatatggctccattttaaaaagagggccccggagtttccataggctccattagaactgtgaccctagtcaccagaattcaggactgtctcctccaggaccaaagtggccaggtaataggagaataggtgaaataacacatgtgggcattttcacaacaatctctccccagcctcccaaatcaagtctctccatcacttgatcaatgtttcagccctagactgcccaaggagtattattaattattaataaatgaattctgtgcttttaaaaaaaaaaaaataaaaaaagaaaaaaaaaaaaaaaaaaaaaaaaaaaaa

SEQ ID NO: 2846 - DNA, 600 bp, Homo sapiens
caaatagcaaaagttgttgcactcctgaaattctattaacatttccgcagaagatgagtagggagatgctgccttcccttttgagatagtgtagaaaaacactagatagtgtgagaggttcctttctgtccattgaaacaaggctaaggatactaccaactactatcaccatgaccattgtactgacaacaattgaatgcagtctccctgcagggcagattatgccaggcactttacatttgttgatcccatttgacattcacaccaaagctctgagttccattttacagctgaagaaattgaagcttagagaaattaagaagcttgtttaagtttacacagctagtaagagttttaaaaatctctgtgcagaagtgttggctgggtgctctccccaccactacccttgtaaacttccaggaagattggttgaaagtctgaataaaagctgtcctttcctaccaatttcctccccctcctcactctcacaagaaaaccaaaagtttctcttcagagttgttgactcatagtacagtaaagggtggaggtgatatggcattctgaaagtagggagggactaagtcagtcgtcatactaaac

SEQ ID NO: 2847 - DNA, 600 bp, Homo sapiens
ttgctcaacatgctaatagccatgataaacaactcctatcaggaaattgaggaggatgcagatgtggaatggaagttcgcccgagcaaaactctggctgtcttactttgatgaaggaagaactctacctgctccttttaatctagtgccaagtcctaaatcattttattatctcataatgagaatcaagatgtgcctcataaaactctgcaaatctaaggccaaaagctgtgaaaatgaccttgaaatgggcatgctgaattccaaattcaagaagactcgctaccaggctggcatgaggaattctgaaaatctgacagcaaataacactttgagcaagcccaccagataccagaaaatcatgaaacggctcataaaaagatacgtcctgaaagcccaggtggacagagaaaatgacgaagtcaatgaaggcgagctgaaggaaatcaagcaagatatctccagcctgcgctatgagcttcttgaggaaaaatctcaagctactggtgagctggcagacctgattcaacaactcagcgagaagtttggaaagaacttaaacaaagaccacctgagggtgaacaagggcaaagacatttag

SEQ ID NO: 2848 - DNA, 600 bp, Homo sapiens; identical to SEQ ID NO: 2847

SEQ ID NO: 2849 - DNA, 1400 bp, Homo sapiens
acgcccagcactgcggcctgacgttcggctcctggactcacggcgggcaccaactggatgtgcggccgcgcggcgctgcagccagcctggcggacttcgtggagaacgtggagtggcgcgtgctgggcatgccggcgcggcggcgcgtgctcacctacggctgctgctccgagccctaccccgacgtcaccttcacgctgctgttgcgccgccgcgccgccgcctacgtgtgcaacctgctgctgccctgcgtgctcatctcgctgcttgcgccgctcgccttccacctgcctgccgactcaggcgagaaggtgtcgctgggcgtcaccgtgctgctggcgctcaccgtcttccagttgctgctggccgagagcatgccaccggccgagagcgtgccgctcatcgggaagtactacatggccactatgaccatggtcacattctcaacagcactcaccatccttatcatgaacctgcattactgtggtcccagtgtccgcccagtgccagcctgggctagggccctcctgctgggacacctggcacggggcctgtgcgtgcgggaaagaggggagccctgtgggcagtccaggccacctgagttatctcctagcccccagtcgcctgaaggaggggctggccccccagcgggcccttgccacgagccacgatgtctgtgccgccaggaagccctactgcaccacgtagccaccattgccaataccttccgcagccaccgagctgcccagcgctgccatgaggactggaagcgcctggcccgtgtgatggaccgcttcttcctggccatcttcttctccatggccctggtcatgagcctcctggtgctggtgcaggccctgtgagggctgggactaagtcacagggatctgctgcagccacagctcctccagaaagggacagccacggccaagtggttgctggtctttgggccagccagtctctccccactgctcctaagatcctgagacacttgacttcacaatccacaagggagcactcattgtctacacaccctaactaaaggaagtccagagcctgccactcccctaattccaaaaaaaagaggaactctacaaaggccaagatcacagagtacagtcttggagggacagaattgtttgtgctgggtattggagctctcagtggggagcacatgggttataatgagaaactgaactgtactgctgcatttcctgtcttccttcctaggtggctgctttgcagggctttggctgttacctttccctgctgaggggctcagggaaaagggtcggggattctcagtcgagtttccagagcaggaggccctacagacatttcgccccaaatccctgactcaataaagtaagcgtgtacctagcaaaaaaaaaaaaaaaaaa

SEQ ID NO: 2850 - DNA, 1400 bp, Homo sapiens
acccggccaacgacacatttgacattgatccgatggtggttactgactgcatccaggtggatccccccgagcggccccctccgccccccagcgacgatctcaccctcttggaaagcagctccagttacaagaacctcacgctcaaattccacaagctggtcaatgtcaccatccacttccggctgaagaccattaacctccagagcctcatcaataatgagatcccggactgctataccttcagcgtcctgatcacgtttgacaacaaagcacacagtgggcggatccccatcagcctggagacccaggcccacatccaggagtgtaagcaccccagtgtcttccagcacggagacaacagcttccggctcctgtttgacgtggtggtcatcctcacctgctccctgtccttcctcctctgcgcccgctcactccttcgaggcttcctgctgcagaacgagtttgtggggttcatgtggcggcagcggggacgggtcatcagcctgtgggagcggctggaatttgtcaatggctggtacatcctgctcgtcaccagcgatgtgctcaccatctcgggcaccatcatgaagatcggcatcgaggccaagaacttggcgagctacgacgtctgcagcatcctcctgggcacctcgacgctgctggtgtgggtgggcgtgatccgctacctgaccttcttccacaactacaatatcctcatcgccacactgcgggtggccctgcccagcgtcatgcgcttctgctgctgcgtggctgtcatctacctgggctactgcttctgtggctggatcgtgctggggccctatcatgtgaagttccgctcactctccatggtgtctgagtgcctgttctcgctcatcaatggggacgacatgtttgtgacgttcgccgccatgcaggcgcagcagggccgcagcagcctggtgtggctcttctcccagctctacctttactccttcatcagcctcttcatctacatggtgctcagcctcttcatcgcgctcatcaccggcgcctacgacaccatcaagcatcccggcggcgcaggcgcagaggagagcgagctgcaggcctacatcgcacagtgccaggacagccccacctccggcaagttccgccgcgggagcggctcggcctgcagccttctctgctgctgcggaagggacccctcggaggagcattcgctgctggtgaattgattcgacctgactgccgttggaccgtaggccctggactgcagagacccccgcccccgaccccgcttatttatttgtagggtttgcttttaaggatcggctccctgtcgcgcccgaggagggcctggacctttcgtgtcggacccttgggggcggggagactgggtggggagggtgttgaataaa

SEQ ID NO: 2851 - DNA, 600 bp, Homo sapiens
tgcaggtggatggagatcaagattagatccccaaggtttattgacttctgttgtctcctctgctgggccccccatgtcttgatgaatgcatctgttcttctattagtgaatggcccactgaatagcaaaaacagtagtgcaaaaaacaattatggatactgttcttacaaagcatcaaagagatttagctcattacatgcagtcttatatttttcccctgattttatgagtttgggcttcatggtctgggccagtggctccatggtcttcttcctctacagacacaagcagcaagtccaacacaatcacagcaacagactctcctgcagaccttcccaggaagccagagccacacacaccatcatggtcctggtgagctccttttttgttttctattcagtccatagttttctgacaatttggacaactgtagttgcaaacccaggccagtggatagtgaccaactctgtgttggtcgcctcatgtttcccagcacgcagcccttttgtcctcatcatgagtgatactcatatctctcagttctgttttgcctgcaggacaaggaaaacactctttcctaatctggttgtcatgccatga

SEQ ID NO: 2852 - DNA, 1400 bp, Homo sapiens
atatggcaatggtagtcagcacgtggcgcgacccccaggacgaggtgcccggctcacagggcagccaggcctcgcaggcgccgcccgtgcccggcccgccgcccggcgccccgcacacgccacagacgcccggccaagggggcccagccagcacgccagcccagacggcggccggtggccagggcggccctggcggcccgggtagcgacaagcagcagcagcagcaacacatcgagtgcgtggtgtgcggagacaagtcgagcggcaagcactacggccagttcacgtgcgagggctgcaagagcttcttcaagcgcagcgtgcggaggaacctgagctacacgtgccgcgccaaccggaactgtcccatcgaccagcaccatcgcaaccagtgccagtactgccgcctcaaaaagtgcctcaaagtgggcatgagacgggaagcggtgcagaggggcaggatgccgccgacccagccgacccacgggcagttcgcgctgaccaacggggatcccctcaactgccactcgtacctgtccggatatatttccctgctgttgcgcgcggagccctatcccacgtcgcgcttcggcagccaatgcatgcagcccaacaacatcatgggtatcgagaacatttgcgaactggccgcgaggatgctcttcagcgccgtcgagtgggcccggaacatccccttcttccccgacctgcagatcacggaccaggtggccctgcttcgcctcacctggagcgagctgtttgtgttgaatgcggcgcagtgctccatgcccctccacgtcgccccgctcctggccgccgccggcctgcatgcttcgcccatgtccgccgaccgggtggtcgcctttatggaccacatacggatcttccaagagcaagtggagaagctcaaggcgctgcacgttgactcagccgagtacagctgcctcaaggccatagtcctgttcacctcagatgcctgtggtctctctgatgtagcccatgtggaaagcttgcaggaaaagtctcagtgtgctttggaagaatacgttaggagccagtaccccaaccagccgacgagattcggaaagcttttgcttcgcctcccttccctccgcaccgtctcctcctcagtcatagagcaattgtttttcgtccgtttggtaggtaaaacccccatcgaaaccctcatccgggatatgttactgtccggcagcagttttaactggccgtatatggcaattcaataaataaataaaataagaagggggagtgaaacagagaaagaaaaggcaaaagactggtttgtttgcttaatttccttctgttaagaaaggatataaaaggatgttacaagtttgctaaaagaagagaggggaagaatttaatggactgtgaatttc

SEQ ID NO: 2853 - DNA, 1400 bp, Homo sapiens; identical to SEQ ID NO: 2852

SEQ ID NO: 2854 - DNA, 1400 bp, Homo sapiens
ggcgggggcgacaccgagggcggcttgtgccggcgctgctactcgcctgcccaggagaacctgtggctggacagcgtctctttaatcatcaaggactccttggagggggagctgaccatcatcgacaacctgtcgggctccatcttccaccactactcctcgcctgccggctgcaagaagtgtcaccacgacaagcaagaggtgcagctggctgagacggaggccttctccctgaactcagacaggtcctcgtccatcctgctgggtgacgacctgagtctcgaggaccccacagcctgcccacctggccgcaaagacagcaagggtgagctggacccacctgagcccatgcgtgtgggagacctgggcgaatgcttcttccccttgtcctctacggccgtctcgccggatccagagaacttcctgtgtgagatggaggagatcccattcaaccctgtccggtcctggctgaaacatgacagcagtcaagcacccccaagtcccttctccccggatgcctccagccctctcctgcccatgccagccgagttcttccaccctgcagtgtctgccagccagaaaggcccagaaaagggcactggcactggaaccctccccaagattgcgctgcagggctcctgggcatctctgcggtcaccaagggtcaactgtaccctcctccggcaggtaccgacacctcccaggccctagagcactggtctgtgggcaaggggcaggatctaagccaggcctggaagtccaagggactgggaggggaaggacccaaccaaaggccgagggcaccaccgtgcaagggggtttgggaacgctggggtgacgctgagactggagggggaggtggcactggggcggatggagtgggcggggctgggtcctggggacagcagagtgtggggaggaccccaaggcgggtctggaagaggcctgtgatccctagcttgaggggaggggaggagaggaggaggagtactggaggttttgcagggtggcggggtgctggcagtggggaggacaccctgggtgctctgggtgggtgtgagtgggggcttgattactaggaatggaggtgggagggcgggtctggtggatgagaagcctcgggctgcagggtcccccgtactggattggccagggccacagccctcctacccacgggcacacagaggtctgaagcactgagggctccgctgtgggggtggggaaatggggccgggccggctcccacagtgagtgcagttgattcactgggtgactgtctgacccgtcacaccaggctgtgtgctctggcgggcaggacacaaactccctgcctgccgggctcactgtttagtgctgagagtgagctgcctgggtgcaggagggatgataaccaaaataaa

SEQ ID NO: 2855 - DNA, 1400 bp, Homo sapiens; identical to SEQ ID NO: 2854

SEQ ID NO: 2856 - DNA, 600 bp, Homo sapiens
gaccccgtgtagctcggggcttggtgccgcccacggctttggccctggggtctgggggccccgctggggtggaggcccaggcagaaccctgcatggaccctgacttgggtcccgtcgtgagcagaaaggcccggggaggatgacggcccaggccctggttctctgcccagcgaagcaggagtagctgccgggccccacgagcctccatccgttctggttcgggtttctccgagttttgctaccagccgaggctgtgcgggcaactgggtcagcctcccgtcaggagagaagccgcgtctgtgggacgaagaccgggcacccgccagagaggggaaggtaccaggttgcgtcctttcaggccccgcgttgttacaggacactcgctgggggccctgtgcccttgccggcggcaggttgcagccaccgcggcccaatgtcaccttcactcacagtctgagttcttgtccgcctgtcacgccctcaccaccctccccttccagccaccaccctttccgttccgctcgggccttcccagaagcgtcctgtgactctgggagaggtgacacctcactaaggggccgaccccatggagtaacgcgc

SEQ ID NO: 2857 - DNA, 600 bp, Homo sapiens; identical to SEQ ID NO: 2856

SEQ ID NO: 2858 - DNA, 600 bp, Homo sapiens
aaagctcaaagtaatgaagaggtggttcaactttctccagatgaggaaactaaggacctcattcatcgtctcttccatcctggggaacatgtgagggactgtctgagtgacctgctgggtcatcccttcttttggacttgggagagccgctataggacgcttcggaatgtgggaaatgaatccgacatcaaaacacgaaaatctgaaagtgagatcctcagactactgcaacctgggccttctgaacattccaaaagttttgacaagtggacgactaagattaatgaatgtgttatgaaaaaaatgaataagttttatgaaaaaagaggcaatttctaccagaacactgtgggtgatctgctaaagttcatccggaatttgggagaacacattgatgaagaaaagcataaaaagatgaaattaaaaattggagacccttccctgtattttcagaagacatttccagatctggtgatctatgtctacacaaaactacagaacacagaatatagaaagcatttcccccaaacccacagtccaaacaaacctcagtgtgatggagctggtggggccagtgggttggccagccctgggtgctga

SEQ ID NO: 2859 - DNA, 600 bp, Homo sapiens; identical to SEQ ID NO: 2858

SEQ ID NO: 2860 - DNA, 600 bp, Homo sapiens
tgtgtgtgtgtgtttttaatattcacactgagacatgtgccttaaacagactttttagtccaaaattacatagcattgaagaatatatttcactgtgccataaacaactgaaagcttgctctgccaaaaggaatcagagaacaagaacttcatttcagatagcaaacgcaggacacaccaagagtgtccgtgcacgtagccggttctggccgtacatgttaagggcatttcagtggcagtgctgtacccctgggcagtgctacctgggcacacacgtagacaagggcagctattccttagaccagcctcctgaaagaaacaggtgtgtctttttagtggagtcgtagtaatatgtgcacacacagaaggggacctgattgggtgggagctggttatgtgtaactagcgttggagttgacattttggcatgtgctctgagcttgaattttgataccaaccattcagtgcatcatacctagtctttctatgctccaaatgaatgtctgtggggacctgagagcacctggaatttgttggaagcagatcagagcacacgtacgaaaaggtgcaattgcttttctcatgacaaaagaaaaaaaa

SEQ ID NO: 2861 - DNA, 1400 bp, Homo sapiens
cttggaaatactggtgtgtgctattcatcccatacctgggaattatacattcacatggacggcccggcttgccttctcctatgccccatccacaaccaccgctgatgtggatattattttatctataccaatgttcttaagactctatctgattgccagagtcatgcttttacatagcaaacttttcactgatgcctcctctagaagcattggagcacttaataagataaacttcaatacacgttttgttatgaagactttaatgactatatgcccaggaactgtactcttggtttttagtatctcattatggataattgccgcatggactgtccgagcttgtgaaaggtaccatgatcaacaggatgttactagcaacttccttggagcgatgtggttgatatcaataacttttctctccattggttatggtgacatggtacctaacacatactgtggaaaaggagtctgcttacttactggaattatgggtgctggttgcacagccctggtggtagctgtagtggcaaggaagctagaacttaccaaagcagaaaaacacgtgcacaatttcatgatggatactcagctgactaaaagagtaaaaaatgcagctgccaatgtactcagggaaacatggctaatttacaaaaatacaaagctagtgaaaaagatagatcatgcaaaagtaagaaaacatcaacgaaaattcctgcaagctattcatcaattaagaagtgtaaaaatggagcagaggaaactgaatgaccaagcaaacactttggtggacttggcaaagacccagaacatcatgtatgatatgatttctgacttaaacgaaaggagtgaagacttcgagaagaggattgttaccctggaaacaaaactagagactttgattggtagcatccacgccctccctgggctcataagccagaccatcaggcagcagcagagagatttcattgaggctcagatggagagctacgacaagcacgtcacttacaatgctgagcggtcccggtcctcgtccaggaggcggcggtcctcttccacagcaccaccaacttcatcagagagtagctagaagagaataagttaaccacaaaataagactttttgccatcatatggtcaatattttagcttttattgtaaagcccctatggttctaatcagcgttatccgggttctgatgtcagaatcctgggaacctgaacactaagttttaggccaaaatgagtgaaaactctttttttttctttcagatgcacagggaatgcacctattattgctatatagattgttcctcctgtaatttcactaactttttattcatgcacttcaaacaaactttactactacattatatgatatataataaaaaaagttaatttcgga

SEQ ID NO: 2862 - DNA, 1400 bp, Homo sapiens
cagctactcgggaggctgaggcaggggaattgcttgaacccgggaggcggagttttgccagcctggcaacagagcaagactctgtctaaaaagaaaaaaaaatttttttgtttgagacagcatcttgctctgtctcccaggctggagcgtagtaatgcaatcatagctcactgcagcctggaactccttggctcaagcaatcctgctgccttggcctcccaagtatgtgggactacaggtactcgccaccacacctggataattaaaaaattatttctgtagagatgaagtctcactgtgttgcccagcctgggtgtcaataattattttttaaaaaaaatttttaaaaaggttttttgagacagattcttgctctgtcacccaggctggagtgcagtagcatgatcagggatcactgcaacctctgcctcctgggttcaagcgattcttgtgcctaagccacctgagcagctgggattgcaggtgcatgccaccatgcctggctaattttggtatttttagtagagatgaggttttgccattttggtcaggctggaattttttttttttttaattttgataagacagggtattgccgtgttggccagactggtctcaaactcctgggctgaaacaatcctcccgccttggcctcccaaagtgctgggattataggcacaagacaccacaataattattgcctgtatgtcaattattattttaaaatattgttgtatttacttaatgtctttaatgcatttgcccaatattttacattgttactgctcagaggtattcctttattatgtggttagcataggttatactttgctgacgattcacattttattagtttggttatgttttgtccttttaaaacattttcttttgagatgggggtcttgctctgttgcccacgcaggagtgcagtggcatgctctcagctcactgcagccctgactgcctaggctccagcaatcttcttacgtcagcctccagagtagctgggaccgcaggcacttgccaccacgccccactaaaaattttttaaattgttgcctttcttgaagtgttctctgcctgtctttgtcacaaaatttcatttttctcatagttaatttcatctctccggtaagattttattggtgtttcttttataactttgcagttcttacaccgtttggtgattttcatgtttcttagaaactttaaacctttaacttcaaacattaaaatacaagtcttttaagtacatgagtgcttagaaatgtacataatgtttatatacacttatgccttacattaaagtccaatatgagaaatacatgtttaacattcaataataattttaaaaatttgagaaataaactctcataaatgcaaaaaaaaaaaaaaaaaaa

SEQ ID NO: 2863 - DNA, 1400 bp, Homo sapiens; identical to SEQ ID NO: 2862

SEQ ID NO: 2864 - DNA, 600 bp, Homo sapiens
ccccgtattcctgaggaaggccttccgctctggggagatggtcaccgtgggcaagagctcggacggcactcctgaccgcaggtggtgcttcagggtgaatgaggtgaactggtctcactggaaccagaacttgggcatcatcaacgaggacccgggcaagaatgagacctaccagtattatggcttctcgcataccgtgggccgcctccgcagggatcgctggtcctcggtggtaccccgcgtggtggaactgaacaagaactcgaacccggacgaggtggtggtgcctctggacagcatggggaacccccgctgcgatggccaccagcagggttacccccgcaagtggaggactgatgacgccccgctctagggactgcagcccagccccagcttctctgcccactcatttctagtccagccgcatttcagcagtgccttctggggtgtccccccacaccctgctttggccccagaggcgagggaccagtggaggtgccagggaggccccaggaccctgtggtcccctggctctgcctccccaccctggggtgggggctcccggccacctgtcttgctcctatggagtcacataagcca

SEQ ID NO: 2865 - DNA, 600 bp, Homo sapiens
accaatggagtatgcttccctcttcattcagaagatacagaaagtattggagcccagatttattcagtggcaatttttcttggtattaatttggccgcatttatcatcatagttttttcctatggaagcatgttttatagtgttcatcaaagtgccataacagcaactgaaatacggaatcaagttaaaaaagagatgatccttgccaaacgttttttctttatagtatttactgatgcattatgctggatacccatttttgtagtgaaatttctttcactgcttcaggtagaaataccaggtaccataacctcttgggtagtgatttttattctgcccattaacagtgctttgaacccaattctctatactctgaccacaagaccatttaaagaaatgattcatcggttttggtataactacagacaaagaaaatctatggacagcaaaggtcagaaaacatatgctccatcattcatctgggtggaaatgtggccactgcaggagatgccacctgagttaatgaagccggaccttttcacatacccctgtgaaatgtcactgatttctcaatcaacgagactcaattcctattcatga

SEQ ID NO: 2866 - DNA, 600 bp, Homo sapiens; identical to SEQ ID NO: 2865

SEQ ID NO: 2867 - DNA, 1400 bp, Homo sapiens
taaacctgcccctgggatctgctttgagagagtcaattctgcaggtgatccttatggcaactgtggcaaagtctcgaagagttcctttgccaaatgcgagatgagagatgctaaatgtggaaaaatccagtgtcaaggaggtgccagccggccagtcattggtaccaatgccgtttccatagaaacaaacatccccctgcagcaaggaggccggattctgtgccgggggacccacgtgtacttgggcgatgacatgccggacccagggcttgtgcttgcaggcacaaagtgtgcagatggaaaaatctgcctgaatcgtcaatgtcaaaatattagtgtctttggggttcacgagtgtgcaatgcagtgccacggcagaggggtgtgcaacaacaggaagaactgccactgcgaggcccactgggcacctcccttctgtgacaagtttggctttggaggaagcacagacagcggccccatccggcaagcagaagcaaggcaggaagctgcagagtccaacagggagcgcggccagggccaggagcccgtgggatcgcaggagcatgcgtctactgcctcactgacactcatctgagccctcccatgacatggagaccgtgaccagtgctgctgcagaggaggtcacgcgtccccaaggcctcctgtgactggcagcattgactctgtggctttgccatcgtttccatgacaacagacacaacacagttctcggggctcaggaggggaagtccagcctaccaggcaggtctgcagaaacagtgcaaggaagggcagcgacttcctggttgagcttctgctaaaacatggacatgcttcagtgctgctcctgagagagtagcaggttaccactctggcaggccccagccctgcagcaaggaggaagaggactcaaaagtctggcctttcactgagcctccacagcagtgggggagaagcaagggttgggcccagtgtcccctttccccagtgacacctccgccttggcagccctgatgactggtctctggctgcaacttaatgctctgatatggcttttagcatttattatatgaaaatagcagggttttagtttttaatttatcagagaccctgccacccattccatctccatccaagcaaactgaatggcattgaaacaaactggagaagaaggtaggagaaagggcggtgaactctggctctttgctgtggacatgcgtgaccagcagtactcaggtttgagggtttgcagaaagccagggaacccacagagtcaccaacccttcatttaacaagtaagaatgttaaaaagtgaaaacaatgtaagagcctaactccatcccccgtggccattactgcataaaaatagagtgcattttgaaataaaaaaaaaaaaaaaa

SEQ ID NO: 2868 - DNA, 600 bp, Homo sapiens
atgggacaccttgtggtccccaaatgatgtgcttagaacacaggtgtcttcctgtggcttctttcaactttagtacttgcttgagcagtaaagaaggcactatttgctcaggaaatggagtttgcagtaatgagctgaagtgtgtgtgtaacagacactggataggttctgattgcaacacttacttccctcacaatgatgatgcaaagactggtatcactctgtctggcaatggtgttgctggcaccaatatcataataggcataattgctggcaccattttagtgctggccctcatattaggaataactgcgtggggttataaaaactatcgagaacagaggtcaaatgggctctctcattcttggagtgaaaggattccagacacaaaacatatttcagacatctgtgaaaatgggcgacctcgaagtaactcttggcaaggtaacctgggaggcaacaaaaagaaaatcagaggcaaaagatttagacctcggtctaattcaactgagtaagtctgaacctctaatggaaaaaggcactccaaggtcctgtgcaaatagtgtcaaaagtaaattaagcagatagtcaaagaactgt

SEQ ID NO: 2869 - DNA, 600 bp, Homo sapiens
agacctgctcagtgccatgttcgacttcagcgagaagctcaactccctggcgcttaccgaggaggagctgggcctcttcaccgcggtggtgcttgtctctgcagaccgctcgggcatggagaattccgcttcggtggagcagctccaggagacgctgctgcgggctcttcgggctctggtgctgaagaaccggcccttggagacttcccgcttcaccaagctgctgctcaagctgccggacctgcggaccctgaacaacatgcattccgagaagctgctgtccttccgggtggacgcccagtgacccgcccggccggccttctgccgctgcccccttgtacagaatcgaactctgcacttctctctcctttacgagacgaaaaggaaaagcaaaccagaatcttatttatattgttataaaatattccaagatgagcctctggccccctgagccttcttgtaaatacctgcctccctcccccatcaccgaacttcccctcctcccctatttaaaccactctgtctcccccacaaccctcccctggccctctgatttgttctgttcctgtctcaaatccaatagttcacagctgagctggg

SEQ ID NO: 2870 - DNA, 1400 bp, Homo sapiens
tttaaaaggtacaatgagaatcaagatgagatcagaaagagggtatttgagatggctaattatgtcaacatgctttataaaaagctcaatactcatgtggccttagttggtatggaaatctggactgacaaggataagataaagataaccccaaatgcaagcttcaccttggagaatttttctaaatggagggggagtgttctctcaagaagaaagcgtcatgatattgctcagttaatcacagcaacagaacttgctggaacgactgtgggtcttgcatttatgtctacaatgtgttctccttattctgttggcgttgttcaggaccacagcgataatcttcttagagttgcagggacaatggcacatgaaatgggccacaactttggaatgtttcatgacgactattcttgcaagtgtccttctacaatatgtgtgatggacaaagcactgagcttctatatacccacagacttcagttcctgcagccgtctcagctatgacaagttttttgaagataaattatcaaattgcctctttaatgctccattgcctacagatatcatatccactccaatttgtgggaaccagttggtggaaatgggagaggactgtgattgtgggacatctgaggaatgtaccaatatttgctgtgatgctaagacatgtaaaatcaaagcaacttttcaatgtgcattaggagaatgttgtgaaaaatgccaatttaaaaaggctgggatggtgtgcagaccagcaaaagatgagtgcgacctgcctgaaatgtgtaatggtaaatctggtaattgtcctgatgatagattccaagtcaatggcttcccttgccatcacgggaagggccactgcttgatgggcacatgccccacactgcgggagcagtgcacagagctgtggggaccaggtaggaggacaaatcctttcccctgtgcatgtgcgaaggaaaatcatttcagatgacagtgtttaaccatggtcaaaagaccattctgtcctatccttcttagaagcttcgaactcaaaatcatggaaaggttttaagatttgaggttggttttagggttgctagatttagcaagtaaaaataaggatggccccgttaaattttaacttaaaattaacaagttttttgttaattttttgttttttgtctcagcatcagtatatcccatgcaatatttgaggtgtgctcatactaaaattatttgtgtatctgaaattcaaattaaactgggtgtctttttcttttcatctggcaaccctactaagatcataaacccttggaaatctgtgtgtgtgcgggtgtgtgtgtgtgtgtgtgtgcaggggtggcagaagtactgtgggatgggacagaaataaaaaaaaaaaaaaaaaaaaaaaaa

SEQ ID NO: 2871 - DNA, 1400 bp, Homo sapiens; identical to SEQ ID NO: 2870

SEQ ID NO: 2872 - DNA, 600 bp, Homo sapiens
catctatccatgaaacccatgggaatacctgacctaggtatgataaatgatggcacctcctgtggagaaggccgggtatgttttaaaaaaaattgcgtcaatagctcagtcctgcagtttgactgtttgcctgagaaatgcaatacccggggtgtttgcaacaacagaaaaaactgccactgcatgtatgggtgggcacctccattctgtgaggaagtggggtatggaggaagcattgacagtgggcctccaggactgctcagaggggcgattccctcgtcaatttgggttgtgtccatcataatgtttcgccttattttattaatcctttcagtggtttttgtgtttttccggcaagtgataggaaaccacttaaaacccaaacaggaaaaaatgccactatccaaagcaaaaactgaacaggaagaatctaaaacaaaaactgtacaggaagaatctaaaacaaaaactggacaggaagaatctgaagcaaaaactggacaggaagaatctaaagcaaaaactggacaggaagaatctaaagcaaacattgaaagtaaacgacccaaagcaaagagtgtcaagaaacaaaaaaagtaa

SEQ ID NO: 2873 - DNA, 600 bp, Homo sapiens; identical to SEQ ID NO: 2872

SEQ ID NO: 2874 - DNA, 600 bp, Homo sapiens
tgagtatttacgtttttgtaaattaatcttttatattgataacaggcactgactagggaaatgatcagtttttttttatacactgtaatgaaccgctgaatatgaagcatttggcatttatttgtgagaaaagtggaatagttttttttttttttttttttttttgccttcaactaaaaacaaaggagataaatttagtatacattgtatctaaattgtgggtctatttctagttattacccagagtttttatgtagcagggaaaatatatatctaaatttagaaatcatttgggttaatatggctcttcataattctaagactaatgctcagaacctaaccactaccttacagtgagggctatacatggtagccagttgaatttatggaatctaccaactgtttagggccctgatttgctgggcagtttttctgtattttataagtatcttcatgtatccctgttactgatagggatacatgtcttagaaaattcactattggctgggagtggtggctcatgcctgtaatcccagcacttggagaggctgaggttgcgccactacactccagcctgggtgacagagtgagatctgcctc

SEQ ID NO: 2875 - DNA, 600 bp, Homo sapiens
aactacattttctttggaagaggccctcaaaggcagaagaagcttgcagaaaagacagccaaggcaaagaatgaccgttcaaagagcgaaagcaaccgggtggatgctcatggaaatattctgttgacatcgctggaagttcacaatgaaatgaatgaggtctcaggcggcattggcgataccaggaattcagcaatatcctttgacaactcaggaatccagtacaggaaacagagcatgcctcgagaagggcatgggcgattcctgggggacagaagcctcccgcacaagaagacccatctacggaggaggtcttcacagctcaaaattaaaatacctgatctaaccgatgtgaatgccatagacagatggtccaggatcgtgtttccattcactttttctcttttcaacttagtttactggctgtactatgttaactgagtgactgtacttgatttttcaaagacttcatttaacactgagtgaaatattactctgcctgtcaagtttttatacctgtacacacacagacacacaagcagacacacacatatatacatacgcaattgtatatatatgtgaacttctcagcatatatat

SEQ ID NO: 2876 - DNA, 1168 bp, Homo sapiens
gagctggaagtgagagcagatccctaaccatgagcaccagccaaccaggggcctgcccatgccagggagctgcaagccgccccgccattctctacgcacttctgagctccagcctcaaggctgtcccccgaccccgtagccgctgcctatgtaggcagcaccggcccgtccagctatgtgcacctcatcgcacctgccgggaggccttggatgttctggccaagacagtggccttcctcaggaacctgccatccttctggcagctgcctccccaggaccagcggcggctgctgcagggttgctggggccccctcttcctgcttgggttggcccaagatgctgtgacctttgaggtggctgaggccccggtgcccagcatactcaagaagattctgctggaggagcccagcagcagtggaggcagtggccaactgccagacagaccccagccctccctggctgcggtgcagtggcttcaatgctgtctggagtccttctggagcctggagcttagccccaaggaatatgcctgcctgaaagggaccatcctcttcaaccccgatgtgccaggcctccaagccgcctcccacattgggcacctgcagcaggaggctcactgggtgctgtgtgaagtcctggaaccctggtgcccagcagcccaaggccgcctgacccgtgtcctcctcacggcctccaccctcaagtccattccgaccagcctgcttggggacctcttctttcgccctatcattggagatgttgacatcgctggccttcttggggacatgcttttgctcaggtgacctgttccagcccaggcagagatcaggtgggcagaggctggcagtgctgattcagcctggccatccccagaggtgacccaatgctcctggaggggcaagcctgtatagacagcacttggctccttaggaacagctcttcactcagccacaccccacattggacttccttggtttggacacagtgctccagctgcctgggaggcttttggtggtccccacagcctctgggccaagactcctgtcccttcttgggatgagaatgaaagcttaggctgcttattggaccagaagtcctatcgactttatacagaactgaattaagttattgatttttgtaataaaaggtatgaaacactaaaaaaaaa

SEQ ID NO: 2877 - DNA, 600 bp, Homo sapiens
aggagccatctttgatcgggtgctgacagagctagtgtccaaaatgcgtgacatgaggatggacaagacagagcttggctgcctgagggcaatcattctgtttaatccagatgccaagggcctctccaaccctagtgaggtggaggtcctgcgggagaaagtgtatgcatcactggagacctactgcaaacagaagtaccctgagcagcagggacggtttgccaagctgctgctacgtcttcctgccctccggtccattggccttaagtgtctagagcatctgtttttcttcaagctcattggtgacacccccatcgacaccttcctcatggagatgcttgaggctccccatcaactggcctgagctcagacccagacgtggtgcttctcacactggaggagcacacatccaagagggactccaagccctggggagggtggggggccatgttcccagaaccttgatggggtgagaagtacagggcagaaccaagaacataaaccctccaagggatctgcttgatatcccaagttggaagggaccccagatacctgtgaggactggttgtctctcttcggtgcccttgagtctctgaattt

SEQ ID NO: 2878 - DNA, 600 bp, Homo sapiens; identical to SEQ ID NO: 2877

SEQ ID NO: 2879 - DNA, 600 bp, Homo sapiens
tacacaaggctccctctgtttcgggactggatcaaagagaacactggggtataggggccggggccacccaaatgtgtacacctgcggggccacccatcgtccaccccagtgtgcacgcctgcaggctggagactggaccgctgactgcaccagcgcccccagaacatacactgtgaactcaatctccagggctccaaatctgcctagaaaacctctcgcttcctcagcctccaaagtggagctgggaggtagaaggggaggacactggtggttctactgacccaactgggggcaaaggtttgaagacacagcctcccccgccagccccaagctgggccgaggcgcgtttgtgtatatctgcctcccctgtctgtaaggagcagcgggaacggagcttcggagcctcctcagtgaaggtggtggggctgccggatctgggctgtggggcccttgggccacgctcttgaggaagcccaggctcggaggaccctggaaaacagacgggtctgagactgaaaatggtttaccagctcccaggtgacttcagtgtgtgtattgtgtaaatgagtaaaacattttatttctttttaaaaaaaaaaa

SEQ ID NO: 2880 - DNA, 600 bp, Homo sapiens
agagtttatagttaaaaaaacaaacagaaacacaaacaatttggatcaaaaggagaaatgataagtgacaaaagcagcacaaggaatttccctgtgtggatgctgagctgtgatggcgggcactgggtacccaagtgaaggttcccgaggacatgagtctgtaggagcaagggcacaaactgcagctgtgagtgcgtgtgtgtgatttggtgtaggtaggtctgtttgccacttgatggggcctgggtttgttcctggggctggaatgctgggtatgctctgtgacaaggctacgctgacaatcagttaaacacaccggagaagaaccatttacatgcaccttatatttctgtgtacacatctattctcaaagctaaagggtatgaaagtgcctgccttgtttatagccacttgtgagtaaaaatttttttgcattttcacaaattatactttatataaggcattccacacctaagaactagttttgggaaatgtagccctgggtttaatgtcaaatcaaggcaaaaggaattaaataatgtacttttggctaaaaaaaaaaaaaaaaaaaaaaaaaaaaaaaaaaaaaaaaaaaaaaaa

SEQ ID NO: 2881 - DNA, 600 bp, Homo sapiens
actgtttttatgtagttcatatatattaccacgacatttaacatcaatattgtatatgttgaaggaggtataataaactcagtcatatatagtgaacagttcaaatgggaaagtgttctaaaacatattatttgaggtttgtcatattcatctttggtttactaaatttacttagaaatatttgaaatgcaaaattgtgtgaaatcaccttatcaaattaaaatgggaagaaagtaattttaataatttttaataatcatatgtcagcattctgactacttaccacatcaaatctgggcccaaacagcctcagttaactgcataattcaggaacaaaaccagcttgctttgttgcacgcctgggcaatttcagccaggacattaggaccacttgttgtacatctgaataattatggaagttgggacatgttaaggaaaacaaatatgttcatcaccaacaatcagctgtcattttattaatctatcccttttgtgcatgcaccatttctctcttactaacagtttcatctgttcacattttccttgattcaaatattaaagttcagaaaaaaaaaaaaaaaaaaaaaaaaaaaaaaaaaa

SEQ ID NO: 2882 - DNA, 600 bp, Homo sapiens
tgctgcgcctcagccatgtacacccccattgaaggctggagctactttgactcactctacttctgttttgtggctttcagcaccattggctttggggacctggtcagcagccagaacgcccactatgagagccaaggcctctatcgctttgccaacttcgtcttcatcctcatgggtgtctgctgcatctactccttgttcaatgtcatctctatcctcatcaaacagtcccttgactggatcctgaggaaaatggacagcgggtgctgcccgcaatgccagagaggactcttgcgatcacgcaggaacgtggtgatgccaggcagcgtccggaaccgctgcaacatctccatagagacagacggggtggcagagagtgacacggacgggcgccggctctcaggggagatgatctccatgaaggacttgctggcagccaacaaggcctcgttggccatcctgcagaagcaactgtctgagatggccaacggctgcccccaccagaccagcacactggcccgggacaatgaattctcagggggggtgggagcctttgcaatcatgaacaacaggttggcagagaccagtggggacaggtag

SEQ ID NO: 2883 - DNA, 1400 bp, Homo sapiens
gtaccaaccacatcagagggaaagaaagtacagaagggtaatgtggttcatctgaattcattgataaccagtggttatactaagaaagtggatatcacatttattccacggaggatttggagtcctgaagccacaacagcagagctgatcaggaagagggaactacggcgagagaggtttacacatgaggtggacttcgacgattttatgatgccttttcagaagaacatcacagagaaagctcgagcactggaagctgccttgaagacctaagtcatagcagttatttcttggggtaaatgctttgaggcccagggaccaatctttggagaaagtagatatttccatcaaagccaaagcaatccatacaccaagaacttgttaccaagaatttctttttgctttaacaactataaatattcttagctgtctagagaaaagatgtatgttattttgaaatgaatggtatgtcattctggataaatccccaagcccctttatgaatgtagtgaaatacatggcatgtgggttataaacgttgctgtcaaaagatttaccaggtctacaccattatgcttattatttttttaattatcctttttatttattaaatagagacagagtctcactatattgccccagctggtctcgaactcttgagctcaggcagtcctcccaacttggccgtcgaaagtgctgggattataggcatgagctactgtgcccagcctgcttattgaagatacatttctagtggaaattgatgaaacaatttaggttttggaaaaagaagtaatatttaatcttttaaggaaggagtttatttctcacatgccattataaactatgtgtattagataccttgggttgaatacacttttaacagccctagatcgatagccctagccctagatagatagccctagccctagatagatagctattaggttggtgcaaaagtaattgtggtttttgccataacctttaattgcagcaaaaactgcaattacttttgctccaacctgacagctaggtatctagctagctagaaaggcagatagacagatatatagatgatagatagatagatagatgatagatagatagatagatgatagatagatagatagatagatagatagatagatagatagatagatagagatttattgcaaataattggtttacataattttgggccccagatggttaagtgctaaatttgtagggtaggctatcaggaagtgcaggctggaaacatgcaggagctgtccctgaagtccacaagtggaatttcttcttcatcatggaaacctcagttttgttcatacacctaaatacttcagtatgtctttcctaaaataaaaggcatccatttacctaaaaaaaaaaaaaaaaaa

SEQ ID NO: 2884 - DNA, 600 bp, Homo sapiens
atcgtggtcatgtacgcccgcatcgcgcgcaagctctgccaggccccgggcccggcccccgggggcgaggaggctgcggacccgcgagcatcgcggcgcagagcgcgcgtggtgcacatgctggtcatggtggcgctgttcttcacgctgtcctggctgccgctctgggcgctgctgctgctcatcgactacgggcagctcagcgcgccgcagctgcacctggtcaccgtctacgccttccccttcgcgcactggctggccttcttcaacagcagcgccaaccccatcatctacggctacttcaacgagaacttccgccgcggcttccaggccgccttccgcgcccgcctctgcccgcgcccgtcggggagccacaaggaggcctactccgagcggcccggcgggcttctgcacaggcgggtcttcgtggtggtgcggcccagcgactccgggctgccctctgagtcgggccctagcagtggggcccccaggcccggccgcctcccgctgcggaatgggcgggtggctcaccacggcttgcccagggaagggcctggctgctcccacctgcccctcaccattccagcctgggatatctga

SEQ ID NO: 2885 - DNA, 600 bp, Homo sapiens
ggccttcatcatctgctggtttccctacttcaccgcgtttgtgtaccgtgggctgagaggggatgatgccatcaatgaggtgttagaagccatcgttctgtggctgggctatgccaactcagccctgaaccccatcctgtatgctgcgctgaacagagacttccgcaccgggtaccaacagctcttctgctgcaggctggccaaccgcaactcccacaaaacttctctgaggtccaacgcctctcagctgtccaggacccaaagccgagaacccaggcaacaggaagagaaacccctgaagctccaggtgtggagtgggacagaagtcacggccccccagggagccacagacaggtaatagccctagccattggtgcacaggatgggggcaatgggaggggatgctactgatgggaatgattaagggagctgctgtttaggtggtgctggtttatgttctaggaactcttcatgagcactttgtaaacaccctcttgcttaatcctcccaacggcccccaaaggtagaacttagctcccttttaaaaggagcacattaaaattctcagaggacttggcaagggccgcacagctggggcat

SEQ ID NO: 2886 - DNA, 600 bp, Homo sapiens
tgcagagcggcgaggcgctgcagaggaagctcccctacgtggccttcagcttcctctacatcctcctggggctcacggtcattggcgccttcctcaacctggtggtcctgcgcttcctcgttgccagcgccgactggcccgagcgcgctgcccgcccccccagcccgcgccccccgggggcgcccgagagccgtggcctctggctgccccgccgcccggcccgctccgtgggctccgcctctgtcttctgccacgtgcacaagctggagaggtgcgcccgcgacaacctgggcttttcgcccccctcgagcccgggggtcgtgcgtggcgggcaggctcccaggcctggggcccggtggaagtccatctgacaaccccacccaggccagggtcgaatctggaatgggagggtctggcttcagctatcagggcaccctccccagggattggaaacggatgacgggcctctaggcggtcttctgcacgagcaagtttctcattactgtctgtggctaagtcccctcccttctttccaaaaatatattacagtcaccccataaaaaaaaaaaaaaaaaaaaaaaaaaaaaaaaaaaaaaaaaa

SEQ ID NO: 2887 - DNA, 600 bp, Homo sapiens; identical to SEQ ID NO: 2886

SEQ ID NO: 2888 - DNA, 600 bp, Homo sapiens
tattcctccggctgacccaaggaaaaatgacaggccaaaacctcctcggcctccaaccggcagaccctcctatcccggagccaaacccaacatctgtgatgggaactttaacactctagctattcttcgtcgtgagatgtttgttttcaaggaccagtggttttggcgagtgagaaacaacagggtgatggatggatacccaatgcaaattacttacttctggcggggcttgcctcctagtatcgatgcagtttatgaaaatagcgacgggaattttgtgttctttaaagtgaagggagacactctatctgtaatccaagatggttggctctacaaataccattggaaatggattctagaacaaaggcagtcagtgcctgtgctctcaagacaaactgaaaagcacaagacctatgaagaattatcttccatcacatactaacaaagaacaatcaggaattgaaaatttaaaataaaaggccatttacaattgcattcgaaaacaccaaataccgagggatcaatctgcaaaaaatgtgcatgacctctacattgaaaacaacaaaacactactaaatgtttgtctttaaaggcagctgg

SEQ ID NO: 2889 - DNA, 600 bp, Homo sapiens; identical to SEQ ID NO: 2888

SEQ ID NO: 2890 - DNA, 600 bp, Homo sapiens
cctcagcagtcccggcctctggcagcacttgccccaaaggtgagtccacgggaagccctcaaggtgaaagctggtaccagagggctccaggggggcaggtgtagagttgagaaaacaaagcaattcatgcttcttgtggtctggactgaacttccagaacaaaagccaagggcaaaacattcatgtttcttggtgcccgcttgactgtggagttttggcttcatgtgaaaggtgattcttagaatcctgagctgtggtggcttcagtcctgcccctgcacctgacctggggagggaccctgagcaagtccctcttgagtctgtttcctcatttgtacagaggctatgatgagcagtagtaccagccccatcaggttgttgtgaagagcaaggaagtgcattagtagaagccacctggcctgcgggaggctgtgtacacttggcccctcctcgtacttcttctgtgtggctgacagtctcagtttgccagtcttgcaatcaggtcagaaagggatgagtgaagaagctggcttgacatgctgtattccacgaggcattgagaaaactatggactgtgctgctgccttaacagggaagggaa

SEQ ID NO: 2891 - DNA, 600 bp, Homo sapiens; identical to SEQ ID NO: 2890

SEQ ID NO: 2892 - DNA, 1400 bp, Homo sapiens
tttggaaaagactaaggagaaacgtatatccctacaaacctcccctccaaacaccttctcacattcttttccacaattcacataacactactgcttttgtgccccttaaatgtagatatgtgctgaaagaaaaaaaaaacgcccaactcttgaagtccattgctgaaaactgcagccaggggttgaaagggatgcagacttgaagagtctgaggaactgaagtgggtcagcaagacctctgaaatcctgggtaaaggattttctccttacaattacaaacagcctctttcacattacaataatataccataggaggcacaagcaccattattaagccactttgcttacaccttaagtgtgtacaattcaagtgtgagaatgctgtgttaactattctttggaattctccttctgtccagcaaatactctaatgatggttaaacatggcacctactcagcaatgccttcctggaccacaacccctatccccctgccccaccctcctcattaaaaacaaatacttctactgtttgggtgtgtgatagggttctcaatgcagatctcccttttctagttagctatattcttgactgcatccgctaaaaatgttaaagcttcttgagagacagacatgccagattttcttggtatctcccataatacgacctacagtccatggtctacagatgttttaaatagaattgctattctcgatacatacaaagacgtaattgctgacccacaatcagtaacatccatattgggagatttttcaaaggatggtgaccctgcttgtatttatttaccttggtattttttcttgcatccttctgtgattcaaaaaagtaaaatgtggctttctgaaatgatggataagagtctacatcttctagaaaaaatacataaaggagtagttaagctctgtaaatgtgccacgagctccaacacgaccatcgtagggtgaagcccacgttttcttccatggcctcaaaggccctagaacttgcctacctttctggccttacctcctagctacttatccatctcttgaactttatactcttgtataaatttctaactttcagaaaatgccatactctgttttggcaccacacatgtatatttccccctggtacacttggaagactcttatccatctgtgaaaccctatgttgtcatcacttggtccatgaaatattacctggccaatatcccaccatcacctcaaacccaatcaccccctcctctgtatgctgtcacacctatattattaaacttatcacattgcattgtaattacttcctgacctttgtatctactcttttagtaactgatgtatatatctgaaaggagagattgtttcattgtgcaatcaataaatgtttgataaaataaagccc

SEQ ID NO: 2893 - DNA, 1400 bp, Homo sapiens
cacgagggtttcgttttcatgctttaccagaaaatccacttccctgccgaccttagtttcaaagcttattcttaattagagacaagaaacctgtttcaacttgaagacaccgtatgaggtgaatggacagccagccaccacaatgaaagaaatcaaaccaggaataacctatgctgaacccacgcctcaatcgtccccaagtgtttcctgacacgcatctttgcttacagtgcatcacaactgaagaatggggttcaacttgacgcttgcaaaattaccaaataacgagctgcacggccaagagagtcacaattcaggcaacaggagcgacgggccaggaaagaacaccacccttcacaatgaatttgacacaattgtcttgccggtgctttatctcattatatttgtggcaagcatcttgctgaatggtttagcagtgtggatcttcttccacattaggaataaaaccagcttcatattctatctcaaaaacatagtggttgcagacctcataatgacgctgacatttccatttcgaatagtccatgatgcaggatttggaccttggtacttcaagtttattctctgcagatacacttcagttttgttttatgcaaacatgtatacttccatcgtgttccttgggctgataagcattgatcgctatctgaaggtggtcaagccatttggggactctcggatgtacagcataaccttcacgaaggttttatctgtttgtgtttgggtgatcatggctgttttgtctttgccaaacatcatcctgacaaatggtcagccaacagaggacaatatccatgactgctcaaaacttaaaagtcctttgggggtcaaatggcatacggcagtcacctatgtgaacagctgcttgtttgtggccgtgctggtgattctgatcggatgttacatagccatatccaggtacatccacaaatccagcaggcaattcataagtcagtcaagccgaaagcgaaaacataaccagagcatcagggttgttgtggctgtgttttttacctgctttctaccatatcacttgtgcagaattccttttacttttagtcacttagacaggcttttagatgaatctgcacaaaaaatcctatattactgcaaagaaattacacttttcttgtctgcgtgtaatgtttgcctggatccaataatttactttttcatgtgtaggtcattttcaagaaggctgttcaaaaaatcaaatatcagaaccaggagtgaaagcatcagatcactgcaaagtgtgagaagatcggaagttcgcatatattatgattacactgatgtgtaggccttttattgtttgttggaatcgatatgtacaaagtgtaaataaatgtttcttttcattatccttaaaaaaaaaa

SEQ ID NO: 2894 - DNA, 1400 bp, Homo sapiens; identical to SEQ ID NO: 2893

SEQ ID NO: 2895 - DNA, 600 bp, Homo sapiens
atatcgcacccatttttcttctggctgaagctaaagatcaacaaggtcatgcttgcgattcttctggggtcctttcttatctctttaattattagtgttccaaagaatgatgatatgtggtatcaccttttcaaagtcagtcatgaagaaaacattacttggaaattcaaagtgagtaaaattccaggtactttcaaacagttaaccctgaacctgggggtgatggttccctttatcctttgcctgatctcatttttcttgttacttttctccctagttagacacaccaagcagattcgactgcatgctacagggttcagagaccccagtacagaggcccacatgagggccataaaggcagtgatcatctttctgctcctcctcatcgtgtactacccagtctttcttgttatgacctctagcgctctgattcctcagggaaaattagtgttgatgattggtgacatagtaactgtcattttcccatcaagccattcattcattctaattatgggaaatagcaagttgagggaagcttttctgaagatgttaagatttgtgaagtgtttccttagaagaagaaagccttttgttccatag

SEQ ID NO: 2896 - DNA, 930 bp, Homo sapiens
atgttcagtcctgcagataacatctttataatcctaataactggagaattcatactaggaatattggggaatggatacattgcactagtcaactggattgactggattaagaagaaaaagatttccacagttgactacatccttaccaatttagttatcgccagaatttgtttgatcagtgtaatggttgtaaatggcattgtaatagtactgaacccagatgtttatacaaaaaataaacaacagatagtcatttttaccttctggacatttgccaactacttaaatatgtggattaccacctgccttaatgtcttctattttctgaagatagccagttcctctcatccactttttctctggctgaagtggaaaattgatatggtggtgcactggatcctgctgggatgctttgccatttccttgttggtcagccttatagcagcaatagtactgagttgtgattataggtttcatgcaattgccaaacataaaagaaacattactgaaatgttccatgtgagtaaaataccatactttgaacccttgactctctttaacctgtttgcaattgtcccatttattgtgtcactgatatcatttttccttttagtaagatctttatggagacataccaagcaaataaaactctatgctaccggcagtagagaccccagcacagaagttcatgtgagagccattaaaactatgacttcatttatcttcttttttttcctatactatatttcttctattttgatgacctttagctatcttatgacaaaatacaagttagctgtggagtttggagagattgcagcaattctctaccccttgggtcactcacttattttaattgttttaaataataaactgaggcagacatttgtcagaatgctgacatgtagaaaaattgcctgcatgatatga

SEQ ID NO: 2897 - DNA, 600 bp, Homo sapiens
ctctggatgaagtggagaattgacagggtgatttcctggattctactggggtgcgtggttctctctgtgtttattagccttccagccactgagaatttgaacgctgatttcaggttttgtgtgaaggcaaagaggaaaacaaacttaacttggagttgcagagtaaataaaactcaacatgcttctaccaagttatttctcaacctggcaacgctgctccccttttgtgtgtgcctaatgtcctttttcctcttgatcctctccctgcggagacatatcaggcgaatgcagctcagtgccacagggtgcagagaccccagcacagaagcccatgtgagagccctgaaagctgtcatttccttccttctcctctttattgcctactatttgtcctttctcattgccacctccagctactttatgccagagacggaattagctgtgatttttggtgagtccatagctctaatctacccctcaagtcattcatttatcctaatactggggaacaataaattaagacatgcatctctaaaggtgatttggaaagtaatgtctattctaaaaggaagaaaattccaacaacataaacaaatctga

SEQ ID NO: 2898 - DNA, 600 bp, Homo sapiens; identical to SEQ ID NO: 2897

SEQ ID NO: 2899 - DNA, 600 bp, Homo sapiens
atcttttatttgctcaaaatagcgagtttctctagccctgcttttctctatttgaagtggagagtaaacaaagtgattctgatgatactgctaggaaccttggtcttcttatttttaaatctgatacaaataaacatgcatataaaagactggctggaccgatatgaaagaaacacaacttggaatttcagtatgagtgactttgaaacattttcagtgtcggtcaaattcactatgactatgttcagtctaacaccatttactgtggccttcatctcttttctcctgttaattttctccctgcagaaacatctccagaaaatgcaactcaattacaaaggacacagagaccccaggaccaaggtccatacaaatgccttgaaaattgtgatctcattccttttattctatgctagtttctttctatgtgttctcatatcatggatttctgagctgtatcagaacacagtgatctacatgctttgtgagacgattggagtcttctctccttcaagccactcctttcttctgattctaggaaacgctaagttaagacaggcctttcttttggtggcagctaaggtatgggctaaacgatga

SEQ ID NO: 2900 - DNA, 600 bp, Homo sapiens; identical to SEQ ID NO: 2899

SEQ ID NO: 2901 - DNA, 600 bp, Homo sapiens
aagatagcaaatttttccaactacatatttctctggttgaagagcagaacaaatatggttcttcccttcatgatagtattcttacttatttcatcgttacttaattttgcatacattgcgaagattcttaatgattataaaacgaagaatgacacagtctgggatctcaacatgtataaaagtgaatactttattaaacagattttgctaaatctgggagtcattttcttctttacactatccctaattacatgtatttttttaatcatttccctttggagacacaacaggcagatgcaatcgaatgtgacaggattgagagactccaacacagaagctcatgtgaaggcaatgaaagttttgatatctttcatcatcctctttatcttgtattttataggcatggccatagaaatatcatgttttactgtgcgagaaaacaaactgctgcttatgtttggaatgacaaccacagccatctatccctggggtcactcatttatcttaattctaggaaacagcaagctaaagcaagcctctttgagggtactgcagcaattgaagtgctgtgagaaaaggaaaaatctcagagtcacatag

SEQ ID NO: 2902 - DNA, 600 bp, Homo sapiens; identical to SEQ ID NO: 2901

SEQ ID NO: 2903 - DNA, 600 bp, Homo sapiens
tttctctacctaaagtggagggttaaaaaggtggttttggtgctgcttcttgtgacttcggtcttcttgtttttaaatattgcactgataaacatccatataaatgccagtatcaatggatacagaagaaacaagacttgcagttctgattcaagtaactttacacgattttccagtcttattgtattaaccagcactgtgttcattttcataccctttactttgtccctggcaatgtttcttctcctcatcttctccatgtggaaacatcgcaagaagatgcagcacactgtcaaaatatccggagacgccagcaccaaagcccacagaggagttaaaagtgtgatcactttcttcctactctatgccattttctctctgtcttttttcatatcagtttggacctctgaaaggttggaggaaaatctaattattctttcccaggtgatgggaatggcttatccttcatgtcactcatgtgttctgattcttggaaacaagaagctgagacaggcctctctgtcagtgctactgtggctgaggtacatgttcaaagatggggagccctcaggtcacaaagaatttagagaatcatcttga

SEQ ID NO: 2904 - DNA, 600 bp, Homo sapiens
aacgtcatgatcgcgctcacctgggcactctccgctgtcatctctctggccccgctgctttttggctggggagagacgtactctgagggcagcgaggagtgccaggtaagccgcgagccttcctacgccgtgttctccaccgtaggcgccttctacctgccgctctgtgtggtgctcttcgtgtactggaagatctacaaggctgccaagttccgcgtgggctccaggaagaccaatagcgtctcacccatatccgaagctgtggaggtgaaggactctgccaaacagccccagatggtgttcacggtccgccacgccaccgtcaccttccagccagaaggggacacgtggcgggagcagaaggagcagcgggccgccctcatggtgggcatcctcattggcgtgttcgtgctctgctggatccccttctttctcaccgagctcatcagtcccctctgctcctgtgacatccccgccatctggaaaagcatcttcctgtggcttggctactccaactccttctttaaccccctgatctatacggctttcaacaagaactacaacagcgccttcaagaacttcttttctaggcaacactga

SEQ ID NO: 2905 - DNA, 600 bp, Homo sapiens; identical to SEQ ID NO: 2904

SEQ ID NO: 2906 - DNA, 600 bp, Homo sapiens
agcaacatgtcacaacaataacctccatagcacctccccttcccaaaccaaacaacccaacaaaaaaaatccctcacttttgttttctgtttattgcttacctggctttttatattgcattttgcaaaagaagaggtctccctcaatcctcccctttagggaaggagtcaacagtgtaactaaatttctctaggaagatggaaagtacttaaataatgtgtgtgtggttttcctttggggacgtggttaacggtccagaagaatcccttctagaaagcattttaggccagccatggtggctcacgtctgtaatcccaggactttgggaggctgaggcaggtggatcacctgaggtcaggagttcgagcccagcctgaccaatatgatgaaaccccgtctctactaaaaatacaaaaattagctgggcatggtggcatgcgcctgtaatcccagctactcaggaggctgagacagaagaatcgcttgaacctgtgaggcagaggttgcagtgagccaagatcgcgccattgcactccagcctggacaacaagagcaaaactgtctcaaaaaaaaaaaaaaaaaaaaaaaaaaaaaaaaaaa

SEQ ID NO: 2907 - DNA, 600 bp, Homo sapiens; identical to SEQ ID NO: 2906

SEQ ID NO: 2908 - DNA, 1400 bp, Homo sapiens
ctggaaagccctcaaggtgttcaagctgcctgtggagttcctgctgctcctcacagtccccgtcgtggacccggacaaggatgaccagaactggaaacggcccctcaactgtctgcatctggttatcagccccctggttgtggtcctgaccctgcagtcggggacctatggtgtctatgagataggcggcctcgttcccgtctgggtcgtggtggtgatcgcaggcacagccttggcttcagtgaccttttttgccacatctgacagccagccccccaggcttcactggctctttgctttcctgggctttctgaccagcgccctgtggatcaacgcggccgccacagaggtggtgaacatcttgcggtccctgggtgtggtcttccggctgagcaacactgtgctggggctcacgctgctggcctgggggaacagcattggagatgccttctcggatttcacactggctcgccagggctacccacggatggcgttctccgcctgctttggcggcatcatcttcaacatcctcgtgggtgtggggctgggctgcctgctccagatctcccgaagccacacagaagtgaagctggagccagacggactgctggtgtgggtcctggcaggcgccctggggctcagcctcgtcttctccctggtctcagtcccattgcagtgcttccagctcagcagagtctatggcttctgcctgctcctcttctacctgaacttccttgtcgtggccctcctcactgaatttggagtgattcacctgaaaagcatgtgactgaagccgcttagtgctgtggcctcactgcaggcaggagccccgcccctcctgccgggggaggcccagggaccggagcatttctgcaaggcccttgtgggcacgagagtgcggcccttgctgctggagatctgaggtcactgctgtgagctgggagaactgctgtgtacctcttgctgccagcacccaacagccttgccgtggggaccttggaaacctggctttgctctggacaaagggttccagagagaagctagaagtcccccttgaatgacccccagagcccctctgagaagggctggagtttgggggaaggggatggctggatgtgctccaggccatgctggaggtacccccgaggcacaggcactgcccgttccccttgcctgggcttcaggccttctggcaccttctcaggacacaagtggctgcccaaccctgactcagagaatgagggtggcttggacccctgggaatcaggccgccgagggctgagctccagagccgcaccatctgccacaaacagaattcgagacatacttaattttgaatttctccttgccacgttaataaagccaaaagcagcgggtgctaaaaaaaaaaaaaaaaaaaa

SEQ ID NO: 2909 - DNA, 1400 bp, Homo sapiens
ttctttccaaacagcataagaagtgattgagccacaagtatactgaaggaagggctccctcgagttgtggtgtgaagagataaatcaccagtcacagactatgcacccgactgctgctgttcagtccagggaaaatgaaagttggagtgctgtggctcatttctttcttcaccttcactgacggccacggtggcttcctggggaaaaatgatgacatcaaaacaaaaaaagaactcattgtgaataagaaaaaacatctaggcccagtcgaagaatatcagctgctgcttcaggtgacctatagagattccaaggagaaaagagatttgagaaattttctgaagctcttgaagcctccattattatggtcacatgggctaattagaattatcagagcaaaggctaccacagactgcaacagcctgaatggagtcctgcagtgtacctgtgaagacagctacacctggtttcctccctcatgccttgatccccagaactgctaccttcacacggctggagcactcccaagctgtgaatgtcatctcaacaacctcagccagagtgtcaatttctgtgagagaacaaagatttggggcactttcaaaattaatgaaaggtttacaaatgaccttttgaattcatcttctgctatatactccaaatatgcaaatggaattgaaattcaacttaaaaaagcatatgaaagaattcaaggttttgagtcggttcaggtcacccaatttcgaatgtcactcttgtcgcccaagttggagtgcaatggcacaatctaggctcactgcaaccctgcaacctctgcctaccgggttcaagagattcccctgcctcagcctcccaagtagctggaattacaggcacctgccaccacatccagctaactttttttgtatttttactagagacagggtttcaccatgttggccacactggtctcaaactcctgacctcaggtgatccgcctgcctcggcccccaaagtgctgggattacaggcatgagccaccacatctggcctaggaccttaaatattggaaagcatcctcaaaactgtgggtcagtgagtagaactacaaaacaatagcagtagggcagaaacttgaaagaaggcaggagatcatggtgacagtggatgggaaaaagtgagggttggggataagggttgcgggttgtcgaagggtggattttctccttcagcaactacaggagatatgatgcctcataattcggagccagaagtggggctttgggtgagatatctttgcacagataacatgtatacatcatagttcaaaacccagtagtcattgtttacagcaaataaagaaatatttagtaaattaaaaaaaaaaaaaaaaaaaaaaaaaaaaaaaaaaaaaaaaaaaa

SEQ ID NO: 2910 - DNA, 600 bp, Homo sapiens
ctgcttggcctgggcctggtagagccaggcacccagtgtggacctagaatggtgtgccagagcaggcgctgcaggaagaatgccttccaggagcttcagcgctgcctgactgcctgccacagccacggggtttgcaatagcaaccataactgccactgtgctccaggctgggctccacccttctgtgacaagccaggctttggtggcagcatggacagtggccctgtgcaggctgaaaaccatgacaccttcctgctggccatgctcctcagcgtcctgctgcctctgctcccaggggccggcctggcctggtgttgctaccgactcccaggagcccatctgcagcgatgcagctggggctgcagaagggaccctgcgtgcagtggccccaaagatggcccacacagggaccaccccctgggcggcgttcaccccatggagttgggccccacagccactggacagccctggcccctggaccctgagaactctcatgagcccagcagccaccctgagaagcctctgccagcagtctcgcctgacccccaagcagatcaagtccagatgccaagatcctgcctctggtgagaggtagctcct

SEQ ID NO: 2911 - DNA, 600 bp, Homo sapiens; identical to SEQ ID NO: 2910

SEQ ID NO: 2912 - DNA, 600 bp, Homo sapiens
ctcccccaggatgcctcacctggctgtggcaacggacaaaactctggcaccatcctcagaacaggaacagcctgaggggctctggccacccctagcctcacctctacatcccctggaagtacaaggactcatctgtggtccctgcttctcctccctccctgaacaccttggctctgttcccaagcagctggacttccagagacatggctcagatcctggatttgcagggagttggggccactgaactccaagataaagacaccatgaggggactgaaggtgggcaaggtgagagttaaggatcttggggaggtggccgggtgcagtggctcgcctgtaatcccagcactttgggaggccgaggcgggcggatcagaccatcctggctaacacggtgaaaccccacctctactaaaattaaaaaagaaaaaaaatagccgggcgtggtggcaggcgcctgtaatcccagctactggggaggctgaggcaggagaatggcatgaacccgggaggtggaggttgcagggagccgaggccgcaccactgcactccagcctgggtgacagagtgagactccaactcaaaaaaaaaaaaaaaaaaa

SEQ ID NO: 2913 - DNA, 600 bp, Homo sapiens; identical to SEQ ID NO: 2912

SEQ ID NO: 2914 - DNA, 600 bp, Homo sapiens
caagtctgcattgaatccgctgatctactactggaggattaagaaattccatgatgcttgcctggacatgatgcctaagtccttcaagtttttgccgcagctccctggtcacacaaagcgacggatacgtcctagtgctgtctatgtgtgtggggaacatcggacggtggtgtgaatattggaactggctgacattttgggtgatgcttgttctttattgacattgaattctctttctcatagcctctccactttatttttttttatagggtttgtgtatgtatgtgtgtgagcagtgtaaagaaagaatggtaattatagttctgttaccaagaataaataataggaaagtgattacaaatattacctccagggttcaatagaaatcctcaatttagggtgaggagacttttttttggttttggggtttttccttgattgattttgttttcatagtgggaatcaggattgtgctttattgagcctgcagttacattgaattgtaggtgtttcgtgtgctgctaaggtatgcttatttgagtttatcaagacttttttttttctggaagacactgctgcttttaccatcacattggagcc

SEQ ID NO: 2915 - DNA, 600 bp, Homo sapiens
tacattgcaatctgcaatcctttaaggtattcagttattctgagcaaggttctatgcaatcaattagcagcctcatgctgggctgctggtttccttaactcagtggtgcatacagtgttgacattctgcctgcccttctgtggcaacaatcagattaattacttcttctgtgacatcccccctttgctgatcttgtcttgtggaaacacttctgtcaatgagttggcactgctatccactggggtcttcattggttggactcctttcctttgtatcgtactttcctacatttgcataatctccaccatcttgaggatccagtcctcagagggaagacgaaaagccttttctacatgtgcctcccacctggccattgtctttctcttttatggcagcgccatctttacatatgtacggcccatctcaacttactcattaaagaaagataggttggtttcagtgttgtacagtgttgttacccccatgctaaaccctataatttacacattgaggaataaggacatcaaagaagctgtcaaaactatagggagcaagtggcagccaccaatttcctctttggatagtaaactcacttattga

SEQ ID NO: 2916 - DNA, 600 bp, Homo sapiens
ctcctcctggtggtgatgtcctatgatctgtacgtggccatctgccaccccctccgatatttggccatcatgacctggagagtctgcatcaccctcgcggtgacttcctggaccactggagtccttttatccttgattcatcttgtgttacttctacctttacccttctgtaggccccagaaaatttatcactttttttgtgaaatcttggctgttctcaaacttgcctgtgcagatacccacatcaatgagaacatggtcttggccggagcaatttctgggctggtgggacccttgtccacaattgtagtttcatatatgtgcatcctctgtgctatccttcagatccaatcaagggaagttcagaggaaagccttccgcacctgcttctcccacctctgtgtgattggactcgtttatggcacagccattatcatgtatgttggacccagatatgggaaccccaaggagcagaagaaatatctcctgctgtttcacagcctctttaatcccatgctcaatccccttatctgtagtcttaggaactcagaagtgaagaatactttgaagagagtgctgggagtagaaagggctttatga

SEQ ID NO: 2917 - DNA, 600 bp, Homo sapiens
ggaacctgaggccatttcactgccagttcctggccggcattcctcccccattgagcatgagctgtaacccggagccctgtgaggcgtggcaggtggagccttggagccagtgctccaggtcctgtggaggtggagttcaggagagaggagtgttctgtccaggaggcctctgtgattggacaaaaagacccacatccaccatgtcttgcaatgagcacctgtgctgtcactgggccactgggaactgggacctgtgttccacttcctgtggaggtggctttcagaagaggattgtccaatgtgtgccctcagagggcaataaaactgaagaccaagaccaatgtctatgtgatcacaaacccagacctccagaattcaaaaaatgcaaccagcaggcctgcaagaaaagtgccgatttactttgcactaaggacaaactgtcagccagtttctgccagacactgaaagccatgaagaaatgttctgtgcccaccgtgagggctgagtgctgcttctcgtgtccccagacacacatcacacacacccaaaggcaaagaaggcaacggttgctccaaaagtcaaaagaactctaagcccaaa

SEQ ID NO: 2918 - DNA, 600 bp, Homo sapiens
tttgaccgttttgttgccatctgcaatcctcttcgctacactgtcatcatgaacccccaggtgtgtattctgttggcagctgcggcctggctcatcagcttcttttacgctctgatgcattctgtcatgactgcacacctgagtttttgtggctctcagaaactcaatcacttcttctacgatgtcaagccgctcttagaattggcctgtagtgacacattactcaatcaatggcttctttccattgtcacaggcagcatatccatgggagctttctttctgactcttctctcctgcttctatgtaattggcttccttctgtttaagaacaggtcctgcagaatactccacaaggctctgtccacttgtgcctcccattttatggtggtatgtcttttctatggacctgtgggcttcacatatattcgtcctgcttcagccacctccatgattcaggaccggataatggccatcatgtatagcgccgtcacccctgtactgaatccactaatctacacccttaggaacaaagaagtgatgatggctctgaagaaaatctttggtaggaagttgtttaaagactggcagcaacaccactag

SEQ ID NO: 2919 - DNA, 600 bp, Homo sapiens
gctgccaccacagctctaaggaagacttcaagtcccaaagctggagacagggacctgaccgggagccagagtcccactccccacagcaaggatgctatccagagggacccatgggaatcatacagcatctggaaccttctgctcacgctgcaggctgtggcaaggacagctagttatactccattctttggtcgtcgtcctcggtagcaagacccctgattttaagctttgcacatgtccacccaaactaaagactacattttccatccaccctagaggctgggtgcagctatatgattaattctgcccaatagggtatacagagacatgtcctgggtgacatgggatgtgactttcgggtgtcggggcagcatgcccttctcccccacttccttactttagcgggctgcaatgccgccgatatgatggctgggagctctggcagccatacggcaccatgaagtagcggcaatgtttgagcggcacatagataggaagagtctggatctctgatgatcacagagccatcctaacaaacggatatcaccgacctccttatgtgagagagaataacatctatgaaatcccaaaaaaaaaaaa

SEQ ID NO: 2920 - DNA, 600 bp, Homo sapiens
acaaacaagaaatgtcttaattatacaccccacgtaaatacgggtttcttacattagaggatgtatttatataattatttgttaaattgtaaaaaaaaaaagtgtaaaatatgtatatatccaaagatatagtgtgtacatttttttgtaaaaagtttagaggcttacccctgtaagaacagatataagtattctattttgtcaataaaatgacttttgataaatgatttaaccattgccctctcccccgcctcttctgagctgtcacctttaaagtgcttgctaaggacgcatggggaaaatggacattttctggcttgtcattctgtacactgaccttaggcatggagaaaattacttgttaaactctagttcttaagttgttagccaagtaaatatcattgttgaactgaaatcaaaattgagtttttgcaccttccccaaagacggtgtttttcatgggagctcttttctgatccatggataacaactctcactttagtggatgtaaatggaacttctgcaaggcagtaattccccttaggccttgttatttatcctgcatggtatcactaaaggtttcaaaaccctgaaaaaaaa

SEQ ID NO: 2921 - DNA, 600 bp, Homo sapiens; identical to SEQ ID NO: 2920

SEQ ID NO: 2922 - DNA, 600 bp, Homo sapiens
tgaggcaggagaatggcatgaacctgggaggcggagcttgcagtgagccgagattgcgccactgcactccagcctgggcagcagagcaacactctgtctcaaaaaaaaaaagaaaagaaaagaaaaagccagaaaaagttggtgcccctgaacccaagagtgatgtacagtctattccatagaatcacagaacaatcctgaaccaggcctgtcacctaccctccctgcagctcaggaaggctgtcagacaggctgggggcctcactctgttttccaggggagaaacctgagtctcagagcaggggagtggcttcccaaggtctcacagcttgtccccaggggccaggcaggctgtctgtctgcttcacatgtccccatcagcctgctgggacacacgggtcctcctgagtcccgtagcctcatttcttacagacggggaaactgaggctcagagcagcaggtgttacccaaggtcacaaggccgaacattttcagaaatctttcagaactcaaagggcatttagaggaagaaggctgaaatcactaacacatatagggcttcctttggtatcaaagtactttacttgggttaatttatta

SEQ ID NO: 2923 - DNA, 600 bp, Homo sapiens; identical to SEQ ID NO: 2922

SEQ ID NO: 2924 - DNA, 600 bp, Homo sapiens
gccgcgccctgaccctgctgagcagcgtgtttggtgcgtgtggcctgctcctggtaggcatcgcggtcagcactgactactggctgtacatggaagaaggcacagtgctaccgcagaaccagaccaccgaggtcaagatggccctgcacgccggcctctggcgagtctgcttctttgcaggtcgggagaaaggtcgctgtgtggcctcagaatattttcttgaaccggagatcaatttggtgacggaaaacacggagaatattctgaagacagtgcgcacggccacccccttccccatggtcagcctcttcctcgtgttcacggccttcgtcatcagcaacatcggccacatccgcccgcagaggaccattctggcttttgtctctggcatcttcttcatactatcgggcctctccttggtggtgggcttggttctttacatctccagcatcaacgacgaggtcatgaacaggcccagcagctctgagcagtattttcattatcgctacgggtggtcttttgccttcgccgcttcctccttcctactcaaagaggtgacgtccgtgggacctagactctagagttctgaatggagagagg

SEQ ID NO: 2925 - DNA, 600 bp, Homo sapiens; identical to SEQ ID NO: 2924

SEQ ID NO: 2926 - DNA, 600 bp, Homo sapiens
ttgcccctgctcctcatacttctggtctactgcagcatgttccgagtggcccgcgtggctgccatgccagacgggccgctgcccacgtggatggagacaccccggcaacgctccgaatctctcagcagccgctccacgatggtcaccagctcgggggccccccagaccaccccacaccggacgtttgggggagggaaagcagcagtggttctcctggctgtggggggacagttcctgctctgttggttgccctacttctctttccacctctatgttgccctgagtgctcagcccatttcaactgggcaggtggagagtgtggtcacctggattggctacttttgcttcacttccaaccctttcttctatggatgtctcaaccggcagatccggggggagctcagcaagcagtttgtctgcttcttcaagccagctccagaggaggagctgaggctgcctagccgggagggctccattgaggagaacttcctgcagttccttcaggggactggctgtccttctgagtcctgggtttcccgacccctacccagccccaagcaggagccacctgctgttgactttcgaatccaggccagatag

SEQ ID NO: 2927 - DNA, 1400 bp, Homo sapiens
aggtgacatcaggatgctcttatgtccttccagaataagcatacacttcactcctctccctttcatctccctctgcattcttaattccttgcttttctcacttggagccgagggtgctttagagaggtggttttccatgaatcagccaagattcctgtagaagttgggtataccaaccaccaccaccaccgccccctattccagtttcaaagctcctcggctatgctaatgtcccctcagagatgaggtttgacttttaggcccgtatgactcctccatagcctggccaaggagaccatgagtagccatgtctggtttactctttatcctgagactgtttatagcttaaaacagaagtgtgtcttcccagcacaaacctaatcaatcagtgtatcagtgcatctggtggcaacagctcagcccattcaaagagcaaggattcaggaaaggcacactgatggtggggagcctcttaagagcctctaatgttctcccaaaaccagagttgagagtcggagtgccagtcgtcggggcccactattcctgaataagggacatgcaagggccagaagtagcttgactctcgcctaaatatctgtgcctttgcctgtcctttctcccactctactgaaacccggaacagattcccgcttgccttctgatgaagagaggttaggtaaagagagtttggaggaaaaaagacaccaggaggcaggctgcggggtaggagagggttctgagaggaggcagcaatccagaatacctccttttctagccagcatcccttgaacttttgaaaggttgtgcctaccactggctggcacaccagggcaatgatttccctgcagaaggaaggaaagaatgtttcacccttgcatccttcttggagaagctacagcctgtgctcagttgagtggttcacactcagactttggctttatggttttccttcctccttgtctttgccctgaccttgatcaacaggggtgaaaagaaccaccctgaggtttccatgcctctcccattttagtggtagcattttgtgtctttactccacccttcaccctagttccaccaaggttcacacaccagatgtaactgtttttcagctgagttgtatggattaacttcagtccactgtaaatacacctgggatggggtggggttggggttgtttagggagaagcagccagacttgctttgtgaactgaatgtatttttatgcaattttgagtggcctttcaaccctaagatgaatggttttgttttactggttgttgttatatagttttgagtattctgtgtttgaaagtttgggaataataatattcacttctatatgatgcctgtaaacacaacagtatttataaatgagtaaataaaactgtgttttaactttg

SEQ ID NO: 2928 - DNA, 600 bp, Homo sapiens
tatgggaacctggcacccagcacagaggcaggtcaggtcttctgtgtcttctatgccctgttgggcatcccgcttaacgtgatcttcctcaaccacctgggcacagggctgcgtgcccatctggccgccattgaaagatgggaggaccgtcccaggcgctcccaggtactgcaagtcctgggcctggctctgttcctgaccctggggacgctggtcattctcatcttcccacccatggtcttcagccatgtggagggctggagcttcagcgagggcttctactttgctttcatcactctcagcaccattggctttggggactatgttgttggcacagaccccagcaagcattatatctcagtgtatcggagcctggcagccatctggatcctcctgggcctggcgtggctggcgctgatcctcccactgggccccctgcttctgcacagatgctgccagctctggctgctcagtctgaggcaaggctgtggagccaaggcggctccaggcaggagacccaggagaggctctacagcagcaagaggagtccaagtcacaccccaggacttccccatatccaagaaaggactgggaagctga

SEQ ID NO: 2929 - DNA, 600 bp, Homo sapiens; identical to SEQ ID NO: 2928

SEQ ID NO: 2930 - DNA, 1400 bp, Homo sapiens
ttaccagccttggggaaaactggtgtgcttgggtctggaaagattcaggtgtcaaagaaaataggacagcggccttgttttgactctcagagaaccttactaatgctgaatggtactaaacaaaaacaagtcgaagggctgccagagttactagacctgaaccttgctaaatgttcctcatcattaaaaaaattgaaaaagaagtcagaaggagaattgtcatgttccaaggagaattgcccctctgtagttaaaaagatgaattttcacaagactaatctaaaaggagaaacagccctgcatagagcttgcataaataaccaagtggagaaattgattcttcttctctctttgccaggaatagacatcaatgttaaagacaatgctggctggacgcctttgcatgaagcctgtaactatggcaacacagtgtgtgtccaggaaattttgcaacgttgtccagaggtagatctgctcactcaagtggacggggtgactcctttgcatgatgcactgtcaaacggacatgtagaaattggcaagctgctactacagcatgggggcccagtgcttttacaacagaggaatgctaagggagaattgcccttggattatgtggtttcacctcaaatcaaagaagaactgtttgctattacaaaaatagaagatacagtggagaactttcatgcacaagcagagaaacattttcattaccagcaacttgaatttggctcctttttacttagtaggatgttgctaaatttttgttcaatttttgatttatcttcagagttcattttagcttccaaagggttaactcatctaaatgaactgcttatggcttgtaaaagtcataaagaaaccaccagtgttcatactgactggttactggatctttatgctggaaatataaagacattgcagaaactcccacacattcttaaggaactgcctgagaatttgaaagtgtgtcctggggtacacactgaggccttgatgataacattggaaatgatgtgtcggtcagtcatggagttttcatgatgatgctagaaagtatggattgactttctaaatctgttcagtttgcattggtacttactgtggacttcatagcttactgacagatagtaatttgatttatttattgacagactttgcagccttgctaaattttaaaagcatttttaaaaaaacttctacaaaactctagtatgggcttctgactttttccagggtgtagaatttgactcaaaagtaaaaataattttgttttagtatattctactttcattaatgtttttttgttctgaaagtgatattatattgtacatgtaaaattaatttaaatattttttcaaataaaaatgtaatgtcctgtaaaaaaaaaaaaaaaaaaa

SEQ ID NO: 2931 - DNA, 600 bp, Homo sapiens
cggttttatcactgcaagataaatatcccatggcccaagatcttggagagaaacagaaagccttgaagatgattctaacctgtgcaggggtattcctaatttgctttgcaccttatcatttcagttttcctttagatttcctggtgaagtccaatgaaattaaaagctgcctagccagaagggtgattctaatatttcattctgtggcattgtgtcttgctagtctgaattcatgtcttgacccagtcatatactacttttccactaatgagttccgaagacggctttcaagacaagatttgcatgacagcatccaactccatgcaaaatcctttgtgagtaaccatacagcttccaccatgacacctgaattatgctaaaacaaaaaaccaaactgaatgtgacctgaaatgcaagtacatcagaacatatctgcaatacccaagccacagggaagaacttgcaaaacaacacagcttttcagttctgctctatcttactgctatggggaattcacttcttcaaagcaggacctatttggagcattacgatccacgattattgatgttgacatgtccatgtagtaatttttcttcaagt

SEQ ID NO: 2932 - DNA, 600 bp, Homo sapiens
gacaggctcggatgaagaaggcgacccggttcatcatggtggtggcaattgtgttcatcacatgctacctgcccagcgtgtctgctagactctatttcctctggacggtgccctcgagtgcctgcgatccctctgtccatggggccctgcacataaccctcagcttcacctacatgaacagcatgctggatcccctggtgtattatttttcaagcccctcctttcccaaattctacaacaagctcaaaatctgcagtctgaaacccaagcagccaggacactcaaaaacacaaaggccggaagagatgccaatttcgaacctcggtcgcaggagttgcatcagtgtggcaaatagtttccaaagccagtctgatgggcaatgggatccccacattgttgagtggcactgaacaagcagaccaacaacactgaggaagatagagtggtgacttagaattaactcgtgctaaggggtcgggggctttgaaaatgccacccccctttcttattgcaagacggcttctcgcacatgaactgcatccttctcattctgtcggaaatgaaattcacacaactataccttttggggaggttccagtt

SEQ ID NO: 2933 - DNA, 600 bp, Homo sapiens
attgtttatcttggtcttttggattttgaaaagaaaactttcctccctcaatagtgaagtgtcaaccatccagaacacaaggatgctggctttcaaagcaacagctcagctcttcatcctgggctgcacatggtgtctgggcttgctacaggtgggtccagctgcccaggtcatggcctacctcttcaccatcatcaacagcctccaaggcttcttcatcttcttggtctactgcctcctcagccagcaggtccagaaacaatatcaaaagtggtttagagagatcgtaaaatcaaaatctgagtctgagacatacacactttccagcaagatgggtcctgactcaaaacccagtgagggggatgtttttccaggacaagtgaagagaaaatattaaaactagaatattcaactccatatggaaaatcatatccatggatctctttggcattatgaagaatgaagctaaggaaaagggaattcattaaacatatcatccttggagaggaagtaatcaacctttacttcccaagctgtttgttctccacaataggctctcaacaaatgtgtggtaaattgcatttctcttcaaaaaaaaaa

SEQ ID NO: 2934 - DNA, 600 bp, Homo sapiens; identical to SEQ ID NO: 2933

SEQ ID NO: 2935 - DNA, 1396 bp, Homo sapiens
tgactatccagctctgagagacgggagtttggagttgcccgctttactttggttgggttggggggggcggcgggctgttttgttccttttcttttttaagagttgggttttcttttttaattatccaaacagtgggcagcttcctcccccacacccaagtatttgcacaatatttgtgcggggtatgggggtgggtttttaaatctcgtttctcttggacaagcacagggatctcgttctcctcattttttgggggtgtgtggggacttctcaggtcgtgtccccagccttctctgcagtcccttctgccctgccgggcccgtcgggaggcgccatggctcggatgaaccgcccggccccggtggaggtgagctacaaacacatgcgcttcctcatcacccacaaccccaccaacgccacgctcagcaccttcattgaggacctgaagaagtacggggctaccactgtggtgcgtgtgtgtgaagtgacctatgacaaaacgccgctggagaaggatggcatcaccgttgtggactggccgtttgacgatggggcgcccccgcccggcaaggtagtggaagactggctgagcctggtgaaggccaagttctgtgaggcccccggcagctgcgtggctgtgcactgcgtggcgggcctgggccgggctccagtccttgtggcgctggcgcttattgagagcgggatgaagtacgaggacgccatccagttcatccgccagaagcgccgcggagccatcaacagcaagcagctcacctacctggagaaataccggcccaaacagaggctgcggttcaaagacccacacacgcacaagacccggtgctgcgttatgtagctcaggaccttggctgggcctggtcgtcatgtaggtcaggaccttggctggacctggaggccctgcccagccctgctctgcccagcccagcaggggctccaggccttggctggccccacatcgccttttcctccccgacacctccgtgcacttgtgtccgaggagcgaggagcccctcgggccctgggtggcctctgggccctttctcctgtctccgccactccctctggcggcgctggccgtggctctgtctctctgaggtgggtcgggcgccctctgcccgccccctcccacaccagccaggctggtctcctctagcctgtttgttgtggggtgggggtatattttgtaaccactgggcccccagcccctcttttgcgaccccttgtcctgacctgttctcggcaccttaaattattagaccccggggcagtcaggtgctccggacacccgaaggcaataaaacaggagccgtgaaaaaaaaaaaaaaaaaaaaaaaaaaaaaaaaaaaaaaaaaaaaaaaaaaaaaaaaaaaaaaaa

SEQ ID NO: 2936 - DNA, 600 bp, Homo sapiens
tcgtctattgggagaaggaagtcattgccttcagtgacgcggccgaggctgcgtgtaaagatgtataatttcctcaggtcattgccaaccttacatgaacgctttaggctactggaaacctctccgagtactgaggaaatcacactctctgaaagtgacaatgcaaaggaaagcatctagacagtaaaacttacctgttgtggtctttttaatcacctcgtttgagttttatctgtttctctcctttatttcccagtcctctcagaaagtcttcctcaatgtattttgctcaggattaagaattagataaaacctgttgtttattattattcggcataatggacttggtagtttttctatttttcaatagatttgtacttgaataaggtgaagaatttcacacaacatacaagagtaccattgttccttatatcgttaaatctttgtgacacactttgacaaaaatgtagaacctataacaaattcttttacaagttactataaaggacacaaagagaaaactttaccttccagaacaaaatgactcctgatgaacagtgtgtggggatttgcttgtatgtattaaacttttgacctctg

SEQ ID NO: 2937 - DNA, 600 bp, Homo sapiens; identical to SEQ ID NO: 2936

SEQ ID NO: 2938 - DNA, 600 bp, Homo sapiens
cgagtagggggctccccagtgcggcatctatactccaagcgactagaccggagtgtctcctaccagctgagccccctggacagcaccaccccccacaccctggtccacgacaaggcccaccacaccctggctgacctgaagcgccagcgagctgctgccaagctgcagcgacccccacctgaggggcccgagagccctgagacagctgagcctggcctgcctggtgacacggtgaccccccagcctgactgtggcttcagggcaggcggggacccacccctgctcaagctcacagccccggcggtggaggctcccgtggagaggaggccgtgctgcctgctcatgtgaggctgttgctcagcatgcaggggccctgtcgcgggcacagcccaaggctgcctccccacggtgcgtgccctggtgctgcgggtgcagcacggaaaccccggcttctactgtacaggacactggcccctctcaggtcagaagacatgcctggagggatgtctggctgcaaagactatttttatcctgcaactcttgataaagggctgttttgccatggaaaaaaaaaaaaaaaaaaaaaaaaaaaaaaaaaaa

SEQ ID NO: 2939 - DNA, 600 bp, Homo sapiens; identical to SEQ ID NO: 2938

SEQ ID NO: 2940 - DNA, 600 bp, Homo sapiens
ctgccgaggctgacttcctacttggtctggccactgtcccaggctatgtatcctttcggcatgtggaggaaggcagctggtatattcagtctctgtgtaatcatctgaagaaattggtcccaaggatgctgaaatttctggaaaagacaatggaaatcaggggcaggaagagaacagtgtggggtgctaaacagatctcagcaacctccctgcccacggccatctctgcgcagacacctcgaccccccatgcgcaggtggagcagcgtttcctagttctttccagaggcttccttctgcctgccttccagccacatcgcctgagattgacaacgccctacagcaagacggaaacctccctttacagcaccaccttgcgattctgcagccacaaagttgagacttctgaacgtggcactcttctgttcccttactgtttcacgtgtacctgtgtcatctttcttgtttcatcgtaaacatacttctaaaattcccattttctttatttagaaatagaactacaagcggatggttaaacaatttaaacaaatggtccatggggaaaagtgaatttcacacttgtccccccaaacttcaagtg

SEQ ID NO: 2941 - DNA, 600 bp, Homo sapiens; identical to SEQ ID NO: 2940

SEQ ID NO: 2942 - DNA, 600 bp, Homo sapiens
gcagtagactgcagtggacagtccccaccttgttactgctactacactttgctcctctggcccaaggcatgaggagagaggctgtgtcagaaactgaagctgttctcaggatcactgggctcttcttggcagaggggatgtctggcttgcctgaagggagtggctctgtaaggacgccttgatgctttcttcattaagattttgagcatttttacgtacttgagcttttttttttttttttttcaatttctagaggaactttttctctgttaattcctggaactgtattttgaatccttaaaggtgagccctcatagggagatccaaagtcctgtggttaacgccttcatttatagatgaggcagctgaggcctggggatgtgaacaacctgctcacagtcctcatttactggatttgacttcagccaggtgaactggaatgccttggggcgtggaagggcattaggagtgtttcatttgatatgtgaatgctcataaaaaaatgtcaaggaatgaagaacaacaactctcagtggtgcctgcatttataattatttatgtgaaagtcaaattcatgtacagtaaatttgttataagaat

SEQ ID NO: 2943 - DNA, 600 bp, Homo sapiens
ctgcttcatatctctcccttctttaccttcatttcatcctgttggctgctgccaccaaatctgtctagaatcctgctttacaggatcatgtaaatgctcaaagatgtaatgtagttctttgttcctgctttctctttcagtattaaactctcctttgatattatgtggcttttatttcagtgccatacatgttattgttttcaacctagaaacctttatccctgcttatctgaaacttcccaacttccctgatctttaagacttttttttttttttttttttttttgagacagagtctcgctctgtcgcccaggctggagggcagtggcacgatctcagctcactgcaagctccaactcccgggttcacgccattctcctgcctcagccttccaagtagctgggactacaggtgcccgccaccgtgcccggctaatttttttgtatttttagtagagacagggtttcaccatgttagccgggatggtcttgatctcctgacctcatgatccacccacctcagcctcccaaagtgttgggattacaggcgtgagccactgcgcccgggcaagacctttttttaaaaaaaaaaaaaaaaaaa

SEQ ID NO: 2944 - DNA, 600 bp, Homo sapiens; identical to SEQ ID NO: 2943

SEQ ID NO: 2945 - DNA, 1394 bp, Homo sapiens
ccgagggcggggccgggcccgggagcctgtggcttcaggaagaggagggcaaggtgtctggctgcgcgtttggctgcaatgagctcggcctcggggctccgcagggggcacccggcagtgtcaactgttagccacgcagatgccgattgctttgtgtgtgtcttcctgagccatggcgaaggcaatcacatttatgcatatgatgctaaaatcgaaattcagacattaactggcttgttcaaaggagacaagtgtcacagcctggttggaaaacccaagatatttatcattcaggcatgtcggggaaaccagcacgatgtgccagtcattcctttggatgtagtagataatcagacagagaagttggacaccaacataactgaggtggatgcagcctccgtttacacgctgcctgctggagctgacttcctcatgtgttactctgttgcagaaggatattattctcaccgggaaactgtgaacggctcatggtacattcaagatttgtgtgagatgttgggaaaatatggctcctccttagagttcacagaactcctcacactggtgaacaggaaagtttctcagcgccgagtggacttttgcaaagacccaagtgcaattggaaagaagcaggttccctgttttgcctcaatgctaactaaaaagctgcatttctttccaaaatctaattaattaatagaggctatctaattccacactctgtattgaaaatggctttctcagccaggcgtggttactcacacctgtaatcccagcactttgggagtccaaggtgggcggatcacctgaggtcgggagttcgagaccagcctgaccaacatggagaagccccgtctctactaaaaatgcaaaaaaaaatttagctaggcatggcggcgcatgcctgcaatcccagctacttggaaggctgaggcaggagaatcacttgaacccaggaggtggaggctgcggtgagccgagattgcgccattgcactccagcctgggcaacgagtgaaactccgtctcaaaaaaaagaaaatgtctttctcttccttttatataaatatcgttagggtgaagcattatggtctaatgattcaaatgttttaaagtttaatgcctagcagagaactgccttaaaaaaaaaaaaaaaaagttcatgttggccatggtgaaagggtttgatatggagaaacaaaatcctcaggaaattagataaataaaaatttataagcatttgtattattttttaataaactgcagggttacacaaaaatctagctgatttaacttgtattttgtcacttttttataaaagtttattgtttgatgtttttaaaggtttttgaaatccaggaattaaatcatcccttaataaaatattcgaaattc

SEQ ID NO: 2946 - DNA, 600 bp, Homo sapiens
ccctatcacgtcatgcggaatgtgaggatcgcttcacgcctggggagttggaagcagtatcagtgcactcaggtcgtcatcaactccttttacattgtgacacggcctttggcctttctgaacagtgtcatcaaccctgtcttctattttcttttgggagatcacttcagggacatgctgatgaatcaactgagacacaacttcaaatcccttacatcctttagcagatgggctcatgaactcctactttcattcagagaaaagtgaggggcttgtgaaacagattgttctacagatgaatctgtaagccagttacagtttgccttaactcatagacatcaatcagagagtgtcacagatttaaccttgatctaaagacaagttgtacccagagtatgtgaaaagaatgggacgacaagaatgtactggtttcttcctctaagaattgaaaggagttgaactgccttatgtttgggcatgtaactccaaaatactaggtagtataaggctttctcaatcagtgcaaaaatggaagatatataaagcaacaagttgtctgcatttgatcactggtcagattgtaaaaaaaaaaaaaaaaaa

SEQ ID NO: 2947 - DNA, 600 bp, Homo sapiens
ctggcaatggcatatgatcgtttcattgccatccgcaatcctttgagatatgcttccattttcaccaatactagagtcatagcgttaggagtgggagtgtttctaaggggttttgtatccatcctgcctgtaattttgcgtcttttttcattttcatattgcaaatctcatgttatcacacgtgctttctgcctccaccaagaaatcatgagactggcttgtgctgacataactttcaatagactttaccctgtaattttgatctctttaacaatcttcctagactctctgatcatcctcttctcctatattctaattcttaatactgtcataggcattgcctctggtgaagagagagccaaagccctcaatacctgtatctcccacattagttgtgttcttatcttctatgttacggtgatgggtttgacattcatttacagatttgggaagaatgtgccagaggttgtccacattatcatgagtwacatctacttcctctttcctcctttaatgaaccctgtcatctacagcatcaaaaccaagcaaatacaatatggcattatccgccttttatctaaacataggtttagtaggtaa

SEQ ID NO: 2948 - DNA, 600 bp, Homo sapiens
tcgccaggaagtccttgccacgcgtgtcctacgtgaccgccatggacctttttgtgactgtgtgcttcctgtttgtcttcgccgcgctgatggagtatgccaccctcaactactattccagctgtagaaaaccaaccaccacgaaaaagacaacatcgttactacatccagattcctcaagatggattcctgagcgaataagcctacaagccccttccaactattccctcctggacatgaggccaccaccacctgcgatgatcactttaaacaattccgtttactggcaggaatttgaagatacctgtgtctatgagtgtctggatggcaaagactgtcagagcttcttctgctgctatgaagaatgtaaatcaggatcctggaggaaagggcgtattcacatagacatcttggagctggactcgtactcccgggtctttttccccacgtccttcctgctctttaacctggtctactgggttggatacctgtatctctaagtgttgctcagagtgaagagtgaagagcatttggtacacacttgaccttctgtcgtccccagaccagtagtgaccaatcgggagtagcaaggaaggacac

SEQ ID NO: 2949 - DNA, 600 bp, Homo sapiens; identical to SEQ ID NO: 2948

SEQ ID NO: 2950 - DNA, 1400 bp, Homo sapiens
ctgcttatcatcatctactgctacatcttcatcttcagggccatccgggagacaggacgggctctccagaccttcggggcctgcaagggcaatggcgagtccctgtggcagcggcagcggctgcagagcgagtgcaagatggccaagatcatgctgctggtcatcctcctcttcgtgctctcctgggctccctattccgctgtggccctggtggcctttgctgggtacgcacacgtcctgacaccctacatgagctcggtgccagccgtcatcgccaaggcctctgcaatccacaaccccatcatttacgccatcacccaccccaagtacagggtggccattgcccagcacctgccctgcctgggggtgctgctgggtgtatcacgccggcacagtcgcccctaccccagctaccgctccacccaccgctccacgctgaccagccacacctccaacctcagctggatctccatacggaggcgccaggagtccctgggctcggagagtgaggtgggctggacacacatggaggcagcagctgtgtggggagctgcccagcaagcaaatgggcggtccctctacggtcagggtctggaggacttggaagccaaggcaccccccagaccccagggacacgaagcagagactccagggaagaccaaggggctgatccccagccaggaccccaggatgtaggacgcccactggctctccctttcttctgagacacatccagcccccccacgtctccctcatatacacagacccaggattatgctgtgagcctgcaggctttggaagtggccctgtcacccgtgctgcacgggattcacagccccagccccatggcccctctccacacctcaaaactcctgccccataacgtcctccgcatccactttccagctcagcagccgcacccgaggctcagcctgaggggtgtgtgcccaggccctcccacttcccgagttgtctgcctctcctcaaatgctgtgtgctgcaattgtccaggcgatgacaatggtgatggctccagagaacacaccagctatttatgagcctctgcccccaggctgggcctgtcactggcataggaaggccagccccgcatctcccactgccaacagctgaagccgagcacagacctccctttgcacgctggaacagttactcacctgtggcttcttcccccagtgtaccgttccactgtggcccacattcttgtgcacgcgggcatttgcaggcacgctctcgcgtagttacctatctgaatgcacaccaagcacatgcgtgcacactctgcgtctgtgattcatttcatgtagtggtctaagctcctcccagggctgtgtggatctgacagggtataggaaaataaaaagcggagaaggtgtcttcag

SEQ ID NO: 2951 - DNA, 1373 bp, Homo sapiens
gggaggagagaaaagccatggccgacaaggtcctgaaggagaagagaaagctgtttatccgttccatgggtgaaggtacaataaatggcttactggatgaattattacagacaagggtgctgaacaaggaagagatggagaaagtaaaacgtgaaaatgctacagttatggataagacccgagctttgattgactccgttattccgaaaggggcacaggcatgccaaatttgcatcacatacatttgtgaagaagacagttacctggcagggacgctgggactctcagcagatcaaacatctggaaattaccttaatatgcaagactctcaaggagtactttcttcctttccagctcctcaggcagtgcaggacaacccagctatgcccacatcctcaggctcagaagggaatgtcaagctttgctccctagaagaagctcaaaggatatggaaacaaaagtcggcagagatttatccaataatggacaagtcaagccgcacacgtcttgctctcattatctgcaatgaagaatttgacagtattcctagaagaactggagctgaggttgacatcacaggcatgacaatgctgctacaaaatctggggtacagcgtagatgtgaaaaaaaatctcactgcttcggacatgactacagagctggaggcatttgcacaccgcccagagcacaagacctctgacagcacgttcctggtgttcatgtctcatggtattcgggaaggcatttgtgggaagaaacactctgagcaagtcccagatatactacaactcaatgcaatctttaacatgttgaataccaagaactgcccaagtttgaaggacaaaccgaaggtgatcatcatccaggcctgccgtggtgacagccctggtgtggtgtggtttaaagattcagtaggagtttctggaaacctatctttaccaactacagaagagtttgaggatgatgctattaagaaagcccacatagagaaggattttatcgctttctgctcttccacaccagataatgtttcttggagacatcccacaatgggctctgtttttattggaagactcattgaacatatgcaagaatatgcctgttcctgtgatgtggaggaaattttccgcaaggttcgattttcatttgagcagccagatggtagagcgcagatgcccaccactgaaagagtgactttgacaagatgtttctacctcttcccaggacattaaaataaggaaactgtatgaatgtctgtgggcaggaagtgaagagatcgttctgtaaaaggtttttggaattatgtctgctgaataataaactttttttgaaataataaatctggtagaaaaatgaaaaaaaaaaaaaaaaaa

SEQ ID NO: 2952 - DNA, 950 bp, Homo sapiens
gggaggagagaaaagccatggccgacaaggtcctgaaggagaagagaaagctgtttatccgttccatgggtgaagctcctcaggcagtgcaggacaacccagctatgcccacatcctcaggctcagaagggaatgtcaagctttgctccctagaagaagctcaaaggatatggaaacaaaagtcggcagagatttatccaataatggacaagtcaagccgcacacgtcttgctctcattatctgcaatgaagaatttgacagtattcctagaagaactggagctgaggttgacatcacaggcatgacaatgctgctacaaaatctggggtacagcgtagatgtgaaaaaaaatctcactgcttcggacatgactacagagctggaggcatttgcacaccgcccagagcacaagacctctgacagcacgttcctggtgttcatgtctcatggtattcgggaaggcatttgtgggaagaaacactctgagcaagtcccagatatactacaactcaatgcaatctttaacatgttgaataccaagaactgcccaagtttgaaggacaaaccgaaggtgatcatcatccaggcctgccgtggtgataatgtttcttggagacatcccacaatgggctctgtttttattggaagactcattgaacatatgcaagaatatgcctgttcctgtgatgtggaggaaattttccgcaaggttcgattttcatttgagcagccagatggtagagcgcagatgcccaccactgaaagagtgactttgacaagatgtttctacctcttcccaggacattaaaataaggaaactgtatgaatgtctgtgggcaggaagtgaagagatcgttctgtaaaaggtttttggaattatgtctgctgaataataaactttttttgaaataataaatctggtagaaaaatgaaaaaaaaaaaaaaaaaa

SEQ ID NO: 2953 - DNA, 950 bp, Homo sapiens; identical to SEQ ID NO: 2952

SEQ ID NO: 2954 - DNA, 600 bp, Homo sapiens
tccaaacatgccctgggctacaccctgcacccgcccagccaggccgtggaagggcaacacaaggacatggtgcgcatccccgtgggatcaagagagaccttctacaggatctccaagacggatggcgtttgtgaatggaaatttttctcttccatgccccgtggatctgccaggattacagtgtccaaagaccaatcctcctgtaccacagcccggggacacacacccatgacatgaagccagcttcccgtccacgactgttgtccttactgcccaaggaaggggagcatgaaacccaccactggtcctgcgacccactgtctttggaatccaccccaggagcccaggagccttgcctgacacttggatttacttctttatcaagcatccatctgactaaggcacaaatccaacatgttactgttactgatacaggaaaaacagtaacttaaggaatgatcatgaatgcaaagggaaagaggaaaagagccttcagggacaaatagctcgattttttgtaaatcagtttcatacaacctccctcccccatttcattcttaaaagttaattgagaatcatcagccacgtgtagggtgtgag

SEQ ID NO: 2955 - DNA, 600 bp, Homo sapiens; identical to SEQ ID NO: 2954

SEQ ID NO: 2956 - DNA, 600 bp, Homo sapiens
cgaagtctcgctctgtcaccaggctggagtgcagtggcatgatcttggctcactgcaacctccgcctcccgggttcaagagattctcctgcctcagcctcccaagcagctgggactacaggggatgtgccaccaggccgacgccaccaggcccagctaatttttgtatttttagtagagacggggtttcaccatgttggccaggatgatctcgatctcttgacctcatgatctgcctgcctcagcctcccaaagtgctgggattacaggcgtgagccaccgtgcccggcccaactattttttttttttatcttttttaacagtgcaatcctttctgtggatgaaatcttgctcagaagctcaatatgcaaaagaaagaaaaacagcagggctggacggatgttgggagtggggtaagaccccaaccactcagagcccacccccccaacacacacacacattctctccatggtgactggtgaggggcctctagagggtacatagtacaccatggagcacggtttaagcaccactggactacacattcttctgtggcagttatcttaccttcccatagacacccagcccatagccattggtt

SEQ ID NO: 2957 - DNA, 600 bp, Homo sapiens; identical to SEQ ID NO: 2956

SEQ ID NO: 2958 - DNA, 600 bp, Homo sapiens
ccccatcatatacccatgctccagccaagagttcaaaaaggcctttcagaatgtcttgagaatccagtgtctctgcagaaagcagtcttccaaacatgccctgggctacaccctgcacccgcccagccaggccgtggaagggcaacacaaggacatggtgcgcatccccgtgggatcaagagagaccttctacaggatctccaagacggatggcgtttgtgaatggaaatttttctcttccatgccccgtggatctgccaggattacagtgtccaaagaccaatcctcctgtaccacagcccggaggggaatggattgtagatatttcaccaagaattgcagagagcatatcaagcatgtgaattttatgatgccaccgtggagaaagggtctagaatgctgatctccaggtagctggagacctaggcagtctgcaaatgaggagtcagctggaagctatggctatgtattatgtgacatcgcttgttcctaagtgaaaactggatatcccaaccttctggaccagtaggtttcatggttacgacctggtagtgagaacattttaggaactatttggttgggcaggcaatttttcactct

SEQ ID NO: 2959 - DNA, 1351 bp, Homo sapiens
gttccctatggcagaagcctttgtgatctcacctgttggaatgcactaatgttttctgagccccttaaatatcttgtctacattcttttaagaagctcttcaccaactgtcagaaggcaaccacagaaaaaagccacttaaggtgttggaatccctgggcaaagatttcctcactggtgttttggataacttggtggaacaaaatgtactgaactggaaggaagaggaaaaaaagaaatattacgatgctaaaactgaagacaaagttcgggtcatggcagactctatgcaagagaagcaacgtatggcaggacaaatgcttcttcaaaccttttttaacatagaccaaatatcccccaataaaaaagctcatccgaatatggaggctggaccacctgagtcaggagaatctacagatgccctcaagctttgtcctcatgaagaattcctgagactatgtaaagaaagagctgaagagatctatccaataaaggagagaaacaaccgcacacgcctggctctcatcatatgcaatacagagtttgaccatctgcctccgaggaatggagctgactttgacatcacagggatgaaggagctacttgagggtctggactatagtgtagatgtagaagagaatctgacagccagggatatggagtcagcgctgagggcatttgctaccagaccagagcacaagtcctctgacagcacattcttggtactcatgtctcatggcatcctggagggaatctgcggaactgtgcatgatgagaaaaaaccagatgtgctgctttatgacaccatcttccagatattcaacaaccgcaactgcctcagtctgaaggacaaacccaaggtcatcattgtccaggcctgcagaggtgcaaaccgtggggaactgtgggtcagagactctccagcatccttggaagtggcctcttcacagtcatctgagaacctggaggaagatgctgtttacaagacccacgtggagaaggacttcattgctttctgctcttcaacgccacacaacgtgtcctggagagacagcacaatgggctctatcttcatcacacaactcatcacatgcttccagaaatattcttggtgctgccacctagaggaagtatttcggaaggtacagcaatcatttgaaactccaagggccaaagctcaaatgcccaccatagaacgactgtccatgacaagatatttctacctctttcctggcaattgaaaatggaagccacaagcagcccagccctccttaatcaacttcaaggagcaccttcattagtacagcttgcatatttaacattttgtatttcaataaaagtgaagacaaacg

SEQ ID NO: 2960 - DNA, 1351 bp, Homo sapiens; identical to SEQ ID NO: 2959

SEQ ID NO: 2961 - DNA, 1343 bp, Homo sapiens
gctctttccaacgctgtaaaaaggacagaggctgttccctatggcagaaggcaaccacagaaaaaagccacttaaggtgttggaatccctgggcaaagatttcctcactggtgttttggataacttggtggaacaaaatgtactgaactggaaggaagaggaaaaaaagaaatattacgatgctaaaactgaagacaaagttcgggtcatggcagactctatgcaagagaagcaacgtatggcaggacaaatgcttcttcaaaccttttttaacatagaccaaatatcccccaataaaaaaggtgataaattgggtcacagaggcagaaatcacaatttatgttctgcaatatcctgcagctcatccgaatatggaggctggaccacctgagtcaggagaatctacagatgccctcaagctttgtcctcatgaagaattcctgagactatgtaaagaaagagctgaagagatctatccaataaaggagagaaacaaccgcacacgcctggctctcatcatatgcaatacagagtttgaccatctgcctccgaggaatggagctgactttgacatcacagggatgaaggagctacttgagggtctggactatagtgtagatgtagaagagaatctgacagccagggatatggagtcagcgctgagggcatttgctaccagaccagagcacaagtcctctgacagcacattcttggtactcatgtctcatggcatcctggagggaatctgcggaactgtgcatgatgagaaaaaaccagatgtgctgctttatgacaccatcttccagatattcaacaaccgcaactgcctcagtctgaaggacaaacccaaggtcatcattgtccaggcctgcagaggtgcaaaccgtggggaactgtgggtcagagactctccagcatccttggaagtggcctcttcacagtcatctgagaacctggaggaagatgctgtttacaagacccacgtggagaaggacttcattgctttctgctcttcaacgccacacaacgtgtcctggagagacagcacaatgggctctatcttcatcacacaactcatcacatgcttccagaaatattcttggtgctgccacctagaggaagtatttcggaaggtacagcaatcatttgaaactccaagggccaaagctcaaatgcccaccatagaacgactgtccatgacaagatatttctacctctttcctggcaattgaaaatggaagccacaagcagcccagccctccttaatcaacttcaaggagcaccttcattagtacagcttgcatatttaacattttgtatttcaataaaagtgaagacaaacg

SEQ ID NO: 2962 - DNA, 600 bp, Homo sapiens
ctagatcacattctttggccacaggtcagactctgagctgctttcctccagatcgggaaggagacacatatcacagatgccttctctaagacagctcctgtgtacagcatcgttctttgctgaggcctctatctgtccaattattatttttgaaattgcttttcaaattaaacattttacccgttgtgttgggtgtcaaaagaaattgctctctgatgaggcaagaacatgtctctccaacaacgtagtattgaacagagcaagttgttaatttgtggagtaggggaaaggttctgcaagttgccattgtacaaatccagttttacaaatgtttgcagcagattccacagacaaagagcccattcattgccgagagccctgcagaatctcagagcaaagtggctgtgtgttccgagccggagcctgacctgtggaccgtctttaatgtcttctgcaccagtccttttatgacgtgggctttttttaaacagggtaaagtgaatgtgttgcattgcaaactcaggtattatgaggagaaggtaggagtgtagctagcagcgtggagacattaggtcagccactagatgtatttgtgaattc

SEQ ID NO: 2963 - DNA, 600 bp, Homo sapiens
caccagaactccacggtgagggccgatgtctgggaacttgggacgccagaggggcagtgggtgccacaatctgaacccctacatcccattaacaagatatcatcaacggagccctgcacgggagacaggtctgtcttctgccagatggaagtgctcgatcgctactgctccattcccggctaccaccggctctgctgtgtgtcctgcatcaagaaggcctcgggccccaaccctggcccagaccctggcccaacctcactgccccccttctccactcctggaagccccttaccaggaccccaggaccctgcagatgctgcagagcctcctggaaagccaacgggatcagaggaccatcagcatggccgagccacacagctcccaggagctctggatacaagctccccagggacccagcatccctttgcccctgagacaccaatccctggagcatcctggagcatctcccctaccacccccggggggctgccttggggctggactcagacacctacgccagtccctgaggacaaagggcaacctggagaagacctgagacatcccggcaccagcctccctgctgcctccccggtgacatga

SEQ ID NO: 2964 - DNA, 600 bp, Homo sapiens; identical to SEQ ID NO: 2963

SEQ ID NO: 2965 - DNA, 600 bp, Homo sapiens
gcgtgctgtcggtctgctggtctccgctcctgataatgatgttgaaaatgatcttcaatcagacatcagttgagcactgcaagacacacacggagaagcagaaagaatgcaacttcttcttaatagctgttcgcctggcttcactgaaccagatcttggatccttgggtttacctgctgttaagaaagatccttcttcgaaagttttgccaggtagcaaatgctgtctccagctgctctaatgatggacagaaagggcagcctatctcattatctaatgaaataatacagacagaagcatgaaagaaaacacttaacttgcatgtgcacagcttctggtaacaaatatcgctaaaccttactgtgaatttaggcatctctggcatgccactgtttatgcattgaagtggaatttttggtataaagctaaatggtcttagaagcatagaaaatccctatgtgccaaaagtagtgaaacacaaacaaaggaaaatatattaataacagtctagtgtttttgttgagtctgccattcgtagctgaatatgtgattaattatgtgatgaaaactttttttataaatgatcttggtctattgggg

SEQ ID NO: 2966 - DNA, 600 bp, Homo sapiens; identical to SEQ ID NO: 2965

SEQ ID NO: 2967 - DNA, 306 bp, Homo sapiens
gggggagacttgatgttccacatccaaaagtccagacgtttcgatgaagcccgagctcgtttctacgctgcagagatcatttctgcactcatgttcctccacgaaaaaggcatcatctacagagacttgaaactggacaacgtactactggaccacgaaggccactgtaaactggccgacttcggaatgtgcaaggagggcatttgtaacggggtcaccacagccaccttctgcggcacgcctgactacattgccccagagatccttcaggagatgttgtatggacctgcagtcgactggtgggca

SEQ ID NO: 2968 - DNA, 306 bp, Homo sapiens; identical to SEQ ID NO: 2967

SEQ ID NO: 2969 - DNA, 600 bp, Homo sapiens
gtaaaggactggtggctcttcgggttctatttctgtatgcccttggtgtgcactgcgatcttctacaccctcatgacttgtgagatgttgaacagaaggaatggcagcttgagaattgccctcagtgaacatcttaagcagcgtcgagaagtggcaaaaacagttttctgcttggttgtaatttttgctctttgctggttccctcttcacttaagccgtatattgaagaaaactgtgtataacgaaatggacaagaaccgatgtgaattacttagtttcttactgctcatggattacatcggtattaacttggcaaccatgaattcatgtataaaccccatagctctgtattttgtgagcaagaaatttaaaaattgtttccagtcatgcctctgctgctgctgttaccagtccaaaagtctgatgacctcggtccccatgaacggaacaagcatccagtggaagaaccacgatcaaaacaaccacaacacagaccggagcagccataaggacagcatgaactgaccacccttagaagcactcctcggtactcccataatcctctcggagaaaaaaatcacaaggcaactgtgactccgg

SEQ ID NO: 2970 - DNA, 600 bp, Homo sapiens
gccctaccacctggtgaagacgctgtacatgctgggcagcctgctgcactggccctgtgactttgacctcttcctcatgaacatcttcccctactgcacctgcatcagctacgtcaacagctgcctcaaccccttcctctatgcctttttcgacccccgcttccgccaggcctgcacctccatgctctgctgtggccagagcaggtgcgcaggcacctcccacagcagcagtggggagaagtcagccagctactcttcggggcacagccaggggcccggccccaacatgggcaagggtggagaacagatgcacgagaaatccatcccctacagccaggagacccttgtggttgactagggctgggagcagagagaagcctggcgccctcggccctccccggcctttgcccttgctttctgaaaatcaggtagtgtggctactccttgtcctatgcacatcctttaactgtcccctgattctgccccgccctgtcctcctctactgcttgattctttctcagaggtttgtggtttaggggaaagagactgggtctacagacctgaccctgcacaagccatttaatctcactcagcctctgt

SEQ ID NO: 2971 - DNA, 600 bp, Homo sapiens; identical to SEQ ID NO: 2970

SEQ ID NO: 2972 - DNA, 1400 bp, Homo sapiens
tgaacaccttccaggaattcttcggcctgagtaactgtgaaagcaccagtcaactggaccaagccacgcaggtgacagagactcttgggatgactcactgctgcatcaatcccatcatctatgccttcgttggggagaagttcagaagcctttttcacatagctcttggctgtaggattgccccactccaaaaaccagtgtgtggaggtccaggagtgagaccaggaaagaatgtgaaagtgactacacaaggactcctcgatggtcgtggaaaaggaaagtcaattggcagagcccctgaagccagtcttcaggacaaagaaggagcctagagacagaaatgacagatctctgctttggaaatcacacgtctggcttcacagatgtgtgattcacagtgtgaatcttggtgtctacgttaccaggcaggaaggctgagaggagagagactccagctgggttggaaaacagtattttccaaactaccttccagttcctcatttttgaatacaggcatagagttcagactttttttaaatagtaaaaataaaattaaagctgaaaactgcaacttgtaaatgtggtaaagagttagtttgagttgctatcatgtcaaacgtgaaaatgctgtattagtcacagagataattctagctttgagcttaagaattttgagcaggtggtatgtttgggagactgctgagtcaacccaatagttgttgattggcaggagttggaagtgtgtgatctgtgggcacattagcctatgtgcatgcagcatctaagtaatgatgtcgtttgaatcacagtatacgctccatcgctgtcatctcagctggatctccattctctcaggcttgctgccaaaagccttttgtgttttgttttgtatcattatgaagtcatgcgtttaatcacattcgagtgtttcagtgcttcgcagatgtccttgatgctcatattgttccctaatttgccagtgggaactcctaaatcaaattggcttctaatcaaagcttttaaaccctattggtaaagaatggaaggtggagaagctccctgaagtaagcaaagactttcctcttagtcgagccaagttaagaatgttcttatgttgcccagtgtgtttctgatctgatgcaagcaagaaacactgggcttctagaaccaggcaacttgggaactagactcccaagctggactatggctctactttcaggccacatggctaaagaaggtttcagaaagaagtggggacagagcagaactttcaccttcatatatttgtatgatcctaatgaatgcataaaatgttaagttgatggtgatgaaatgtaaatactgtttttaacaactatgatttggaaaataaatcaatgctataactatgttgataaaag

SEQ ID NO: 2973 - DNA, 1400 bp, Homo sapiens
cgacctggccgtggctctgttccaagtgctgccccagctggcctggaaggccaccgaccgcttccgtgggccagatgccctgtgtcgggccgtgaagtatctgcagatggtgggcatgtatgcctcctcctacatgatcctggccatgacgctggaccgccaccgtgccatctgccgtcccatgctggcgtaccgccatggaagtggggctcactggaaccggccggtgctagtggcttgggccttctcgctccttctcagcctgccccagctcttcatcttcgcccagcgcaacgtggaaggtggcagcggggtcactgactgctgggcctgctttgcggagccctggggccgtcgcacctatgtcacctggattgccctgatggtgttcgtggcacctaccctgggtatcgccgcctgccaggtgctcatcttccgggagattcatgccagtctggtgccagggccatcagagaggcctggggggcgccgcaggggacgccggacaggcagccccggtgagggagcccacgtgtcagcagctgtggccaagactgtgaggatgacgctagtgattgtggtcgtctatgtgctgtgctgggcacccttcttcctggtgcagctgtgggccgcgtgggacccggaggcacctctggaaggtgggtgtagccgtggctagggctgacggggccacttgggcttggccgcatgcccctgtgccccaccagccatcctgaacccaacctagatcctccacctccacaggggcgccctttgtgctactcatgttgctggccagcctcaacagctgcaccaacccctggatctatgcatctttcagcagcagcgtgtcctcagagctgcgaagcttgctctgctgtgcccggggacgcaccccacccagcctgggtccccaagatgagtcctgcaccaccgccagctcctccctggccaaggacacttcatcgtgaggagctgttgggtgtcttgcctctagaggctttgagaagctcagctgccttcctggggctggtcctgggagccactgggagggggacccgtggagaattggccagagcctgtggccccgaggctgggacactgtgtggccctggacaagccacagcccctgcctgggtctccacatccccagctgtatgaggagagcttcaggccccaggactgtgggggcccctcaggtcagctcactgagctgggtgtaggaggggctgcagcagaggcctgaggagtggcaggaaagagggagcaggtgcccccaggtgagacagcggtcccaggggcctgaaaaggaaggaccaggctggggccaggggaccttcctgtctccgcctttctaatccctccctcctcattctctccctaataaaaattggagctca

SEQ ID NO: 2974 - DNA, 1400 bp, Homo sapiens; identical to SEQ ID NO: 2973

SEQ ID NO: 2975 - DNA, 600 bp, Homo sapiens
agtagcagaaggcagtcagtgctggtcaaaagtaatgaagaaggaatccagcgagtcctcacctctgattatgctttcctaatggagtcaacaaccatcgagtttgttacccagcggaactgtaacctgacacagattggcggccttatagactctaaaggttatggcgttggcactcccatgggttctccatatcgagacaaaattaccatagcaattcttcagctgcaagaggaaggcaaactgcatatgatgaaggagaaatggtggaggggcaatggttgcccagaagaggaaagcaaagaggccagtgccctgggggttcagaatattggtggcatcttcattgttctggcagccggcttggtgctttcagtttttgtggcagtgggagaatttttatacaaatccaaaaaaaacgctcaattggaaaagaggtccttctgtagtgccatggtagaagaattgaggatgtccctgaagtgccagcgtcggttaaaacataagccacaggccccagttattgtgaaaacagaagaagttatcaacatgcacacatttaacgacagaaggttgccaggtaaagaaaccatggcataa

SEQ ID NO: 2976 - DNA, 600 bp, Homo sapiens; identical to SEQ ID NO: 2975

SEQ ID NO: 2977 - DNA, 600 bp, Homo sapiens
atgctctgggggacctccatctgcctggggctgctgcccgtcatgggctggaactgcctccgagacgagtccacctgcagcgtggtcagaccgctcaccaagaacaacgcggccatcctctcggtgtccttcctcttcatgtttgcgctcatgcttcagctctacatccagatctgtaagattgtgatgaggcacgcccatcagatagccctgcagcaccacttcctggccacgtcgcactatgtgaccacccggaaaggggtctccaccctggctatcatcctggggacgtttgctgcttgctggatgcctttcaccctctattccttgatagcggattacacctacccctccatctatacctacgccaccctcctgcccgccacctacaattccatcatcaaccctgtcatatatgctttcagaaaccaagagatccagaaagcgctctgtctcatttgctgcggctgcatcccgtccagtctcgcccagagagcgcgctcgcccagtgatgtgtagcacccttgcacccaggaggactctgcatttaccaagcacttccactgcctggccaaggtttgagatgcttcccttgaattc

SEQ ID NO: 2978 - DNA, 600 bp, Homo sapiens; identical to SEQ ID NO: 2977

SEQ ID NO: 2979 - DNA, 600 bp, Homo sapiens
aaaaaatgattttgtcataaatatgtttccctatgtgtgtgtggagggtatggagtggggcctgatgggggatggcctggaatgagagggtcaagccaggcctggrgggcctgttgggggatctggggagctggacagagggtggagggtggctggcaggtgactccttctcagatgtcagtgcccctctgctcagacctgggcactgactggcaaggaccttacctcctcctggtgacaggaacctgggtgcttggctcttcctgggtcaaggatgctcacatcctgcccacaccggccactgtggggcttagacatgatgaatatgctcaaagcatgtcagtttccttaataataataggtcctactttttttttttttttttttttttgagacagagtctcgctctgtcccccaggctggagtgcagtggcgtgatctcggctcactgcaagctccacctcccgggttcacgccattctcctgcctcagcctcccgagtagctgggacyacaggcgcccaccatcacgcccggctaattttttttgtayttttagtagagacggggtttcactgtgtaagccaggatggtctcgatc

SEQ ID NO: 2980 - DNA, 600 bp, Homo sapiens
gactgccttgaatatcccctcccagtcaccttgtgcaagcccctgcccatctgggaaaataccccatcattcatgctactgccaacctggggagccagggctatgggagcagcttttttttcccccctagaaacgtttggaacaatgtaaaactttaaagctcgaaaacaattgtaataatgctaaagaaaaagtcatccaatctaaccacatcaatattgtcattcctgtattcacccgtccagaccttgttcacactctcacatgtttagagttgcaatcgtaatgtacagatggttttataatctgatttgttttcctcttaacgttagaccacaaatagtgctcgctttctatgtagtttggtaattatcattttagaagactctaccagactgtgtattcattgaagtcagatgtggtaactgttaaattgctgtgtatctgatagctctttggcagtctatatgtttgtataatgaatgagagaataagtcatgttccttcaagatcatgtaccccaatttacttgccattactcaattgataaacatttaacttgtttccaatgtttagcaaatacatattttatagaacttc

SEQ ID NO: 2981 - DNA, 600 bp, Homo sapiens; identical to SEQ ID NO: 2980

SEQ ID NO: 2982 - DNA, 600 bp, Homo sapiens
gccaatagttgctttaatcccttcctttatgccctcttggggaaagattttaggaagaaagcaaggcagtccattcagggaattctggaggcagccttcagtgaggagctcacacgttccacccactgtccctcaaacaatgtcatttcagaaagaaatagtacaactgtgtgaaaatgtggagcagccaacaagcaggggctcttaggcaatcacatagtgaaagtttataagaggatgaagtgatatggtgagcagcggacttcaaaaactgtcaaagaatcaatccagcggttctcaaacggtacacagactattgacatcagcatcacctagaaacttgttagaaatgcaaattctcaagccgcatcccagacttgctgaatcggaatctctgggggttgggacccagcaagggcacttaacaaaccctcgtttctgattaatgctaaatgtaagaatcattgtaaacattagttctatttctatcccaaactaagctatgtgaaataagagaagctactttgtttttaaatgatgttgaatatttgtcgatatttccatcattaaatttttccttagcattgtctaagtcttcca

SEQ ID NO: 2983 - DNA, 600 bp, Homo sapiens; identical to SEQ ID NO: 2982

SEQ ID NO: 2984 - DNA, 600 bp, Homo sapiens
cagagaaaaaggcaactccaattaaactcatatggtccctggtggccttaattttcaccttttttgtccctttgttgagcattgtgacctgctactgttgcattgcaaggaagctgtgtgcccattaccagcaatcaggaaagcacaacaaaaagctgaagaaatctataaagatcatctttattgtcgtggcagcctttcttgtctcctggctgcccttcaatactttcaagttcctggccattgtctctgggttgcggcaagaacactatttaccctcagctattcttcagcttggtatggaggtgagtggacccttggcatttgccaacagctgtgtcaaccctttcatttactatatcttcgacagctacatccgccgggccattgtccactgcttgtgcccttgcctgaaaaactatgactttgggagtagcactgagacatcagatagtcacctcactaaggctctctccaccttcattcatgcagaagattttgccaggaggaggaagaggtctgtgtcactctaaagggaactgtgacatttcaagctctgttggtgggtttaggagttaatttttgtcagcaacaaagaaa

SEQ ID NO: 2985 - DNA, 600 bp, Homo sapiens; identical to SEQ ID NO: 2984

SEQ ID NO: 2986 - DNA, 600 bp, Homo sapiens
acaagaaccactccaaggctctggagttcctggcagataaggtggtctgtaccgagtcctggccactggctcaccaccgcaccatctacaccaccttcctgctcctcttccagtactgcctcccactgggcttcatcctggtctgttatgcacgcatctaccggcgcctgcagaggcaggggcgcgtgtttcacaagggcacctacagcttgcgagctgggcacatgaagcaggtcaatgtggtgctggtggtgatggtggtggcctttgccgtgctctggctgcctctgcatgtgttcaacagcctggaagactggcaccatgaggccatccccatctgccacgggaacctcatcttcttagtgtgccacttgcttgccatggcctccacctgcgtcaacccattcatctatggctttctcaacaccaacttcaagaaggagatcaaggccctggtgctgacttgccagcagagcgcccccctggaggagtcggagcatctgcccctgtccacagtacatacggaagtctccaaagggtccctgaggctaagtggcaggtccaatcccatttaaccaggtctaggtcttctccctgcca

SEQ ID NO: 2987 - DNA, 600 bp, Homo sapiens
catggctttggctttgcaaaataaaaaatgtgttttgtacatgaagtaggaatcgtatttcagcttcaaggttcagattgaggggcccactgtttggagaggatggtattcaggctttctcatgtccttcaaatctgttagcgtttgactctagaaatcaaagcaaaggagtggttacccagacacttcttttggtgtgatcaatgcgctgatgtgatctatgaagatgattcatgcttgaaaactagcacagaaacatcttgcttatttgccaaagctgggagatgagcttctctgcataatttaaatgttcagataaatgaagctgacttatttaagcaataaccttttaaacattttagctaagatgtataaaaatgtttccaaaatataccacatactttatttcttcttaaatgtagtacattaggttacatcatttttcttgctgtcttgggcatcaaaacaggtgccatggtaacctgacactctcaggagacattaagatagaaggggctgttcttcagtggttcccattgattctccccatatctttttgctctcaggctctggccgtctcttcctgagccttaactgtgt

SEQ ID NO: 2988 - DNA, 600 bp, Homo sapiens; identical to SEQ ID NO: 2987

SEQ ID NO: 2989 - DNA, 600 bp, Homo sapiens
caggcagccggccctgctgccgtgtctttgcgctgactgtcctggagttcctgctgcccctgctggtcatcagcgtgtttaccggccgcatcatgtgtgcactgtcgcggccgggtctgctccaccagggtcgccagcgccgcgtgcgggccatgcagctcctgctcacggtgctcatcatctttctcgtctgcttcacgcccttccacgcccgccaagtggccgtggcgctgtggcccgacatgccacaccacacgagcctcgtggtctaccacgtggccgtgaccctcagcagcctcaacagctgcatggaccccatcgtctactgcttcgtcaccagtggcttccaggccaccgtccgaggcctcttcggccagcacggagagcgtgagcccagcagcggtgacgtggtcagcatgcacaggagctccaagggctcaggccgtcatcacatcctcagtgccggccctcacgccctcacccaggccctggctaatgggcccgaggcttagtcagcagggctctgccaggggccgaaggtcaggactcatctgggcatgccagcgtggacacccaccatgccaggggtggcaatcggtt

SEQ ID NO: 2990 - DNA, 600 bp, Homo sapiens; identical to SEQ ID NO: 2989

SEQ ID NO: 2991 - DNA, 600 bp, Homo sapiens
atggagatgtgtttcagtggtgtgcggagtcctggcacaccgactcctacttcaccctgttcatcgtgatgatgttatatgccccagcagcccttattgtctgcttcacctatttcaacatcttccgcatctgccaacagcacacaaaggatatcagcgaaaggcaagcccgcttcagcagccagagtggggagactggggaagtgcaggcctgtcctgataagcgctatgccatggtcctgtttcgaatcactagtgtattttacatcctctggttgccatatatcatctacttcttgttggaaagctccactggccacagcaaccgcttcgcatccttcttgaccacctggcttgctattagtaacagtttctgcaactgtgtaatttatagtctctccaacagtgtattccaaagaggactaaagcgcctctcaggggctatgtgtacttcttgtgcaagtcagactacagccaacgacccttacacagttagaagcaaaggccctcttaatggatgtcatatctgaagtggctcagttacggggttcccgtgtgtgtgtgtgtgtgtgtgtgtgtgtgtgtgtattttatctctaa

SEQ ID NO: 2992 - DNA, 1400 bp, Homo sapiens
gaatcttcatgtacttgatgtaataatttgtgtgggatgtattcctctaactatagttatccttctgctttcactggagagtaacactgctctcatttgctgtttccatgaggcttgtgtatcttttgcaagtgtctcaacagcaatcaacgtttttgctatcactttggacagatatgacatctctgtaaaacctgcaaaccgaattctgacaatgggcagagctgtaatgttaatgatatccatttggattttttcttttttctctttcctgattccttttattgaggtaaattttttcagtcttcaaagtggaaatacctgggaaaacaagacacttttatgtgtcagtacaaatgaatactacactgaactgggaatgtattatcacctgttagtacagatcccaatattctttttcactgttgtagtaatgttaatcacatacaccaaaatacttcaggctcttaatattcgaataggcacaagattttcaacagggcagaagaagaaagcaagaaagaaaaagacaatttctctaaccacacaacatgaggctacagacatgtcacaaagcagtggtgggagaaatgtagtctttggtgtaagaacttcagtttctgtaataattgccctccggcgagctgtgaaacgacaccgtgaacgacgagaaagacaaaagagagtcttcaggatgtctttattgattatttctacatttcttctctgctggacaccaatttctgttttaaataccaccattttatgtttaggcccaagtgaccttttagtaaaattaagattgtgttttttagtcatggcttatggaacaactatatttcaccctctattatatgcattcactagacaaaaatttcaaaaggtcttgaaaagtaaaatgaaaaagcgagttgtttctatagtagaagctgatcccctgcctaataatgctgtaatacacaactcttggatagatcccaaaagaaacaaaaaaattacctttgaagatagtgaaataagagaaaaacgtttagtgcctcaggttgtcacagactagagaaaagtctcagtttcaccaaatccacattcaaatgagttttaaatttaaattgtaaaaactgatattactgccaaatataagaaaaatattttaagtattggttatgttgtaaattttcaatgtgaaatgctaattagataggtcatatatattcaatttcttcattacttaatgtatttgttgcatggcagtttgttaaagtactatcatgtgtatattttgtcaatattatgtccaacagaaaatattcatgtaagtcatattttttaaggaataaatacatagccttaaaacagtgtataactttaaaatgtaaaaaaaaaaaaaaaaaaaaaaaaaa

SEQ ID NO: 2993 - DNA, 600 bp, Homo sapiens
gacaaagagggtgacccgcacagccatcgccatctgtctggtcttctttgtgtgctgggcaccctactatgtgctacagctgacccagttgtccatcagccgcccgaccctcacctttgtctacttatacaatgcggccatcagcttgggctatgccaacagctgcctcaacccctttgtgtacatcgtgctctgtgagacgttccgcaaacgcttggtcctgtcggtgaagcctgcagcccaggggcagcttcgcgctgtcagcaacgctcagacggctgacgaggagaggacagaaagcaaaggcacctgatacttcccctgccaccctgcacacctccaagtcagggcaccacaacacgccaccgggagagatgctgagaaaaacccaagaccgctcgggaaatgcaggaaggccgggttgtgaggggttgttgcaatgaaataaatacattccatgggctcacacgttgctggggaggcctggagtcaggtttggggttttcagatatcagaaatcccttgggggagcaggatgagacctttggatagaacagaagctgagcaagagaacatgttggtttggataaccggttgcac

SEQ ID NO: 2994 - DNA, 600 bp, Homo sapiens; identical to SEQ ID NO: 2993

SEQ ID NO: 2995 - DNA, 1400 bp, Homo sapiens
  misc_feature (1140)..(1140): n is a, c, g, or t
ctgtcacccgcttcctctgtggcttcctggtcccagtcctcatcatcacagcttgctacctcaccatcgtctgcaaactgcaccgcaaccgcctggccaagaccaagaagcccttcaagattattgtgaccatcatcattaccttcttcctctgctggtgcccctaccacacactcaacctcctagagctccaccacactgccatgcctggctctgtcttcagcctgggtttgcccctggccactgcccttgccattgccaacagctgcatgaaccccattctgtatgttttcatgggtcaggacttcaagaagttcaaggtggccctcttctctcgcctggtcaatgctctaagtgaagatacaggccactcttcctaccccagccatagaagctttaccaagatgtcatcaatgaatgagaggacttctatgaatgagagggagaccggcatgctttgatcctcactgtggaacccctcaatggactctctcaacccagggacacccaaggatatgtcttctgaagatcaaggcaagaacctctttagcatccaccaattttcactgcattttgcatgggatgaacagtgttttatgctgggaatctagggcctggaacccctttcttctagtggaccttgggaggccagccttgactgactcaaagcaaaaaaggaagaattctcaaaagcattgccatgaactgggattggcatagggcggtgggattaagctgcctattgtgtgtgccccagaaatgacactctccaaggtccattcctggtgtgagcagtgagggggtcagagcaaacccagtgtgatgcagatcacacttggcccttgtatatatattatcagtagctggccagaactcaagtcactgctctgtgttaaagtatgtggaaatgcataggtgatctgggagaggaaggtgacatatcagcccatgaactccataggccattaatttggctttcggatcagctaggaagacagaaaactggtcctgagaggtcctgtgggctctttacaagggcaagacaagtgagggatgcaacgaggacttgagatttggcaaagaaatgagaaaggagaaaagaacctttaaaggatgcaggcatggagcagctcaccctanaacatcgcaggctgatggtgctttaggctggagctatttggggcgtcagggtggtgccagcccctgatctcaccttgcccctcttacctgggggtggggttgtggcaggcatcttcaccagcagccctcaccccatcacagggatttttttctgcctttcctaatccactcagctctggctggaagtgcttaaaataaaacactggtggtggggaattgctgggagcaaaaaaaaaaaaaaaaaaaaaaaaaaaaaaaaa

SEQ ID NO: 2996 - DNA, 1400 bp, Homo sapiens
tcctgactcgagagtgtggcaatgaatttgcttatttttactttgtttccttcatcttcctctgctcgtttctgatgctgaatctctttgtcgccgtcatcatggacaactttgagtacctcacccgagactcctccatcctgggcccccaccacctggatgagtacgtgcgtgtctgggccgagtatgaccccgcagcttggggccgcatgccttacctggacatgtatcagatgctgagacacatgtctccgcccctgggtctggggaagaagtgtccggccagagtggcttacaagcggcttctgcggatggacctgcccgtcgcagatgacaacaccgtccacttcaattccaccctcatggctctgatccgcacagccctggacatcaagattgccaagggaggagccgacaaacagcagatggacgctgagctgcggaaggagatgatggcgatttggcccaatctgtcccagaagacgctagacctgctggtcacacctcacaagtccacggacctcaccgtggggaagatctacgcagccatgatgatcatggagtactaccggcagagcaaggccaagaagctgcaggccatgcgcgaggagcaggaccggacacccctcatgttccagcgcatggagcccccgtccccaacgcaggaagggggacctggccagaacgccctcccctccacccagctggacccaggaggagccctgatggctcacgaaagcggcctcaaggagagcccgtcctgggtgacccagcgtgcccaggagatgttccagaagacgggcacatggagtccggaacaaggcccccctaccgacatgcccaacagccagcctaactctcagtccgtggagatgcgagagatgggcagagatggctactccgacagcgagcactacctccccatggaaggccagggccgggctgcctccatgccccgcctccctgcagagaaccagaccatctcagacaccagccccatgaagcgttcagcctccgtgctgggccccaaggcccgacgcctggacgattactcgctggagcgggtcccgcccgaggagaaccagcggcaccaccagcggcgccgcgaccgcagccaccgcgcctctgagcgctccctgggccgctacaccgatgtggacacaggcttggggacagacctgagcatgaccacccaatccggggacctgccgtcgaaggagcgggaccaggagcggggccggcccaaggatcggaagcatcgacagcaccaccaccaccaccaccatcaccaccgattcctttgcttcttttttccttttttcctaccttgtttgaaaaccgtgggcttgggactgtgaattattgcatgacattcaaaaagaaaaaaaaaataaaaaaaa

SEQ ID NO: 2997 - DNA, 1400 bp, Homo sapiens; identical to SEQ ID NO: 2996

SEQ ID NO: 2998 - DNA, 600 bp, Homo sapiens
aattacctgctggatcaaaggaccatttcctttgtggggtgcacagctcaacacttcctctaccttacccttgtgggagctgaattcttcctgctgggcctcatggcctatgaccgctatgtggccatttgcaaccctctgagataccctgtcctcatgagccgccgggtctgttggatgattatagcaggttcctggtttgggggctctttggatggcttcctcctaacccccatcaccatgagctttcccttctgcaattcccgggagattaaccacttcttctgcgaggcaccagcagtcctgaagttggcatgtgcagacacagccctctacgagacagtgatgtatgtgtgctgtgttttgatgctgctgattcctttctctgtagtccttgcttcctatgcccgaatcctgactacagttcagtgcatgagctcagtggagggcaggaagaaggcatttgccacttgctcatcccacatgactgtggtgtccttgttctacggggctgccatgtacacctacatgctgccacattcttaccacaagccagcccaggacaaagtcctctctgtgttttacaccattctcacaccc

SEQ ID NO: 2999 - DNA, 600 bp, Homo sapiens; identical to SEQ ID NO: 2998

SEQ ID NO: 3000 - DNA, 600 bp, Homo sapiens
aatatacagactcggcatcacaccatcacctatacgggttgcctcacgcaaatgtatttctttctgatgtttggtgatctagacagcttcttcctggctgccatggcgtatgaccgctatgtggccatctgccaccccctctgctactccacggtcatgaggccccaagtctgtgccctaatgcttgcattgtgctgggtcctcaccaatatcgttgccctgactcacacgttcctcatggctcggttgtccttctgtgtgactggggaaattgctcactttttctgtgacatcactcctgtcctgaagctgtcatgttctgacacccacatcaacgagatgatggtttttgtcttgggaggcaccgtactcatcgtcccctttttatgcattgtcacctcctacatccacattgtgccagctatcctgagggtccgaacccgtggtggggtgggcaaggccttttccacctgcagttcccacctctgcgttgtttgtgtgttctatgggaccctcttcagtgcctacctgtgtcctccctccattgcctctgaagagaaggacattgcagcagctgcaatgtacaccatagtgactccc

SEQ ID NO: 3001 - DNA, 600 bp, Homo sapiens; identical to SEQ ID NO: 3000

SEQ ID NO: 3002 - DNA, 600 bp, Homo sapiens
aatatccaaacacaaagcaaaatgatcacttttgcaggctgcctcactcagatattttttttcattgcatttggatgcctggacaatttgctcctgaccatgacggcctatgaccgcttcgtggccatctgttaccccctgcactacacggtcatcatgaacccccggctctgtggactgctggttctggggtcctggtgcatcagtgtcatgggttccttgcttgagaccttgaccattttgaggctgtcctcctgcacaaatatggaaattccgcactttttttgtgatccttccgaagtcctgaagctggcctgttctgacaccttcatcaataacatcgtgatgtgttttgtgaccattgtcctgggtgtttttcctctctgtggaatcctattctcttattctcagattttctcctccgtcctaagagtatcatctgccagaggccagcacaaagcttttaccacctgtggttcccacctctcagtggtcagcttgttctatggcactggccttggggtctatctcagttctgcagttacaccaccttctaggacaagtctggcagcctcggtgatgcacaccatggtcaccccc

SEQ ID NO: 3003 - DNA, 199 bp, Homo sapiens
agttcttgtgcatggaaatgcagggatctccagaagtgcagcctttgttattgcatacattatggaaacatttggaatgaagtacagagatgcttttgcttatgttcaagaaagaagattttgtattaatcctaatgctggatttgtccatcaacttcaggaatatgaagccatctacctagcaaaattaacaatacag

SEQ ID NO: 3004 - DNA, 600 bp, Homo sapiens
cgctgcgcatcatcttcgccatcgagagcacgtttgtgggctcctggctgcccttcagcgccctgcgggccgtcttccacctggcgcgtctgggggcgctgccgctgccgtgccccctgctgctggcgctgcgctggggcctcaccattgccacctgcctggccttcgtcaacagctgcgccaacccgctcatctacctcctgctggaccgctcattccgagcccgggcgctggacggggcctgcgggcgcaccggccgcctggcgcgaaggatcagctcagcctcctcgctctccagggacgacagttccgtgttccgttgccgggcccaggccgcgaacactgcctcggcctcctggtagctgccccgggccgctggaggtgggcggcagcggagcatcgagaggaggccagatgtcccggaggggactgagctccccagacgcgcctgttctggcggcagcaagctgctcgggccggcatcgcatttcctcgcgcgctgcctggactcccaaggcctcctccatcggtttccccggaacctcagaacaattgaactcccctaaaccaggctcctgtgactagctgttccctctcagc

SEQ ID NO: 3005 - DNA, 600 bp, Homo sapiens
  misc_feature (366)..(366): n is a, c, g, or t
  misc_feature (434)..(434): n is a, c, g, or t
  misc_feature (444)..(444): n is a, c, g, or t
  misc_feature (485)..(485): n is a, c, g, or t
  misc_feature (517)..(517): n is a, c, g, or t
  misc_feature (534)..(534): n is a, c, g, or t
  misc_feature (536)..(536): n is a, c, g, or t
  misc_feature (588)..(588): n is a, c, g, or t
agttgctgccccagaccttccaaatcctccccaaagtgcctgagcggatccgaaggagaatccagccaagcacagtctactgttgcaatgaaaaccagtctgcggtttagggggtcagggggccacagagaaggggcagctgagccccagtcccagggtggatctgtcctgctctgttccctggcatgttggtcatagtctgcactttgtggtggcaatttaagcacaaaggtactcatttgtaatcagatgagctgcagctcccaaatttcaaattttggcacgatgaattatttttgtttctctttgcagagagccaaatatggggctgatgggaactgcaacgtcattaagtcaaaaatggantgggctggggagtgcagaagttgggcagaaagggaagaagggggcaacagggaatgaagctggttgantgtggggcangaagactggtcagtcacaagaacttcaacctgccctgcganccctctctgcacctgctcaagaaaaacctganaaacctcagtaagtgtnanctcctgggtgttcattcattttgtttgacaccaaggttcttcagctattgangtttgttgtgtt

SEQ ID NO: 3006 - DNA, 600 bp, Homo sapiens; identical to SEQ ID NO: 3005
  misc_feature (366)..(366): n is a, c, g, or t
  misc_feature (434)..(434): n is a, c, g, or t
  misc_feature (444)..(444): n is a, c, g, or t
  misc_feature (485)..(485): n is a, c, g, or t
  misc_feature (517)..(517): n is a, c, g, or t
  misc_feature (534)..(534): n is a, c, g, or t
  misc_feature (536)..(536): n is a, c, g, or t
  misc_feature (588)..(588): n is a, c, g, or t

SEQ ID NO: 3007 - DNA, 1400 bp, Homo sapiens
acgctccatccactcctctggcctcacaggcgactctcacagccagaacattctgccggtgtctgagtgaaggaccgcgctcctgctgaagagtttagaatgaggcagcggtgagaagaagggtgggagggcgtgggggcccctgggtggacaccaccagccaccagtccctggcatgcccagatgatcctggttccctggcttgtaggggctccagagcctgcttcctggttcctcaagggcagatattggacacttccttatttgtcaccaaaggaatgactgtaggccgtgtgttggcccttctttctaagaagctgctttgagctcctggactcacctgaggctccctgggggatgacactcagttctgtcactgtcaaggatgcagagagctggtggtaggtgggaagcatggtgtccacctgcctgctgaccactggacgctgctccatgctgaagaaaagtgacagtctccaggggacatttcagccatgctgaaagggaggctggcagtggtcawttggcccggatctaacatggcacctcgtctccacagggtagtggtggctgcttcaacccaaatattattcagctggtactaacgacattgtgcccagctgggactcttgggctctgtgcctgagggaaaatgtttcacaactagtggctgcccaattgctgctgaccagttgtcttagaaatggtcaattggattcaactttagtcctctccttccccctaaaagcgaatgtttgtgtgtgcagacaatcttagcatgaaaatggtttaaataggctggtcctacatgtattaggttctttcaagtttgactgggaggtcacctttttctgatttacaagtcctaattgttggagctcagtaaaggtaggaggaaggtggctggttggtcctcccttccccctgtttgtgacctgaatttacaggaagtgtttcaacttgtcttatgcatcttatctggcatgtcctgggagatggatgggcaagaactggcctgagcagggatttttgccttgattttaagtcactgggttccattgtcctggcacctccatttccttagtttctgtaagcctgttaacagaaagtagaggctattcaaggttatcaagaaagtgccctgtgctaatgatgagacagtgaatttttttttttttcragatgggagtttcactcttattgcccaggctagagtgcaatggtgcgatctaggctcaccgcaacctctgccttccaggttcaagtgattagagacagtgaaatttttatggaatactgcacctataaaacacatgccaatctgttagcagtcctgacttgatttaataaaaaccaaggagagccaaaaaaaaaaaaaaaaaaaaaaaaaaaaagggcgg

SEQ ID NO: 3008 - DNA, 1400 bp, Homo sapiens
tacacccaaggccagcaatgcaaggagagtatggacatcaaattctttccttccagaggctgaattcttcaaagacacacgcggtcgtcccttgctcttggcattaacggtggagaacccagctgaggtggcttcacagattcttccccaaaaacacaggtgttattattatacttttaaaaaactttttgagacagggtctgactctgttgcctaggctagagtgcagtggtgcaatctcagctcactgcagcctccacctcccatgctcaagccatcctcccacctcagcctcctgagtagttgaggacacaggcacgggacaccatgcctggctaatttttgtatttttttttgtagagatggcggtctcactttgttgcccaggctggtcttgaattcctgagcttaagtgatcctcctacctcagcctcccaaagtgctgggattacaggtgtgagccaccacacccagccaaaaccaggtgttatttgctgactcaccaatgcctcccccaaaaggataaatttaaaggtgtgtataactcatgaagtgtaattcaaataaaacaaattatcgtttggaataataacaactataggtatgtggtcaggaagcagttaaaaacattaaaatacagacctggccagttcaatccaacccaggggttccaagcaggaggtggggcaggtgggcgtcatgccctgattcacagagggcacaggtgggtgtcatgccctggttcacagagggcacgtgaactcgagaccgtgctgcaccccggtgcccctgtgcttataagggagggcacgtgcacagcagaagcaggttgttccccatttaaagttctggagcccaggctgtgagctccttggctgagccctctcctgtccctgggagctccccaggtgcgaggagcctgccagccagtggggcctacactctgtgttattgcatctccgccaggctaaaagccttggtcactactttagagccactcaaggaaacgcgtgcaccctgccctgctggaaggcaccatggttagagggaggcacactgtttcttagagacggggactgcttgctgtcatgtttcgccttcctcggaagctccatggaatgttctggagcaggcatcttagggcattccctccgcacttctctgccagcccatgtggctcccacactgggctatcccttgccttaggcttgtggccttttttttttttttttttaatttgaaaaatatttttcatgtgcacttaaacgtgttgtggaatgatgctgggtctcaagaatgctgtgaatcaataaacattttattcagaaaaaaaaaaaaaaaaaaaggcggccgctctagagtatccctcgaggggcccaagcttacgcgtacaagcttct

SEQ ID NO: 3009 - DNA, 1400 bp, Homo sapiens; identical to SEQ ID NO: 3008

SEQ ID NO: 3010 - DNA, 600 bp, Homo sapiens
cctactgtagaggtgaatgtctccttgcccagagtcatcatcctggagtgtgaggagggatccatacttgcatttggcaccatgctgggctacattgccatcctggccttcatttgcttcatatttgctttcaaaggcaaatatgagaattacaatgaagccaaattcattacatttggcatgctcatttacttcatagcttggatcacattcatccctatctatgctaccacatttggcaaatatgtaccagctgtggagattattgtcatattaatatctaactatggaatcctgtattgcacattcatccccaaatgctatgttattatttgtaagcaagagattaacacaaagtctgcctttctcaagatgatctacagttattcttcccatagtgtgagcagcattgccctgagtcctgcttcactggactccatgagcggcaatgtcacaatgaccaatcccagctctagtggcaagtctgcaacctggcagaaaagcaaagatcttcaggcacaagcatttgcacacatatgcagggaaaatgccacaagtgtatctaaaactttgcctcgaaaaagaatgtcaagtatatga

SEQ ID NO: 3011 - DNA, 1400 bp, Homo sapiens
tcgtcgcacactgcctgtggcccccgagccaggcccagccccaggccagtcagccgcagactttggaaagcccaacgaccatggagagatgggccgttgccatggtggacggactcccgggctgggcttttgaattggccttggggactactcggctctcactcagctcccacgggactcagaagtgcgccgccatgctgcctagggtactgtccccacatctgtcccaacccagctggaggcctggtctctccttacaacccctgggcccagccctcattgctgggggccaggccttggatcttgagggtctggcacatccttaatcctgtgcccctgcctgggacagaaatgtggctccagttgctctgtctctcgtggtcaccctgagggcactctgcatcctctgtcattttaacctcaggtggcacccagggcgaatggggcccagggcagaccttcagggccagagccctggcggaggagaggccctttgccaggagcacagcagcagctcgcctacctctgagcccaggccccctccctccctcagccccccagtcctccctccatcttccctggggttctcctcctctcccagggcctccttgctccttcgttcacagctgggggtccccgattccaatgctgttttttggggagtggtttccaggagctgcctggtgtctgctgtaaatgtttgtctactgcacaagcctcggcctgcccctgagccaggctcggtaccgatgcgtgggctgggctaggtccctctgtccatctgggcctttgtatgagctgcattgcccttgctcaccctgaccaagcacacgcctcagaggggccctcagcctctcctgaagccctcttgtggcaagaactgtggaccatgccagtcccgtctggtttccatcccaccactccaaggactgagactgacctcctctggtgacactggcctagagcctgacactctcctaagaggttctctccaagcccccaaatagctccaggcgccctcggccgcccatcatggttaattctgtccaacaaacacacacgggtagattgctggcctgttgtaggtggtagggacacagatgaccgacctggtcactcctcctgccaacattcagtctggtatgtgaggcgtgcgtgaagcaagaactcctggagctacagggacagggagccatcattcctgcctgggaatcctggaagacttcctgcaggagtcagcgttcaatcttgaccttgaagatgggaaggatgttctttttacgtaccaattcttttgtcttttgatattaaaaagaagtacatgttcattgtagagaatttggaaactgtagaagagaatcaagaagaaaaataaaaatcagctgttgtaatcgcctagc

SEQ ID NO: 3012 - DNA, 1400 bp, Homo sapiens; identical to SEQ ID NO: 3011

SEQ ID NO: 3013 - DNA, 1400 bp, Homo sapiens
accaccttcatccttgtcatcctcttcctcctgcctcttatggtgatgcttattctgtacagtaaaattggttatgaactttggataaagaaaagagttggggatggttcagtgcttcgaactattcatggaaaagaaatgtccaaaatagccaggaagaagaaacgagctgtcattatgatggtgacagtggtggctctctttgctgtgtgctgggcaccattccatgttgtccatatgatgattgaatacagtaattttgaaaaggaatatgatgatgtcacaatcaagatgatttttgctatcgtgcaaattattggattttccaactccatctgtaatcccattgtctatgcatttatgaatgaaaacttcaaaaaaaatgttttgtctgcagtttgttattgcatagtaaataaaaccttctctccagcacaaaggcatggaaattcaggaattacaatgatgcggaagaaagcaaagttttccctcagagagaatccagtggaggaaaccaaaggagaagcattcagtgatggcaacattgaagtcaaattgtgtgaacagacagaggagaagaaaaagctcaaacgacatcttgctctctttaggtctgaactggctgagaattctcctttagacagtgggcattaattataacaatatcttcataattaatgcccttcagattgtaacccaaagagaaaattattttgagcaaaggtcaaatactctttttattcttaagatgatgacaagaagaaaacaaatcatgtttccattaaaaaatgacacgaggctagtccaagtgcagtgatgtttacaaccaattgatcacaatcatttaacagatttctgtgttccttctcattcccactgcttcacttgactagccttaaaaaagcaacatggaaggccaggcacggtggctcatgcctgtaatcccagcactttgggaggcctagacgggcggatcacgaggtcaggagatcaaaaccatcctggctaacacggtgaaaccccatctctgctaaaaatacaaaaattagccgggcgtggtggcgggcacctgtagtcccagctacttgggagcctcaggcgggagaatggtgtgaacccgggaggcggagcttgcagtgatccgagatcatgccactgcactccagcctgggcgaaagagcgagactccccgtctcaaaaaaaatttttttgaaaaattcgtaaaccatacttttaagattatttcagtggatttttaaaaatcttgtacagaaatcagggttcttagctagcagtttttctcccacgcagtcactgtaatgtgactatgtattgctagattgaataagaaaataaaataatatcttcttccttgaaaaaaaaaaaaaaaaaaaaaaaaa

SEQ ID NO: 3014 - DNA, 1400 bp, Homo sapiens
gcccagctcgccagggatgtgggcagagcaccagcctgggcatcaggaagccaagtttcaaggactgtctttgagtctgtctgtatgaccttgggcctgccacttctcacagaccctaggtatccacagctgtgacatgggggcaagcggctttgtttcagcctaacccaggagcttagtaaaaattgcataagaccagggggaagagtgtcagcgtggggtgggaattcccgcggcctccacctgcttgctaggggcaggatctcattcaggctgccctggaagcacctgcttggccctgccaccttcctccaggggagggccagatggcatcctggcttggggcgggtgggacctacccaggctctgagactttactggcctatgcctgaggcctcttttcctttaactccctaaattatgatgactccaagtccaagcccacccttcccaaagattgggaggttccgccgttcccagaggctcctcctgcggtgctcccaagacttccatagaccatctggaccagtagcccatcccgcagttttcttgggggcagaggaaaacgcttctttctcctccagctgaatcagctggatcccagtgtcctggctgtttggtgattgggcaagattgaatttgcccaggtaggcgtgagagtgtgggttttaaattcgaagctcaggccatagtttcagagaatcacccttaccccagaccttcatgagacagtgctcatgaagccagtgcgtttcccagaacgaacactaggcggcaccgttggtccacactcagaggcccttggcgccaagactgcatctagaatcgctcaaacacctgtttgcagaccccatgcaccagctggaggggccgtaactgcaggactgcgcctactgagtgacccatttcctccaggaggaaaggcaagacacgcttacacggccatttgtctcttttcccaatgcggcggtgcactttcgctcttgggggctgcaccccagacatagctggcaccagagcagggtgctcaggtggtgggtgctcagggccctgccccaggccactgggccgttttgatgacctcgaaggtcacaggcagaaaataggagcaggatttcccctggggaaaagttctcctgggacatcttctgctcttctgtacatttctagatgcaaataactccttcaccaggcagtgagtggcgtaggctctggagccaggctgcctgggctccaatgccagctctgccacttgctagctgtgagactgtggacaaaccactcagcctctgtgtgcctcagttttcctatttgtaaaatagaggccatagtggtacctattttgaagactaagtaaaagaattcaaataaagagacttggcacagagtaagtgctcagt

SEQ ID NO: 3015 - DNA, 600 bp, Homo sapiens
tggatgtgaccgtcaaaatgcgccccatatcactgcaacacctacaagttttcttgcatggggtgctcagactttcacctctggcaagtattactgggaggtccatgtgggggactcttggaattgggctttcggtgtttgtaataagtactggaaagggaagaatcagaatggcaatatatatggagaggagggactctttagtcttgggattgttaagaacgacattcagtgcagtctctttaccacctccccagttacactgcagtatgtcccaagacctaccaaccatgtaggattattcctggattgtgaagctagaactgtgagcttcgttgatgttaatcaaagctcccctatatacaccatccctaattgctccttctcacctcctctcaggcctatcttttgctgtattcatctctgaccagagacaaatcagaaatgtgtttatctgctgtgggaacccctttatcccataaagccctcttccttgtgccttatcaaacaggacaaataggttctgttttatgtcttgaattgcattctaatgttattaaaactcatttattgtgttactattaaatgtggtaaaaccac

SEQ ID NO: 3016 - DNA, 600 bp, Homo sapiens
ggaccccttaacctacccgtgccctgcaagaggctggcttcttggtcaatcttgactagattaagagtcaatctgcaagccattttatggtctccctggccagctgggggctgtagggccctgctgggcttggtcgtctttcactcctgaggcctgctctgtggctccatagctcagtcctccatcactctgcgtggatcctgggtactttggacagtgagggttcgatccaattttaggggtagggttgggggtgggagtgggagtgtgggttggcaggaggaagaatgagtctactttggagacaattaagtcatggtacgtttcctaaagatagggaacggaagaaaagcaagagaactgtttaatatgctgattattttagtctattttagaccttgagtaaactaatttagcttctaggatccaagtttccttatttgtgaaacaggaaaaaaaaattcttgtaggtattactgtttgtgtgtttgagtttactgcacatgtttgtgtttgtgtatatgtgtcttttaaaaatactatatataaagaagattctggttgttattttagacataaacgaatatatgtacctttcac

SEQ ID NO: 3017 - DNA, 600 bp, Homo sapiens; identical to SEQ ID NO: 3016

SEQ ID NO: 3018 - DNA, 600 bp, Homo sapiens
ggtgatggtgctgctggccggcgccaactgcgtgctggacccgctggtgtactactttagcgccgagggcttccgcaacaccctgcgcggcctgggcactccgcaccgggccaggacctcggccaccaacgggacgcgggcggcgctcgcgcaatccgaaaggtccgccgtcaccaccgacgccaccaggccggatgccgccagtcaggggctgctccgaccctccgactcccactctctgtcttccttcacacagtgtccccaggattccgccctctgaacacacatgccattgcgctgtccgtgcccgactcccaacgcctctcgttctgggaggcttacagggtgtacacacaagaaggtgggctgggcacttggacctttgggtggcaattccagcttagcaacgcagaagagtacaaagtgtggaagccagggcccagggaaggcagtgctgctggaaatggcttctttaaactgtgagcacgcagagcaccccttctccagcggtgggaagtgatgcagagagcccacccgtgcagagggcagaagaggacgaaatgcctttgggtgggcagggcattaaactgctaaaagctg

SEQ ID NO: 3019 - DNA, 465 bp, Homo sapiens
  misc_feature (80)..(80): n is a, c, g, or t
  misc_feature (136)..(136): n is a, c, g, or t
  misc_feature (193)..(193): n is a, c, g, or t
  misc_feature (233)..(233): n is a, c, g, or t
  misc_feature (296)..(296): n is a, c, g, or t
  misc_feature (387)..(387): n is a, c, g, or t
  misc_feature (442)..(442): n is a, c, g, or t
cagacttcgaattctactgactcgacccacgcgtccgcaggaagctgcttcggggggtgagcaaactttttaaaatgcanaaattatgatctacacccgtttcttaaaaggcagtctgaagatggccaattacacncgggcaccagaggatgaatatgatgtcctcatagaaggtgaactggagagcgatgangcagagcaatgtgacaagtatgacgcccaggcactctcancccagctggtgccatcactctgctctgctgtgtttgtgatcggtgtcctgcacaatctcctgnttgtgcttatcctggtaaaatataaaggactcaaacgcgtggaaaatatctatcttctaaacttggcagtttctaacttgtgtttcttgcntaccctgcccttctgggctcatgctgggggcgatcccaagtgtaaaattctcaantggactgtacttcgtggggcctg

SEQ ID NO: 3020 - DNA, 465 bp, Homo sapiens; identical to SEQ ID NO: 3019
  misc_feature (80)..(80): n is a, c, g, or t
  misc_feature (136)..(136): n is a, c, g, or t
  misc_feature (193)..(193): n is a, c, g, or t
  misc_feature (233)..(233): n is a, c, g, or t
  misc_feature (296)..(296): n is a, c, g, or t
  misc_feature (387)..(387): n is a, c, g, or t
  misc_feature (442)..(442): n is a, c, g, or t

SEQ ID NO: 3021 - DNA, 561 bp, Homo sapiens
atggcccagtttctctcagtgttctctgggaagctggattgggacaacaggacagagaccccaggacaagtgaacatgagtcatacgggaggcgagtggttggtgggcaaacaggtggttttcatcctgacagtgctggtggccttctgtgggctggtgggcaatggtgtggtctgctggcttttctgcttccaggtcaggagcagcccctacgtgacctatgtccttaacctggccgctgctgatatggtcaacctctcctgtgtaactgtgatcctgttggagaaaatcctcatgctgtatcaccaggtgacattgcaggtggccatgtttctggagcctgtgtcctatttctctgacacaaactgttcacccatccggatctaccacattgtccgctttgtggccatcagcttcctggtttggggcctgcccttagttgtccttgtgtacctgccaggaaaagaatacctgacctttgcctttgaccttctgttgctgctgtccatggtagtcagtatggctcaaccagccatctacttcttggctggctacctttga

SEQ ID NO: 3022 - DNA, 561 bp, Homo sapiens; identical to SEQ ID NO: 3021

SEQ ID NO: 3023 - DNA, 594 bp, Homo sapiens
atggagaatgtgtctgcattgtcactgttgactgtggagagtcccacgtccatgtttgactattgtgatgactctttggagagggtcaagtctgctcttgacatcttttccatgatcatctacacagtgactttcttcctaggcttggctggcaatggccttgtcatttgggtagttggattccacatgtcctgcacagtcaacacgtgtcttccttctgaccctcatctccatggaccactgacttgtgatcctgtggccaatctagtcctggaacaattgcacaccagcaaaggcaactctggggcccttgaggacctggcttttggcaatttgtttctctgttccctacttgatcttcaaggaaactcgtggtggaaagtgtcaccctctttgtacaaccagtatgatctgcagaatgaaactcaaggaagtcaccaactttggaaagagattatcattccatggcaccaaacgctggtcacaacagcccactttttctttggcttctttctccctctggctatcatcactggctactacatccttgtagccttgaagttaagagaaaggcagctggttaagtttagctga

SEQ ID NO: 3024 - DNA, 513 bp, Homo sapiens
atgacctttgcctaccttgtaggcctgagcatgctgagtgccatcagtactgagtgctgcctgtctgtcctgcggcctatctggtactgctgctgctgcccaagaaacctgtcaactgtcatgtgtgccctgccctgggccctgtccctgctgctgaacaccctggaagggaagttttgtggcttcttagttagtaatggtgactatgtgctgctcttccttatttgcagcctgcccttaggcattaagtggttcctattattctggatcctcgtggattttgatatcttcctttgtcatttgcaaccagtttcagatgtcctgtcctctcttaacagcagtgccaaccccatcatttacttcttcatgggctcctttaggcagtgtcaaaattggcagaacctgaagctggttctccagaaggctctgcaggacacacctgaggtggatgaaggtggagggcggcttcctcaggaaaccctggagatgtcgggaagcagattggagcagtga

SEQ ID NO: 3025 - DNA, 513 bp, Homo sapiens; identical to SEQ ID NO: 3024

SEQ ID NO: 3026 - DNA, 600 bp, Homo sapiens
ctgctggcgctgctgttcgtgggctgcgagctgccctactttgccgcccggctggcggccgcgtggtcgtccgggcccgcgggagactgggagggagagggcctgtcggcggcgctgcgcgtggtggcgatggccaacagcgctctcaatcccttcgtctacctcttcttccaggcgggcgactgccggctccggcgacagctgcggaagcggctgggctctctgtgctgcgcgccgcagggaggcgcggaggacgaaggaggggcccccggggccaccaggcgctctaccgccaacgctggccccaccctcattatcaccatgctcggcgggaaccgctggacgagggcggcttgcgccccacccccctccgcgccccagacccctgccttgctcctgcgaaagtgccttctaggtgcttggtggtcagagacgggtcatctgtcgctaaggcgcaacctccagggaactcgaggcctgccagggtctgtccagatcacaaggggcaggagagtctgttatcacccaaataggaaacgactagaagagaaaccagatctacacacttgcagtttggaagaaatcaaagttgccctataa

SEQ ID NO: 3027 - DNA, 600 bp, Homo sapiens; identical to SEQ ID NO: 3026

SEQ ID NO: 3028 - DNA, 378 bp, Homo sapiens
atcgtgatgaactacgtggagcacgacctcaagagcctgatggagaccatgaaacagcccttcctgccaggggaggtgaagaccctgatgatccagctgctgcggggggtgaaacacctgcacgacaactggatcctgcaccgtgacctcaagacgtccaacctgctgctgagccacgccggcatcctcaagcctcccacagcttcgcgggcactggccttcctgaacacctctcctggcgtcttaggaatactccacggccgtggacatgtggtcagtgggctgcatcttcggggagctgctgactcagaagcctctgttccccgggaattcggaaatcgatcagatcaacaaagtgttcaaggtgggtctggccct

SEQ ID NO: 3029 - DNA, 1400 bp, Homo sapiens
aatgcagatcagacccattgtgatgtcacagaaagatggggacaggccaaagaaaaaagtgactttcaactcttcttccatcatttttatcatcaccagtgatgaatcactgtcagttgacgacagcgacaaaaccaatgggtccaaagttgatgtaatccaagttcgtcctttgtaggaatgaagaatggcaacgaaagatggggccttaaattggatgccacttttggactttcatcataagaagtgtctggaatacccgttctatgtaatatcaacagaaccttgtggtccagcaggaaatccgaattgcccatatgctcttgggcctcaggaagaggttgaacaaaaacaaattcttttaattcaacgggtgctttacataatgaaaaaaccacttgtggcacacgatgggcatctaacatcatcatcttctaatgtgttggagattttcatttcaaatatattttttaaattactctattttccaaaacacgtaatgcatttttctcgaaaataccttactgtaaaaataactgtcgcgtacacatgtgtgaagtagctagaacatactgaattttttttgtactgttggactctattcagtgtcatgtcctatatctgatcaagttatcaaggagataattctagaatgaaaaagaaaatcctcttgttggaaacaaaagacgttttatatgtgcagtatgacaaagaggagtttcagagacaactttgaatccttgtcagcctggagaccagcaccagaggaatctacaaggcaaactcccatatatttgcttcccccaaattgctgcccctacagactcaaagctctttttctttgttttgttgtttctctaaaaatttactgttctttgtcgatgctatataagccagggagttctaagacgccagctctttgagatttgctcattcccctgtatttcccacatatatattacatatacccgctaataaatttatgtttgtttttctcttgtcaatctgtcttttgttataggggccccagccaaggaacctaaagtgggtagaaggaaaaattattttttctttccctacaaactgaacatggattattagaactcaaggttttcattgacaatatagaaaagaaacactgaatcattttattttattgcccaatttttatttcttatatgactctagtgtttcatcttcataattaatcatgtttgaaggatttctgagtgactcagcagcctgttaaagaaggatgaaccaaagaaaacatttcactaaatgtgcttttaaaaatcaagtgtattgctggttctgctgcagtatgtagtcgaagaataaattagtaaattgcttctgagggtctgaaattgaataaagtaatggctttgtatttctat

SEQ ID NO: 3030 - DNA, 1400 bp, Homo sapiens; identical to SEQ ID NO: 3029

SEQ ID NO: 3031 - DNA, 600 bp, Homo sapiens
gcgggcaaggcagacccagccacacctggccgcgtgcacttccaccccgactcgccagccaagggtgcccagtggatgcgccagattgtgtcctttgacaagctcaagctgaccaacaacctgctggatgacaatggccacatcattctcaactctatgcaccgctaccagccccgtttccacgtggtcttcgtggacccacgcaaggacagtgagcgctatgcccaggagaacttcaagtccttcatcttcacagagacccagttcacagcagtgacagcctatcagaaccacaggatcacccagctgaaaatcgccagcaacccttttgccaaaggctttagagagagtgacctggactcctggcctgtgccacggcccctgctcagtgtcccagcccggagtcacagcagcctcagtccctgtgtgctgaagggtgccacagacagggagaaagaccccaacaaagcttcagcttccacctccaagacccctgcttggctccatcatcaggatcaaggaggcctgcctccatccagctgggctggggctcctgtcccccactgtggtgtgcctggggcctggccaggactcccagtg

SEQ ID NO: 3032 - DNA, 600 bp, Homo sapiens
ttcaccatcttcctgtcctgcctgacagttcgctcattccaactaatcatcatcttcaagttttccaccaaggtacctacattctaccacgcctgggtccaaaaccacggtgctggcctgtttgtgatgatcagctcagcggcccagctgcttatctgtctaacttggctggtggtgtggaccccactgcctgctagggaataccagcgcttcccccatctggtgatgcttgagtgcacagagaccaactccctgggcttcatactggccttcctctacaatggcctcctctccatcagtgcctttgcctgcagctacctgggtaaggacttgccagagaactacaacgaggccaaatgtgtcaccttcagcctgctcttcaacttcgtgtcctggatcgccttcttcaccacggccagcgtctacgacggcaagtacctgcctgcggccaacatgatggctgggctgagcagcctgagcagcggcttcggtgggtattttctgcctaagtgctacgtgatcctctgccgcccagacctcaacagcacagagcacttccaggcctccattcaggactacacgaggcgctgcggctccacc

SEQ ID NO: 3033 - DNA, 600 bp, Homo sapiens; identical to SEQ ID NO: 3032

SEQ ID NO: 3034 - DNA, 600 bp, Homo sapiens
ctgacaggaacatgctactgaagtttattttaccattgactgctgccctcaatctagaacgctacacaagaaatatttgttttactcagcaggtgtgccttaacctccctattcagaaagctccacatcaataaacatgacactctgaagtgaaagtagccacgagaattgtgctacttatactggttcataatctggaggcaaggttcgactgcagccgccccgtcagcctgtgctaggcatggtgtcttcacaggaggcaaatccagagcctggctcctggtaaagctgttggaatgagtatgtgattctttttaagtatgaaaataaagatatatgtacagacttgtattttttctctggtggcattcctttaggaatgctgtgtgtctgtccggcaccccggtaggcctgattgggtttctagtcctccttaaccacttatctcccatatgagagtgtgaaaaataggaacacgtgctctacctccatttagggatttgcttgggatacagaagaggccatgtgtctcagagctgttaagggcttatttttttaaaacattggagtcatagcatgtgtgtaaactttaaatatgca

SEQ ID NO: 3035 - DNA, 600 bp, Homo sapiens; identical to SEQ ID NO: 3034

SEQ ID NO: 3036 - DNA, 600 bp, Homo sapiens
agccctggctctgtcaggcagaacagcaggacaccccgaagccctctggactgtggctccagtcccaaagcacagttcttggttgaacatgaaacccaggacagtaaagatctgtctgaagcagcttcacactctgcattacagtctgaattgagtgctgaggcaagaagaatactggcggccaaagccctagcaaatttaaatgaatctgtagaaaaggaggaactaaaaaggaagaaagagcttaattcccgagatggagcttgggaaagaatatgtggcgagagggaccctttcatcctatgcagcttgatgtggtcttgggtggagcaactgaaggagcctgtaatcaccaaagaggatgtggacatgttggttgacaggcgagcagatgccgcagaagcactttttttattagagaagggacagcaccagactattctctgcgtgttgcactgcatagtgaacctgcagacaattcccgtggatgtggaggaagctttccttgcccatgccattaaggcattcactaaggttaattttgattctgaaaatggaccaacagtttacaacaccctgaagaaaatatttaagcacacg

SEQ ID NO: 3037 - DNA, 600 bp, Homo sapiens; identical to SEQ ID NO: 3036

SEQ ID NO: 3038 - DNA, 600 bp, Homo sapiens
tctctcatacacacctgcctcatggctcaactgaccttctgcgccggctctgaaatctcccacttcttctgtgacctcatgcccctgctgaagctctccggctcagacacgcacaccaacgagctggtgatctttgcttttggcattgtcgtgggcaccagcccattctcctgcatccttctctcgtacatccgcattttctggacagtctttaagatcccttctactcggggcaagtggaaagccttctccacctgtggcttacacctcactgtggtgtcactgtcctatgggaccatctttgctgtgtacttacagcccacatcccccagctcctcccagaaggacaaggcagccgccctaatgtgtggggtgttcatccccatgctcaacccctttatctacagcatacggaacaaggatatgaaggcagccctggggaagctcatcggcaaagtggccgtcccctgtcctaggccagaacagttattggatgtttatcatgttccaggatcactgttggctgctagggacacagagatgcatcccatcccctaccctggaggagttcagagtctagctgggaacagagacatggaa

SEQ ID NO: 3039 - DNA, 600 bp, Homo sapiens; identical to SEQ ID NO: 3038

SEQ ID NO: 3040 - DNA, 600 bp, Homo sapiens
aggctaaacactatgtaaatgtgaatggaaacttggaaatactcgtttttataaactacaaaaactttttgttgtttatcaggaaatccatatttattttgtaattaactgtcaagcctgtggatgatttttttgaacttggtagttcataaaggtttacagtgaataaaaggatatcatcttgagtatagcaatatcaaaaggaattcagtagttactgctgtttaggaatataaggttaagatatcatatgggtcaggtcattttttttttctgtgctggttgccacatcttagcaagcaccaaaaaactaaagcagtttttaaaccgatatttacgtaaagaaaatcataaaatccaatgcttctgcatactgtgttatgttacagtccagttttgtgtgctttactacacagtttggttacaggacttctgtgcattgtaaacataaacagcatggaaaaggttaaatacctgtgttcagattgtaagatctagtccggacttgctgtgtatattgtaacgttaaatgaaaaaagaacccccctttgtattatagtcatgcggtcttatgtatgataaacagttgaataatttgtc

SEQ ID NO: 3041 - DNA, 600 bp, Homo sapiens; identical to SEQ ID NO: 3040

SEQ ID NO: 3042 - DNA, 600 bp, Homo sapiens
tacgccacgggcggccgcaaccgagccggcagcctggcctccgtggagcggtactgcccccggcgcaatgagtggggctacgcctgctcgctgaagcgccgtacctggggccatgctggggccgcctcagggggccgcctctacatctcgggtggctacgggatctcagtggaggacaagaaggccctgcactgctacgaccccgtggccgaccagtgggagttcaaggcgcccatgagcgaaccccgcgtgctacacgccatggtgggtgccggcggccgcatctatgccctcgggggccgcatggaccacgtggaccgctgcttcgacgtgctggctgtggagtactatgtgccggagacggaccagtggaccagcgtgagccccatgcgggccggccagtcagaggccggctgctgcctgctggagaggaagatctacatcgtcgggggctacaactggcgtctcaacaacgtcacgggcatcgtacaggtgtacaacacggacaccgacgagtgggagcgggacctgcacttcccggagtccttcgcaggcatagcctgcgcccccgtcctgctgccccgggccgggaccaggagg

SEQ ID NO: 3043 - DNA, 600 bp, Homo sapiens; identical to SEQ ID NO: 3042

SEQ ID NO: 3044 - DNA, 600 bp, Homo sapiens
agcgaggaggctagcatctacgacaagcgctgcgacctgtggagcctgggcgtcatcttgtatatcctactcagcggctacccgcccttcgtgggccgctgtggcagcgactgcggctgggaccgcggcgaggcctgccctgcctgccagaacatgctgtttgagagcatccaggagggcaagtacgagttccccgacaaggactgggcccacatctcctgcgctgccaaagacctcatctccaagctgctggtccgtgacgccaagcagaggctgagtgccgcccaagtcctgcagcacccctgggttcaggggtgcgccccggagaacaccttgcccactcccatggtcctgcagaggaacagctgtgccaaagacctcacgtccttcgcggctgaggccattgccatgaaccggcagctggcccagcacgacgaggacctggctgaggaggaggccgcggggcagggccagcccgtcctggtccgagctacctcacgctgcctgcagctgtctccaccctcccagtccaagctggcgcagcggcggcaaagggccagtctgtcctcggccccagtggtcctggtgggagaccacgcc

SEQ ID NO: 3045 - DNA, 600 bp, Homo sapiens
agtcgtagcactttccacggccagccccgggaacggcgaaccgcaacatataatggccctcctgcctctcccagcctgtcccatgaagccacaccattgtcccagactcgaagccgaggctccactaatctctttagtaaattaacttcaaaactcacaaggagatttcttttctctttccctcttctctctgcttctacattctgttcattgaggcttccaactgaatatgagaggaacgggagatatgagggctcaagtcgcaatgtatctgctgagcaaaaagatgaaaacaaagaagcaaagcctcgatccctacgcttcacctggagcatgaaaaccactagttcaatggatcccggggacatgatgcgggaaatccgcaaagtgttggacgccaataactgcgactatgagcagagggagcgcttcttgctcttctgcgtccacggagatgggcacgcggagaacctcgtgcagtgggaaatggaagtgtgcaagctgccaagactgtctctgaacggggtccggtttaagcggatatcggggacatccatagccttcaaaaatattgcttccaaaattgccaatgagctaaag

SEQ ID NO: 3046 - DNA, 600 bp, Homo sapiens; identical to SEQ ID NO: 3045

SEQ ID NO: 3047 - DNA, 600 bp, Homo sapiens
gccatcccatcggcttactttgcaacagaaacggtcctctttattgtcaagagccaggagaagatcttctgtggccagatctggcctgtggatcagcagctctactacaagtcctacttcctcttcatctttggtgtcgagttcgtgggccctgtggtcaccatgaccctgtgctatgccaggatctcccgggagctctggttcaaggcagtccctgggttccagacggagcagattcgcaagcggctgcgctgccgcaggaagacggtcctggtgctcatgtgcattctcacggcctatgtgctgtgctgggcacccttctacggtttcaccatcgttcgtgacttcttccccactgtgttcgtgaaggaaaagcactacctcactgccttctacgtggtcgagtgcatcgccatgagcaacagcatgatcaacaccgtgtgcttcgtgacggtcaagaacaacaccatgaagtacttcaagaagatgatgctgctgcactggcgtccctcccagcgggggagcaagtccagtgctgaccttgacctcagaaccaacggggtgcccaccacagaagaggtggactgtatcaggctgaag

SEQ ID NO: 3048 - DNA, 1400 bp, Homo sapiens
agggcgcctactcttcagggtctaaagatcaagtgggccttggatcgctaagctggctctgtttgatgctatttatgcaagttagggtctatgtatttatgatgtctgcaccttctgcagccagtcagaagctggagaggcaacagtggattgctgcttcttggggagaagagtatgcttccttttatccatgtaatttaactgtagaacctgagctctaagtaaccgaagaatgtatgcctctgttcttatgtgccacatccttgtttaaaggctctctgtatgaagagatgggaccgtcatcagcacattccctagtgagcctactggctcctggcagcggcttttgtggaagactcactagccagaagagaggagtgggacagtcctctccaccaagatctaaatccaaacaaaagcaggctagagccagaagagaggacaaatctttgttcttcctcttctttacatacgcaaaccacctgtgacagctggcaattttataaatcaggtaactggaaggaggttaaacacagaaaaaagaagacctcagtcaattctctacttttttttttttttccaaatcagataatagcccagcaaatagtgataacaaataaaaccttagctattcatgtcttgatttcaataattaattcttaatcattaagagaccataataaatactccttttcaagagaaaagcaaaaccattagaattgttactcagctccttcaaactcaggtttgtagcatacatgagtccatccatcagtcaaagaatggttccatctggagtcttaatgtagaaagaaaaatggagacttgtaataatgagctagttacaaagtgcttgttcattaaaatagcactgaaaattgaaacatgaattaactgataatattccaatcatttgccatttatgacaaaaatggttggcactaacaaagaacgagcacttcctttcagagtttctgagataatgtacgtggaacagtctgggtggaatggggctgaaaccatgtgcaagtctgtgtcttgtcagtccaagaagtgacaccgagatgttaattttagggacccgtgccttgtttcctagcccacaagaatgcaaacatcaaacagatactcgctagcctcatttaaattgattaaaggaggagtgcatctttggccgacagtggtgtaactgtatgtgtgtgtgtgtgtgtgtgtgtgtgtgtgtgtgtgggtgtatgtgtgttttgtgcataactatttaaggaaactggaattttaaagttacttttatacaaaccaagaatatatgctacagatataagacagacatggtttggtcctatatttctagtcatgatgaatgtattttgtataccatcttcatataataaacttccaaa

SEQ ID NO: 3049 - DNA, 600 bp, Homo sapiens
tggtcaatccctttgggggtcggggcctggcctggcagtggtgtaagaaccacgtgcttcccatgatctctgaagctgggctgtccttcaacctcatccagacagaacgacagaaccacgcccgggagctggtccaggggctgagcctgagtgagtgggatggcatcgtcacggtctcgggagacgggctgctccatgaggtgctgaacgggctcctagatcgccctgactgggaggaagctgtgaagatgcctgtgggcatcctcccctgcggctcgggcaacgcgctggccggagcagtgaaccagcacgggggcccgcgggaggactcagactccagcacttccagcagcgcctgccctctatggacgacagcccggagctgcccacgggctgcagccagtatgccagggagctgccctcttcttccacaacagctggctctggggttctcaagatttattcaggatcgtgttaacggaggcggtgggaggatagggtccctgacgtgccggggacacacacagagaaccctccccgcccccgcaagggaggggggaggctcgctttttcttaaaaatataaatgtatttatctgca

SEQ ID NO: 3050 - DNA, 600 bp, Homo sapiens; identical to SEQ ID NO: 3049

SEQ ID NO: 3051 - DNA, 600 bp, Homo sapiens
ttccgctgccagtttgccaacggcatcttccagctgtggtttcacttcaagcgctaccgctatcggcggccgggaccctgctggcgcccgatccgccactgcagaagagaccctctgtggacacccacactctgcagggactggcccccaactcaccccgtgctggctggtggggtccatttccccgcagcggggatccccccacctggcctgctcacggggccttggagcatgagaccagtgaccccgagttttgcccatatcaggacagtggctccttctcactcccctttctcaggccaggagggccgagggccacacgggtgccacagcccaggtcggagtggcccagccggcaggcttgttcttcagcatccgacgggaacatctccaacagaagcaaaacggaaagtgcctcccggacccccagagggccacccaacctcaccagtcaccagccccagaccacccacagcccctcccagacaccccgcctcatctggaaatagttccgtttgtttctctaaaaagacttgtaggtgggaaaaaaaatcttttgttctcatggaattggcctattggcaagatcgcatgtttttt

SEQ ID NO: 3052 - DNA, 600 bp, Homo sapiens; identical to SEQ ID NO: 3051

SEQ ID NO: 3053 - DNA, 600 bp, Homo sapiens
tttcttccttggcccttttggactaatgttactgtccaagttctttctcaagaaaccacatctggttcagaagagtgtcaagttggactctttgaactctgttgctgtctgagcaatcgtggtgcctagactttgcattccttgttctgttgacctgcatacatgtgagagctatttctttaagaactatataggctgtgaaaacgcactttctttcccccaaagagctgggaatttatgaagttatggcaatgaactgcagcatgctgggacaattatttgactacttttttttgtaatattgtcaaatgtctctatggattctgacagagatttctttttgttttgttattcttttggttgtcagtttcattttaacgagtgtaactagtaacattttattctttggattttgtataattacagtacatgattgtgtattgtgacatgaatgctgtcaaaatgacattgatggcattgtgaagcctgttactttgtgtcacttcctgataaataagaggtgatgacatggatatacaacagaaaacactttgagttgaaagtaaacacaagctggctgcttccctgtggcaactgtgg

SEQ ID NO: 3054 - DNA, 1400 bp, Homo sapiens
cacagtattccattttggaggatttggggtgtttactttttaaattcttgaacaacttaacctccatgaggctttgtgaagtcagctgtgaccaccctcctcttactgtgttctcagtattcattcacttccagggaagaatgacagccacagggagatggtggtgggcaagaatgagagtcccaggatccagatttagcctcagatcttccccattcaggaagggttttccatttaacaagagcactagtatgaaaacattagggacaaatctcccatgtctttgaaattcggattctcctcttgagatccccttcctcacctgccaatcaactttataaggccacaagtggtcactggttttccttccacaggtttgaggttctcagctttccttaagcgacccagcagctccgctgttttcagagtgaatatgttaagctttgatgagattctattttcagtaagttagtgcttctgggacacttggagaaagctgtgagagtcattgtctacgcaaagaacaacgaagctgatcctaaaagtgatccaatctaagaaaatggtaaaacgagctctggccacagcacagaattttatgtgaggaactcagatttttgaagacttaacaattgcagagaaaggttgcagcctgcacaccatagcccacctctctgagcagactttggttttgtgtggtgacgtggcacatgtttgtacactgggatttttcaaaggacgctacgcgagcagactgacttgcctcttctgtgagcactgtggcttttgtcagatggagtgccggtctgcagaggactgctctttcgaatccacagtgttatctgtgtaaatagctttaatttttcttctgtgtcttaggtgaagttttgttcatgtagcaaccaggtagacagtgaccaaataaggctgtaaatgtgctgtagttttctactgtgatgtacttgaaggagaacctgtgtcctctacttttctgatctcccacaagtattttgtgtttgtttcctgagtcctgaggttattattttactcctgttttgcccccagttttctttgttttttttctggagacccagggaggcccatggtggagatcatttgtaaggaatggatcatggtctgggtttccaaaactaccctagtacagtgaatgagagaaatctgcctggaaattgtttcagaaccatgtacctttatgctttgtgattgtgaaacattgacttttttgtaaccccaaaatgaaaactgtttagtaaaggggatctattttgtgtgttttgaaacttaggtgcaatgtcccctggaaaaagctaaagaaatgtatatgttcaatgacattttaaaataaaatattatatatatgtatatacgacatattcagc

SEQ ID NO: 3055 - DNA, 600 bp, Homo sapiens
cagacggaggcgcagtacaagttcatctacgtggccatcgcccagttcattgaaaccactaagaagaagctggaggtcctgcagtcgcagaagggccaggagtcggagtacgggaacatcacctatcccccagccatgaagaatgcccatgccaaggcctcccgcacctcgtccaagagcttggagtctagtgcagggaccgtggctgcgtcacctgtgagacggggtggccagaggggactgccagtgccgggtccccctgtgctgtctcctgacctgcaccaactgcctgtacttgcccccctgcacccggctgcagacacaaggaggatgtgtatgagaacctgcacactaagaacaagagggaggagaaagtgaagaagcagcggtcagcagacaaggagaagagcaagggttccctcaagaggaagtgagcggtgctgtcctcaggtggccatgcctcagccctgaccctgtggaagcatttcgcgatggacagactcacaacctgaacctaggagtgccccattcttttgtaatttaaatggctgcatcccccccacctctccctgaccctgtatatagcccagccaggcccca

SEQ ID NO: 3056 - DNA, 600 bp, Homo sapiens; identical to SEQ ID NO: 3055

SEQ ID NO: 3057 - DNA, 558 bp, Homo sapiens
gcctccgcgaccatggggcgggccagtgagttcgctaatgagctcgaggaagccacggcgcggcccaccaggttccaaaacaaggaaatgaaggagggaggcgggactgggggtgcctgcgggagccgccgccgccgtcgcggaggaggaggaggaagaggcggctgttggagaagtggagcggcggtcgcggggggaggaggaggagggactgagcggcggcggcccccgcgtcccgtgcctctatgggggaagcagacaatggattatgatttcaaggcgaagctggcggcggagcgggagcgggtggaggatttgtttgagtacgaagggtgcaaagtgggacgcggcacctacggtcacgtctacaaggcgaggcggaaagatggattccaggagggcttcgtgtatggacctcaagcgttggaggtagcagacttttcagcagaaggtaaagcagagtattgccttctggtgtcattaaaagatgaaaaggaatatgcattgaagcaaattgaaggcacaggaatatccatgtcggcttgtagagagattgca

SEQ ID NO: 3058 - DNA, 558 bp, Homo sapiens; identical to SEQ ID NO: 3057

SEQ ID NO: 3059 - DNA, 600 bp, Homo sapiens
aatggcaagagaagcaaccggaccctgagagaagaagtgttaaggaacctgcgcagtgtggttagcttgacctttctgttgggcatgacatggggttttgcattctttgcctggggacccttaaatatccccttcatgtacctcttctccatcttcaattcattacaaggcttatttatattcatcttccactgtgctatgaaggagaatgttcagaaacagtggcggcagcatctctgctgtggtagatttcggttagcagataactcagattggagtaagacagctaccaatatcatcaagaaaagttctgataatctaggaaaatctttgtcttcaagctccattggttccaactcaacctatcttacatccaaatctaaatccagctctaccacctatttcaaaaggaatagccacacagacagtgcttccatggacaagtccttgtcaaaactggcccatgctgatggagatcaaacatcaatcatccctgtccatcaggtcattgataaggtcaagggttattgcaatgctcattcagacaacttctataaaaatattatcatgtcagacaccttcagccacagcacaaagttt

SEQ ID NO: 3060 - DNA, 600 bp, Homo sapiens
cagatgctggcaaatcaatggggcccaaaaaaatctattacttatggagggtgtgtactccaattcttttttgtccttgacttgggagccacagaatgtcttctgttggctgtgatggcctatgatcgttatgctgctgtctgtcaacctcttcactacaccttaaaatgcaccctcagctttgccactgcctggttgagtggtcttgccagtgccttaattgtttgctccttgactttgaagttgccaagatgtgggcaccgggaagtggataattttttctgtgagatgccagcattgatcaagatggcttgtgtctattcaaaagtaattgagattgttgtctttgctttcggagtggtatttcttttcgtacctctatcactaattcttatctcatatggagttatcactcaagctgtaatgaggatcaagtcagcaacaaggttgcaaaagatccttaatacatgtggctcccacctcacagtagtaattctgttttatggaacaatcatttatatatacatgaagccacagaataccatatcccaagatgaagggaagttcttcactcttttacacaatcatcacacccagcct

SEQ ID NO: 3061 - DNA, 348 bp, Homo sapiens
gtgaatatgtctacagacctggagggaacagacatgttggcagagaaggcagaccgaagagaatacattgatctgttaaagaaaatgctcacaattgatgcagataagagaattacccctctaaaaactcttaaccatcagtttgtgacaatgactcaccttttggattttccacatagcaatcatgttaagtcttgttttcagaacatggagatctgcaagcggagggttcacatgtatgatacagtgagtcagatcaagagtcccttcactacacatgttgccccaaatacaagcacaaatctaaccatgagcttcagcaatcagctcaatacagtgcacaatcag

SEQ ID NO: 3062 - DNA, 348 bp, Homo sapiens; identical to SEQ ID NO: 3061

SEQ ID NO: 3063 - DNA, 600 bp, Homo sapiens
ctggacttaccttgcaagcgatcctatctggaagccccctcttcggtgggggaggatcactatttccgttccccccctccctacgaccagcaaatgctgagcccctcctactgcagtgaggtgacccccagagaagcatgtatgtactcaggttcagggcccgagattgccggggtgtctggggtggacgacctgcccccacctccgctgagctgtaacatgtggacttcagtgtcgccgtacaccagctatagcgtgcagacgatggagactgtgccgtaccagcccttccccacgcacttcaccgccaccaccatgatgccgcggctgcccaccctctccgctcagagctcccagccaccaggaaatgcccactttagtgtctacaatcagctctcccagtctcaggtccgagagcgggggcccagcgcctcattcccaagagagcgcggcctcccccaagggtgtgagaggaagccaccctcgccacatctaaatgctgccaatgagtttctctactctcaaaccttctccttgtcccgagaatcttccttacagtaccattcaggaatggggactgtggagaactggactgacgga

SEQ ID NO: 3064 - DNA, 600 bp, Homo sapiens
ggctcatctccagtgacctctagtggaggggccccctctcctttgaactccttactttctccactttgcttttcacctatgtttcatttacctacaagctcccttggaatgccctgtccagaggcatacctgcccaatgtcaacctgcctctatgctacaagatttgtccaactaatttttggcaacagcaacctcttgttttaccggctcctgaaagactagcaagcagcaacagttctcagtctttagccccactcatgatggaagtgcctatgttatcttccctgggggtcaccaattcaaaaagcggttcatctgaagactccagtgatcagtatctacaagcacctaattctaccaatcaaatgttatatggattacagtcacctggaaatatttttctgccaaactccatcaccccagaagcacttagttgctcctttcatccttcctatgacttttatagatacaatttctctatgccatctagactgataagtggttccaaccatcttaaagtgaatgacgacagtcaagtttcttttggagaaggcaaatgtaatcatgttcattggtatccagcaattaaccattacctt

SEQ ID NO: 3065 - DNA, 600 bp, Homo sapiens
gcagccatctgggcctatgcttccttctggaccaccatgcccttggtaggtctgggggactacgtacctgagcccttcggaacctcgtgcaccctggactggtggctggcccaggcctcggtagggggccaggttttcatcctgaacatcctcttcttctgcctcttgctcccaacggctgtgatcgtgttctcctacgtaaagatcattgccaaggttaagtcctcttccaaagaagtagctcatttcgacagtcggatccatagcagccatgtgctggaaatgaaactgacaaaggtagcgatgttgatttgtgctggattcctgattgcctggattccttatgcagtggtgtctgtgtggtcagcttttggaaggccagactccattcccatacagctctctgtggtgccaaccctacttgcaaaatctgcagcgatgtacaatcccatcatttaccaagttattgattacaaatttgcctgttgccaaactggtggtttgaaagcaaccaagaagaagtctctggaaggcttcaggctgcacaccgtaaccacagtcaggaagtcttctgctgtgctggaaattcatgaagaggta

SEQ ID NO: 3066 - DNA, 600 bp, Homo sapiens; identical to SEQ ID NO: 3065

SEQ ID NO: 3067 - DNA, 600 bp, Homo sapiens
tacggcgtggtttatgaggcagtggccgggcgcagcggggcccgggtggcggtcaagaagatccgctgcgacgcccccgagaacgtggagctggcgctggctgaattctgggccctcaccagcctcaagcggcgccaccagaacgtcgtgcagatcctgggttatgctgaggagccctgctatctctggtttgtcatggagttctgtgaaggtggagacctgaatcagtatgtcctgtcccggaggccagacccagccaccaacaaaagtttcatgctacagctgacgagcgccattgccttcctgcacaaaaaccatattgtgcacagggacctgaagccagacaacatcctcatcacagagcggtctggcacccccatcctcaaagtggccgactttggactaagcaaggtctgtgctgggctggcaccccgaggcaaagagggcaatcaagacaacaaaaatgtgaatgtgaataagtactggctgtcctcagcctgcggttcggacttctacatggctcctgaagtctgggagggacactacacagccaaggcggacatctttgccctgggcattatcatctgggcaatgatagaa

SEQ ID NO: 3068 - DNA, 600 bp, Homo sapiens
cgcctcgctggtgcgtgcgtcgtgggccgtgacgcacctgcactcgctgctgcacacgctgctcctctccgcgctctcctacccctaccccacccccgtgcgccccttcttttgcgacatgacggtgatgctgagcttggcgacctcggacacgtccgccgcggagacggccatcttctccgagggcctggccgtggtgttggccccgctgctcctcgtgttccttttcctacgcgcgcatcctggtcgcggtgctcggcttgcgcgcggccggcgccgcgccttctccacctgcggggcccacctagtggcggtggcggtggcggtggcgcttttctttggctctgtcctctccgtgtatttcccgccgtcgtctgcctactcagcccgctacgaccgcctggccagcgtggtctacgctgtcatcacgccgaccttgaaccctttcatcaacagccttcgcaacaaagaggtcaagggcgccctgaaaagggggctcagatggagggctgcaccccaagaggcgtgagggcaaatctggctcactggcattttcatgataacagttacagaaaaaaaaaaccttgttttttggctttc

SEQ ID NO: 3069 - DNA, 600 bp, Homo sapiens
ggcgtgggtcgctacaccgtgcaatacccggggtcctggtgcttcctgacgctgggcgccgagtccggggacgtggccttcgggctgctcttctccatgctgggcggcctctcggtcgggctgtccttcctgctgaacacggtcagcgtggccaccctgtgccacgtctaccacgggcaggaggcggcccagcagcgtccccgggactccgaggtggagatgatggctcagctcctggggatcatggtggtggccagcgtgtgttggctgccccttctggtcttcatcgcccagacagtgctgcgaaacccgcctgccatgagccccgccgggcagctgtcccgcaccacggagaaggagctgctcatctacttgcgcgtggccacctggaaccagatcctggacccctgggtgtatatcctgttccgccgcgccgtgctccggcgtctccagcctcgcctcagcacccggcccagacgggtctcactctgtggcccagcctggagtacagtggcacgatctcggctcactgcaacctccgcctcccgggttcaagcgattctcgtgcctcagcctcccgagcagctgggattacaggcg

SEQ ID NO: 3070 - DNA, 600 bp, Homo sapiens
gacctggagtgtgtgaagtactgcgtggtgtatgataacaacagcagcaccctggagatactcttaaaagatgatgatgatgattcagactctgatggtgatggcaaagatcttgtgcctcaagcagccattgagtatggcaggatcctgacccgcctcacccaccaccccgtctacatcctgaaagggggctatgagcgcttctcaggcacgtaccactttctccggacccagaagatcatctggatgcctcaggaactggatgcatttcagccataccccattgaaatcgtgccagggaaggtcttcgttggcaatttcagtcaagcctgtgaccccaagattcagaaggacttgaaaatcaaagcccatgtcaatgtctccatggatacagggcccttttttgcaggcgatgctgacaagcttctgcacatccggatagaagattccccggaagcccagattcttcccttcttacgccacatgtgtcacttcattgaggtcctgggcctatgtcaagaagtgcaaaaacaacatgtgtccaaatcggggattggtgagccagctgctggaatgggagaagactatccttggagattc

SEQ ID NO: 3071 - DNA, 600 bp, Homo sapiens; identical to SEQ ID NO: 3070

SEQ ID NO: 3072 - DNA, 600 bp, Homo sapiens
tcgcctgccaagggcgcgcagtggatgaagcaaatcgtgtccttcgacaagctcaagctgaccaacaacctactggacgacaacggccacattattctgaattccatgcacagataccagccccgcttccacgtggtctatgtggacccacgcaaagatagcgagaaatatgccgaggagaacttcaaaacctttgtgttcgaggagacacgattcaccgcggtcactgcctaccagaaccatcggatcacgcagctcaagattgccagcaatcccttcgcgaaaggcttccgggactgtgaccctgaggactggccccggaaccaccggcccggcgcactgccgctcatgagcgccttcgcgcgctcgcggaaccccgtggcttccccgacgcagcccagcggcacggagaaaggtggacatgtcctgaaggacaaggaagtgaaagctgagacgtctaggaacacaccagagagagaagtggagcttctgagggatgcaggtggctgtgtgaacctggggctcccctgccccgcagagtgccaacccttcaatacccagggcctggtggctgggaggaccgcaggtgaccgtctttgt

SEQ ID NO: 3073 - DNA, 600 bp, Homo sapiens; identical to SEQ ID NO: 3072

SEQ ID NO: 3074 - DNA, 600 bp, Homo sapiens
aaagaaaggctacacctttgactatgcctatgattgggttgggagacctattcctactccagtagggtcagttcacgtagattctggtgcatctgcaataactcgagaaagccacacacatagggatcggccatcacaacagcagcctcttcgaaatcaggtggttagctcaaccaatggagagctgaatgttgatgatcccacgggagcccactccaatgcaccaatcacagctcatgccgaggtggaggtagtggaggaagctaagtgctgctgtttctttaagaggaaaaggaagaagactgctcagcgccacaagtgaccagtgcctcccaggagtcctcaggccctggggactctgactcaattgtacctgcagctcctgccatttctcattggaagggactcctctttgggggagggtggatatccaaaccaaaaagaagaaaacagatgcccccagaaggggccagtgcgggcagccagggcctagtgggtcattggccatctccgcctgcctaaggctctgagcaggtcccagagctgctgttcctccactgcttgcccatagggctgcctggttgactctccttcccattg

SEQ ID NO: 3075 - DNA, 600 bp, Homo sapiens; identical to SEQ ID NO: 3074

SEQ ID NO: 3076 - DNA, 600 bp, Homo sapiens
cgctccacacccctgcccggccccccaggctccccgcgctcctctggcgggacccccttgcactcgcctctgcacacgccccgggccagtcccaccgggaccccggggacaacaccaccccccagccccggcggtggcgtcgggggagccgcctggaggagtcgtctcaactccatccgcaacagcttcctgggctcccctcgctttcaccggcgcaagatgcaggtccctaccgctgaggagatgtccagcttgacgccagagtcctccccggagctggcaaaacgctcctggttcgggaacttcatctccttggacaaagaagaacaaatattcctcgtgctaaaggacaaacctctcagcagcatcaaagcagacatcgtccatgcctttctgtcgatccccagcctgagtcacagtgtgctgtcacagaccagcttcagggccgagtacaaggccagtggcggcccctccgtcttccaaaagcccgtccgcttccaggtggacatcagctcctctgagggtccagagccctccccgcgacgggacggcagcggaggtggtggcatctactccgtcaccttcactctcatctcgggt

SEQ ID NO: 3077 - DNA, 600 bp, Homo sapiens
agtcccaccgggaccccggggacaacaccaccccccagccccggcggtggcgtcgggggagccgcctggaggagtcgtctcaactccatccgcaacagcttcctgggctcccctcgctttcaccggcgcaagatgcaggtccctaccgctgaggagatgtccagcttgacgccagagtcctccccggagctggcaaaacgctcctggttcgggaacttcatctccttggacaaagaagaacaaatattcctcgtgctaaaggacaaacctctcagcagcatcaaagcagacatcgtccatgcctttctgtcgatccccagcctgagtcacagtgtgctgtcacagaccagcttcagggccgagtacaaggccagtggcggcccctccgtcttccaaaagcccgtccgcttccaggtggacatcagctcctctgagggtccagagccctccccgcgacgggacggcagcggaggtggtggcatctactccgtcaccttcactctcatctcgggtcccagccgtcggttcaagcgagtggtggagaccatccaggcacagctcctgagcactcatgaccagccctccgtgcaggccctggca

SEQ ID NO: 3078 - DNA, 217 bp, Homo sapiens
gcgattttggaatcagtggctacttggtggactctgttgctaaaacaattgatgcaggttgcaaaccatacatggccattgagttggccatccttcgatttccctatgattcatggggaactccatttcagcagctcaaacaggtggtagaggagccatcgccacaactcccagcagacaagttctctgcagagtttgttgactttacctcacagtg

SEQ ID NO: 3079 - DNA, 217 bp, Homo sapiens; identical to SEQ ID NO: 3078

SEQ ID NO: 3080 - DNA, 600 bp, Homo sapiens
aacccccaggaactctggaatgcaggctgccagatggtggccatgaatatgcagactgcagggcttgaaatggacatctgtgatgggcatttccgccagaatggcggctgtggctatgtgctgaagccagacttcctgcgtgatatccagagttctttccaccctgagaagcccatcagccctttcaaagcccagactctcttaaaccaggtgatcagcggtcagcaactccccaaagtggacaagaccaaagaggggtccattgtggatccactggtgaaagtgcagatctttggcgttcgtctagacacagcacggcaggagaccaactatgtggagaacaatggttttaatccatactgggggcagacactatgtttccgggtgctggtgcctgaacttgccatgctgcgttttgtggtaatggattatgactggaaatcccgaaatgactttattggtcagtacaccctgccttggacctgcatgcaacaaggttaccgccacattcacctgctgtccaaagatggcatcagcctccgcccagcttccatctttgtgtatatctgcatccaggaaggcctggagggggatgagtcc

SEQ ID NO: 3081 - DNA, 600 bp, Homo sapiens; identical to SEQ ID NO: 3080

SEQ ID NO: 3082 - DNA, 600 bp, Homo sapiens
accaccatggggctggtggaacaagccgaggcagagatcagcttcagagcctgggctggtcctgacacaggcccagccctgtccacctgccctcagccacgtcccacctatccttggccgcatcctgacccgctgcctcccgtgtttcctcaggagtcttctgacagtgccaataccaccatagaggatgaagacgctaaagcccggaagcaggagatcattaagaccacggagcagctcatcgaggccgtcaacaacggtgactttgaggcctacgcgaaaatctgtgacccagggctgacctcgtttgagcctgaagcactgggcaacctggttgaagggatggacttccacagattctacttcgagaacctgctggccaagaacagcaagccgatccacacgaccatcctgaacccacacgtgcacgtcattggagaggatgccgcctgcatcgcttacatccggctcacgcagtacattgacgggcagggccggccccgcaccagccagtctgaggagacccgcgtgtggcaccgcgacggcaagtggcagaacgtgcacttccactgctcgggcgcgcctgtggccccgctgcag

SEQ ID NO: 3083 - DNA, 600 bp, Homo sapiens
ggcctgaatgacaagaattgcacaggaaaacgtgttctaatcttaggcgcttcaggcggagttggtacttttgctatacaggtaatgaaagcatgggatgctcatgtgacagcagtttgctcccaagatgccagtgaacttgtaaggaagcttggtgcagacgatgtaattgattacaaatctggaagtgtggaagagcagttgaaatccttaaaaccatttgattttatccttgataatgttggcggatccactgaaacatgggctccagattttctcaagaaatggtcaggagccacctatgtgactttggtgactcctttcctcctgaacatggaccgattgggcatagcagatggcatgttgcagacaggagtcactgtaggttcaaaggcattaaagcatttctggaaaggagtccattatcgctgggcatttttcatggccagtggcccatgtttagatgacattgcagaactggtggatgcgggaaagatccggccagttattgaacaaacctttcctttttctaaagttccagaagccttcctgaaggtggaaagaggacacgcacgaggaaagactgtaattaatgttgtt

SEQ ID NO: 3084 - DNA, 600 bp, Homo sapiens; identical to SEQ ID NO: 3083

SEQ ID NO: 3085 - DNA, 600 bp, Homo sapiens
ctcccaagtgggcacggggagaggaaggcactcctctttaaggaccgacccagaggttttgccattgcttcactggccagagcttagtcacgcagcctcacccagaggcaagggaggttggaaaatgtagtgtttgtgtgtgtctaacacaaattctattaccatgcagtcaggattctccactcttgctctttcattagatttgctgggcttcaccctggactttctgatttagtgacagaacagagaacccagaggcagacccagatgtgtacaagggcttcatatacaatcaggagatttaataatcatgctaggggccgggtgcagtggctcacgcctgtaatcccaagcactttggggagccgaggcaggcagatcacttgaggtcaggagtttgagaccagcctgggcaacaaagtgagaccctgtctctactaaaaataacaaaaattagccgggcgtggtggtgggcgcctgtaatcccagctcctcgggtggctgaggcatgagaatcacttgaacccaggaggcagaggtttcagtgagctgagatcacatcactgcactccagcctgggtgacagagtgagattctgtc

SEQ ID NO: 3086 - DNA, 600 bp, Homo sapiens
cttgcctcagcggctaccaaagccaagcacctggctgcagtggaagaaagaaagatcaagtccctggtagctctcttggttgagacacaaatgaagaaactagagatcaaacttcgacattttgaagagctggaaactatcatggacagagagaaagaagctctagaacaacagaggcagcagttgcttactgaacgccaaaacttccacatggaacagctgaagtatgctgaattacgagcacgacagcaaatggaacagcagcagcatggccagaaccctcaacaggcacaccagcactcaggaggacctggcctggccccacttggagcagcagggcaccctggcatgatgcctcatcaacagccccctccctaccctctgatgcaccaccagatgccaccacctcatccaccccagccaggtcagataccaggcccaggttccatgatgcccgggcagcacatgccaggccgcatgattcccactgttgcagccaacatccacccctctgggagtggccctacccctcctggcatgccaccaatgccaggaaacatcttaggaccccgggtacccctgacagcacctaacggcatg

SEQ ID NO: 3087 - DNA, 600 bp, Homo sapiens
cgcgctggctggcagcagcgcaggcgctcggagaagaaaatcaccaggctggtgctgatggtcgtggtcgtctttgtgctctgctggatgcctttctacgtggtgcagctgctgaacctcttcgtgaccagccttgatgccaccgtcaaccacgtgtcccttatccttagctatgccaacagctgcgccaaccccattctctatggcttcctctccgacaacttccgccgattcttccagcgggttctctgcctgcgctgctgcctcctggaaggtgctggaggtgctgaggaggagcccctggactactatgccactgctctcaagagcaaaggtggggcagggtgcatgtgccccccactcccctgccagcaggaagccctgcaaccagaacccggccgcaagcgcatccccctcaccaggaccaccaccttctgaggagcccttcccctacccaccctgcgtggccacctcccaaggggtgggcaccattcctacagccccgaagactgcatctcctgaatgctcacctaagctccaccacctgttccttccagcagcccatgtacctgccggagagtgtcagaactcttctgctgc

SEQ ID NO: 3088 - DNA, 1400 bp, Homo sapiens
gcgacaagaccccatcgaatgccttttctcttttatctgttcctccaacaacaacatcgcccgcatcactggcatggtggagcggctgtgccaggcttttggacctcggctcatccagcttgatgatgtcacctaccatggcttccccagcctgcaggccctggctgggccagaggtggaggctcatctcaggaagctgggcctgggctatcgtgcccgttacgtgagtgccagtgcccgagccatcctggaagaacagggcgggctagcctggctgcagcagctacgagagtcctcatatgaggaggcccacaaggccctctgcatcctgcctggagtgggcaccaaggtggctgactgcatctgcctgatggccctagacaagccccaggctgtgcccgtggatgtccatatgtggcacattgcccaacgtgactacagctggcaccctaccacgtcccaggcgaagggaccgagcccccagaccaacaaggaactgggaaactttttccggagcctgtggggaccttatgctggctgggcccaagcgggcctccttggcaatgcatttgatggccaccagcttctgcgtcctcttatcttctgccaggatcacctccgagaaggcccccctatcgggagaggggattcacaaggtgaagaactggaaccccagcttccctccagcctctcctccattccctatgggttctgtgaccactgctggaccaaggacgtggatgaccctcccctagtcactcatccatcccctggctccagagatggtcacatgacccaggcctggccagtcaaagtagtctctcccctggccacagtaattggtcatgtgatgcaagccagcttactagcactttgagaatgagtctcctgttgagctggtaggatgtaagcctggagctaatggcgatcatctttgccaccacctggggagagcctgcttgggaatgaaattaacacaaaggaagtccaacctgagaaatggccaaatatatttcctgataacattatgtggccctctggatccagccatgcctgaggtctacccctgggcttttggattatgtgtacagttggttcatccctttttctgctaattcgagtcatggctaatttaacaccctttagaaccttaaagaaccatcagcatcacccgggaacttttttagaaatgcaaaatctctactgctttggatcctgggtcaaaaaaaagaaaaaaaaaagaaatgcaaaactttaggccctgccccagatttactaaatcaatctgcagtttaacaaaatcctcaggtgatttgtatgctcattgaactttaagaagcagtgttttagaacaggttcttaaaaaggaacaaataaactcatttaactaaagttaactg

SEQ ID NO: 3089 - DNA, 1400 bp, Homo sapiens; identical to SEQ ID NO: 3088

SEQ ID NO: 3090 - DNA, 600 bp, Homo sapiens
atggtggagcggctgtgccaggcttttggacctcggctcatccagcttgatgatgtcacctaccatggcttccccagcctgcaggccctggctgggccagaggtggaggctcatctcaggaagctgggcctgggctatcgtgcccgttacgtgagtgccagtgcccgagccatcctggaagaacagggcgggctagcctggctgcagcagctacgagagtcctcatatgaggaggcccacaaggccctctgcatcctgcctggagtgggcaccaagggcctccttggcaatgcatttgatggccaccagcttctgcgtcctcttatcttctgccaggatcacctccgagaaggcccccctatcgggagaggggattcacaaggtgaagaactggaaccccagcttccctccagcctctcctccattccctatgggttctgtgaccactgctggaccaaggacgtggatgaccctcccctagtcactcatccatcccctggctccagagatggtcacatgacccaggcctggccagtcaaagtagtctctcccctggccacagtaattggtcatgtgatgcaagccagcttactagcactt

SEQ ID NO: 3091 - DNA, 600 bp, Homo sapiens; identical to SEQ ID NO: 3090

SEQ ID NO: 3092 - DNA, 417 bp, Homo sapiens
ggtgaagatgatgcgctgtcagataaacatggctgcccagcctacgtgagccccgagatcctcaacactactgggacctactctggaaaggcggcggacgtctggagcctcggggtgatgctctatacgcttttggtcggacgatacccctttcatgactcagatccgagtgcccttttttccaaaatccgccgtggacagttctgcattcctgagcacgtctcccccaaagccaggtgcctcatccgaagcctcctaagacgagaaccttctgagagactcacagctcctcagatcttactccatccctggttcgagtatgtcttggaaccgggctatgttgactcagaaataggaacttcagaccagattgttcctgagtaccaggaggacagtgacataagttccttcttctgc

SEQ ID NO: 3093 - DNA, 111 bp, Homo sapiens
cttttgcgagaattgaagcaccctaatgtgattgcattgcagaaggtgttcctttctcacagtgacaggaaggtatggctgctgtttgattatgcagagcatgacttgtgg

SEQ ID NO: 3094 - DNA, 111 bp, Homo sapiens; identical to SEQ ID NO: 3093

SEQ ID NO: 3095 - DNA, 291 bp, Homo sapiens
caggtaccaaggaccaccccgccgcccttcctggctaccatgggccagtgctgctctcagggcaagagccagaagccaggcacactgctcagtgactcgagcaagggtgcgacccagctgggcaccttcctggccatggagcagctgcagcaccaggcagggactgagtgtaccgtggatctgtttaacgtggctctgcagcagtccccggcctgtggccttatgaccccaacgctggagcagtatatctacctccacgactttctgaacagtgcgcccgtagatgggctg

SEQ ID NO: 3096 - DNA, 291 bp, Homo sapiens; identical to SEQ ID NO: 3095

SEQ ID NO: 3097 - DNA, 600 bp, Homo sapiens
tctgggaagaaatctatctctctggcaggttgtggaactcagatattcttctatgtgtccctgcttggagctgaatgtttcttgttggctgtcatggcttatgaccgctatgtggctatatgtcaccctcttcagtacaccatcctcatgaatccgaaactctgtgtcttcatgactgttgcttcctggaccttggggtctcttgatgggatcatagtgcttgcagctgtcctgtcattttcttactgcagctctctggaaattcatcactttttctgtgatgttgctgcccttttacctctatcctgcacagaaacatctgcatttgaaagactacttgtcatttgttgtgtggtaatgctaatctttccagtttcagttatcatactttcctattcccatgtccttcgagccgtcatccacatgggctctggggaaagtcgtcgcaaggccttcactacctgctcctcccacctgtctgtggtcggactctactacggtgctgctatgttcatgtacatgagaccagcttctaaacatacgccagaccaggacaagatggtgtcggccttctacactattctcacccctatgctgaac

SEQ ID NO: 3098 - DNA, 1400 bp, Homo sapiens
agagaccccaggcagcctgagctcttggatgtggtcagctctccaggagcaagtcctgtgtggcaaaactgcctcctacggcggctctgaagcagagccctgggacggaccccatgctgtccccaacagctggggtggcactctgccctgggcacccatgaccctctgctgtctctccctgttcagctgttggccggccctgctacctgacgcgccagaagcacccagccctgcccagcaaccggccccagcagcaggtcctggtgctggcggagcccaggcgcaagccatctaccttctggcacagcatcagccggctggcacccttccgcaagtgaactggtccctgcctgacagcacctgctgggccttcctgccagtggcccccagtttttcttccccgaggcccactcggcctggccttcctctgcctgcaagtgagcagggatgggctggggagttgcttgtgccaccaagacgtgccaggtctgtactcctgttgtctttttccctgctcctggtgccctgaagagaccagcaagggggcagaccccgcactcgccacaccgccgctgcagcttgggccccatccgccctctggacctgtgtagggcctcactgctggagcggggaaaccgcagctcagcccaggcccagctggggagaaggcgctacctgcgtgggaccctcttctctggaaacctaatcctcctttcatttcctctgggcaggactctctggccttctgtggcctgcaatgccaggccatgtgcccctctgccctctagttctccaagtccccagcccggccagtggtgccaggcagcttgccacttgggagggcagaagccaggaattccacacccttgtgttgcgcccggagcccgcccttcgcctcccagcccctcaagacaccgctggctgctggacaccctcttcacttgtgtgtgtgtgtgtagcggaaaaggacaagacggtgcagtcggctgcatactcccagtcgggagtgtggtcagtctgcctgctgctgtgcggtagctccagaaccacctcgttcctggttttgtttggattttggcatcttgtttttctaacaacaaacaatggagaaaaagaattgattcttagtgacacagaagattgccttacgctcgtgagcgtgagaagccataagagagagaccgaattctgtggctcagcacacaggactgacccacagcccaggcagcgggtgtgtggagatggcgccctgtcctgccaaggggcgccaggagcagagccagggcctggcgagctggcgtggagcccacaggattcagcagcatggacagtcactcttgcactattccttctccaagccagaaaccacatttaatttcataaataaatttatgaaaagt

SEQ ID NO: 3099 - DNA, 1400 bp, Homo sapiens; identical to SEQ ID NO: 3098

SEQ ID NO: 3100 - DNA, 1400 bp, Homo sapiens
ggacagccacctgctgtgcaccaggaagcccgagcagaagcagcgctggctcaaggcctttgccagggagagggagcaggtgcagctggaccaggagacaggcttctccatcactgaactgcagaggaagcaggccatgctgaatgccagcaagcagcaggtcacagggaagcccaaagctgttggccggccctgctacctgacgcgccagaagcacccagccctgcccagcaaccggccccagcagcaggtcctggtgctggcggagccccaagccatctaccttctggcacagcatcagccggctggcacccttccgcaagtgaactggtccctgcctgacagcacctgctgggccttcctgccagtggcccccagtttttcttccccgaggcccactcggcctggccttcctctgcctgcaagtgagcagggatgggctggggagttgcttgtgccaccaagacgtgccaggtctgtactcctgttgtctttttccctgctcctggtgccctgaagagaccagcaagggggcagaccccgcactcgccacaccgccgctgcagcttgggccccatccgccctctggacctgtgtagggcctcactgctggagcggggaaaccgcagctcagcccaggcccagctggggagaaggcgctacctgcgtgggaccctcttctctggaaacctaatcctcctttcatttcctctgggcaggactctctggccttctgtggcctgcaatgccaggccatgtgcccctctgccctctagttctccaagtccccagcccggccagtggtgccaggcagcttgccacttgggagggcagaagccaggaattccacacccttgtgttgcgcccggagcccgcccttcgcctcccagcccctcaagacaccgctggctgctggacaccctcttcacttgtgtgtgtgtgtgtagcggaaaaggacaagacggtgcagtcggctgcatactcccagtcgggagtgtggtcagtctgcctgctgctgtgcggtagctccagaaccacctcgttcctggttttgtttggattttggcatcttgtttttctaacaacaaacaatggagaaaaagaattgattcttagtgacacagaagattgccttacgctcgtgagcgtgagaagccataagagagagaccgaattctgtggctcagcacacaggactgacccacagcccaggcagcgggtgtgtggagatggcgccctgtcctgccaaggggcgccaggagcagagccagggcctggcgagctggcgtggagcccacaggattcagcagcatggacagtcactcttgcactattccttctccaagccagaaaccacatttaatttcataaataaatttatgaaaagtaacctggctgct

SEQ ID NO: 3101 - DNA, 1400 bp, Homo sapiens; identical to SEQ ID NO: 3100

SEQ ID NO: 3102 - DNA, 600 bp, Homo sapiens
gattcacatatgtttgaccaaggcactgggcagctgccaatttcccgtcccttctgtagtcccagatgaatggatacagacctctttggggaaggctgcaaggaaggttcacaacatgcatctaagtgttaaaataagtttttccttcaaaaatacatttgacttcctctccatttaaggtctggaaatcaagtgggagatcttgactttaccttggcacttgagacagaactgttggcccagaagtctttagttaaggtcattactaggccatatcttaggggcgtctggcctttttcattcctgggacccacagctcgaggtctggtttccatgccctatcccttacgatgagcgccctattttgttccttctgtctatctctgttgctgagatcagggagcccacgttcacagcagctctttcaagcagcctcccaggcctagagaggaaaatcagcagagcctcgtgaatgtatttctcgtggcaagaagggagctcatcttctgggtcctgccagagggcagtgagggggttgatgggctgggtgcatgccagggacccaatcaagcatttttatcttctgaaatctttgaattc

SEQ ID NO: 3103 - DNA, 600 bp, Homo sapiens; identical to SEQ ID NO: 3102

SEQ ID NO: 3104 - DNA, 1400 bp, Homo sapiens
aaaagactgagtgagaacgaaattatatgtaatgctctgcagagacagaaagagagattggaaggagaaaatgatcttttgaagagggagaacagcagattgctcagttacatgggtctggattttaattctttgccgtatcaagtacctacttcagatgaaggaggcgcaagacaaaatccaggacttgcctatggaaacccatattctggtatccaagaaagttcttcccccagcccgctctccatcaagaaatgccctatctgcaaagcagatgatatttgtgatcacaccttggagcaacagcagatgcagcccctttgtttcaattgtccaatttgtgacaagatcttcccagctacagagaagcagatctttgaagaccacgtgttctgccactctctctgagtatcccaacctcttggatgtatacagagattttatagaatagaacctatagcttctaccatgagttatatgagtcaagatcctgcctaacctgaaattattagggatttactcagccctgctgccgctaacagtggagttatgtcactgatctgaaggtcactgttaagggcttctgctgccatccttgtgggttgctacctttaagtcgcataactctagctgtatcatcctctcacctgtcattcttctgagggtctcagtacaagggccctgggatggagccaacctgggtattcacaacaggcctgacttgatactaagtgattagttttccaagttgtcccactgccattcaaagtcagcccttgagtgtatttgttctcagtcctaaccctggggccagagattggtccgaggttgagaattccttcctcctcatccttggtgttgctttctccaaatgattgttttagactagccaaaaatgccgtggcaaagagctcagaaatccaatttggataccaaaggtttctcatgttaatttctcagcccccaaagaagcatcttactcctgaaccttagacaggaagtattgtttcagtcacagaaagcttttctgggtacctctggttagcactttctactctctgatatttcctatgtacatagcttttattgttgtaaatcctttcttaatggttaaataggattgttagcaactatgggtttgcagttttctgagtaggtgagttttgaatatgggtaaatcagaataatgagacaacttgttaatctctttaatactaaaaataaattactcttctatttcagggacttaggtaatttaaaataaaccttcaatttatggtcttctgttttgaagctcatgggaaaattgtgatcaaaagggctatgggaagggcagaccccgccaatgatttctcttcacctgtcttaagattaaataaaaaagagtgtcctggcagtta

SEQ ID NO: 3105 - DNA, 1400 bp, Homo sapiens; identical to SEQ ID NO: 3104

SEQ ID NO: 3106 - DNA, 600 bp, Homo sapiens
tactggtaaggctgactctcactccagccctagtctccacctttcccagactctcccaacctgtttcttctcaaagggccagtctgtgctggggttgttggcctgaagatgccccgttattgtctttttggagacacagtgaacactgcttctcgaatggagtctaatggtcaagggaaaaggaaagatgcgaacatactggctcttaggagagcggaaaggacctcctggactcctgtaaacccccattctttccaagtcagatagtcttctgctgctggtacctgggtgggcaatggccaccatgtctgcacacaccagaaatggacattttcatatgcaatggaaaacagccacaaaaaaacctaccttatatggaagttgtagccctctgcagctcagccctgtacatatacctgtccctctctggcttggtccccttcctccctactttctgtaaatatctgtatctaaaccagaatattttggtcaaatataaaacaataatcgctgaagatccatgtctcctctaccaccaaggatgccctagatgagctaggatgcttccagctagagcttcggggggatgtggaaatgaag

SEQ ID NO: 3107 - DNA, 600 bp, Homo sapiens
  misc_feature (104)..(104): n is a, c, g, or t
  misc_feature (336)..(336): n is a, c, g, or t
aacctgcatgaggctgagggcaagacccccctccatgtggccgcctactttggccatgttagcctggtcaagatgctgaccagccagggggctgagttggatgntcagcagagaaacctgagaacaccactgcacctggcagtagagcggggcaaagtgagggccatccaacacctgctgaagagtggagcggtccctgatgcccttgaccagagcggctatggcccactgcacactgcagctgccaggggcaaatactctgcaagatgtgctcaggtacggagccagcttgagctgcccacccaccagggttggacacccctgcatctagcagcntacaagggccacytggagatcatccatctgctggcagagagccacgcaaacatgggtgctcttggagctgtgaactggactcccctgcacctagctgcacgccacggggaggaggcggtggtgtcagcactgctgcagtgtggggctgaccccaatgctgcagagcagtcaggctggacacccctccacctggcggtccagaggagcaccttcctgagtgtcatcaacctcmtagaacatcacgcaaatgtccacgcccgcaac

SEQ ID NO: 3108 - DNA, 600 bp, Homo sapiens; identical to SEQ ID NO: 3107
  misc_feature (104)..(104): n is a, c, g, or t
  misc_feature (336)..(336): n is a, c, g, or t

SEQ ID NO: 3109 - DNA, 600 bp, Homo sapiens
gctgacacattaaaagagagatatcaaaaaattggtgacaccaaaaggaatactcccattgaagctctctgtgagaactttccagaggagatggcaacctaccttcgatatgtcaggcgactggacttctttgaaaaacctgattatgagtatttacggaccctcttcacagacctctttgaaaagaaaggctacacctttgactatgcctatgattgggttgggagacctattcctactccagtagggtcagttcacgtagattctggtgcatctgcaataactcgagaaagccacacacatagggatcggccatcacaacagcagcctcttcgaaatcagagccttaggactgttacagctgagcattatgatgttaacaactcagccatctggcacaggggaagaggcacctaaacagattcttctggacaaaagtcacatatgagcaagatcagaatagtagcagatgtaaaaagcagaatgtatcatcagagcgccgaggagagtgggaaattcagcccagccggcagaccaatacctcatacctaacgtctcacttggctgcagaccgccatgggggatcagtgcaggtattta

SEQ ID NO: 3110 - DNA, 600 bp, Homo sapiens; identical to SEQ ID NO: 3109

SEQ ID NO: 3111 - DNA, 219 bp, Homo sapiens
ggagggaagatccctgtgagatggacagctccagaggccatcgcctaccgcaagttcacttcagccagcgacgtttggagctatgggatcgtcatgtgggaagtcatgtcatttggagagagaccctattgggatatgtccaaccaagatatcccaggacgtttgcttacactggcctttgcaatggccaaaagagttgttgctgaactttcaaaatga

SEQ ID NO: 3112 - DNA, 219 bp, Homo sapiens; identical to SEQ ID NO: 3111

SEQ ID NO: 3113 - DNA, 600 bp, Homo sapiens
cagctgcaacacgtggccaagcatgccttcctacagcagctgcaccgtcaccaccgtgcagcccatggacaggctaccctaccagcacttctccgctcacttcacctcggggcccctggtccctcggctggctggcatggccaaccatggctccccacagctgggagagggaatgttccagcaccagacctccgtggcccaccagcctgtggtcaggcagtgtgggcctcagactggcctgcagtcccctggcacccttcagccccctgagttcctctactctcatggcgtgccaaggactctatcccctcatcagtaccactctgtgcacggagttggcatggtgccagagtggagcgacaatagctaaagtgaggcctgcttcacaacagacatttcctagagaaagagagagagagaggagaaagagagagaaggagagagacagtagccaagagaaccccacggacaagatttttcatttcacccaatgttcacatctgcactcaaggtcgctggatgctgatctaatcagtagcttgaaaccacaattttaaaaatgtgactttcttgttttgtctcaaaacttaaaaaaacaaa

SEQ ID NO: 3114 - DNA, 600 bp, Homo sapiens
acgagaaagctgcacagtatcaaatgcaagcctcccctatccagccccattctagaactgcattcagaggacacacttcagatggatggacacatactggattcaaagagatatgccgttattggagcagatctccgagacctgtctgaactggaagagaagctaaagaaatgtaacatgaatacacaattgccaacactcctgatagctgaatgtgtgctggtttacatgactccagagcagtccgcaaacctcctgaagtgggcagccaacagttttgagagagccatgttcataaactacgaacaggtgaacatgggtgatcggtttgggcagatcatgattgaaaacctgcggagacgccagtgtgacctggcgggagtggagacctgcaagtcattagagtcacagaaagaacggctcctgtcgaatgggtgggaaacagcatcggccgtcgacatgatggagttgtacaacaggttacgagctgaagtgagcaggatagaatcacttgaattcctggatgaaatggagctgctggagcagctcatgcggcattactgcctttgctgggcaaccaaaggaggaaatgagcttggt

SEQ ID NO: 3115 - DNA, 903 bp, Homo sapiens
atagagggaacctggagcagaccacaaatgaataaaaattatgagtaagtagaaattatgaggtagagaataggtataacctcagtttttttctatattatactctttaattagtcagcattggatcagatggtatttaaagtgaatgcgagaaacataggaaagtgggaacaaagttggctaaaagaagtgggttatgtggaaagaaaagaagcaggaaagttattatacaatggacaggattatgaaagtctagagtagctgggattacaggcacccaccaccacacccagctaattttttgtatttttagtagagatggggttttgccatgttggctaagctggtctcgaactcctgacctcaggtgatccacctgcctaggcctcccaaagtgctgggattacaggcgtgagccaccgtgcccatcatggtatatttttttaaatatgtacttgccttgttttcttcagtagattattttgagattcttttcttgttttatttctctaacctatttataaaccagcactttaataaatatatctgccattaataaagaggaaaaatgaaagtgtttccctttcaaaattaagagactttttttttttttttttttttgaaatggagtctcgctcttccccctgcctctccctctccccactccttccctttactgtggcattggatgggtaactgtggcattggacgggtaagtcagtgaaagccacgatccttgacagggtgagcacatgagataggccccacattcacctcagctttctcaggacattttccaaaggggcctcttactgttctctcagataataaacatatcttaaatatcctggctcatccaccctataccctaaataactgttctttcccagtagtgtgattggt

SEQ ID NO: 3116 - DNA, 1400 bp, Homo sapiens
ctgtgttactgctgtggcctgcgcagcttccgtgagctgacctatcagtatcggcagaacattcctgcttccgagttgccagtggccgtaacatcccgtcctgactgctactggggccgtaactgccgcactcaggtgaaagctcaccacgccatgaaattcaatcatatctgtgaacagacaaggttcaaaaactaagcatccagaggccctgagcagctttcagcactggaggtgaagagagcgtgtttttaaaatacagagacaagcacgtcaaggtgttttcacagccccctgagggaagggacgcagggtctccgacaggtgctctggggtgactcttctgtggagctttaccctctgagtgagaccctccccagagccccgggggccgcagcccgccctcctggtgagcgctgggcagggctcgtggtggcatcagcagcagagacgaagcctttctgtaacatgcggccgtcccgccgagaggggcagttttgctcttttgtacattttccgaaactacagttaaagcagaagtctgtttttaggaaaagtttcaagggagaagggcaagtttatcaaaaacattgtttcaggagaagggagcataagtttacagcctacaggacgtacacaatatcctgctgctgggaaaaccacagcattttatctattttttattttaataggtttggtgcttatcttctaataagatttaaatgtcacaaactgtagcacaaataatataatttataatttacaaattgactaaaattgggtatagtatggtatttgaaagaataagcatatgcttctgtttattaaaaaaagaaaccttccaatgtccaaaactgctaaccctcgacgtggccgccaagttagtcgctccttgctaaccggtgagtgaccgcggccccgagcctggggctggacgcaggtcccaggacatgctgctcccttgtgtgagtgaccgcggccccgagcctggggctggacgcaggtcccaggacgtgctgctcccttgtgtgagtgaccacggccccaagcccagggctggaggcaggtcccaggacgcgccgctccctcatgctgcccgggcccttcctccaagaccctacagagcctgaggggcaccttggcttccgcctgtgctagctttgccatgtcatctggaataatacttgaaattttgatttttggaaaaaaaagttttttatcttttgttgaaatcacctgttatccttgtttgtaaactgataacttttttgcttcttctcaggaatacagttttcaactgttgtcttgctcttgatagaaactgagaagcagcaatctgtatttgtggaggaaagtcctctcttttgcatattctaataaatgagccgcgtttgctcctc

SEQ ID NO: 3117 - DNA, 1400 bp, Homo sapiens; identical to SEQ ID NO: 3116

SEQ ID NO: 3118 - DNA, 1400 bp, Homo sapiens
tggcttccatagatcctaagctcttgactgtagtttagccagacttgttttgctatcttataagcagttcagaattagggaatgctggttttgaagagcaaaggacaggtagtctagagagggtcgtctggcctgcttgctgggtctttgtaacccagcacttcctcttgccctcctggctttatgtttatggggagaggactcaatagctccaccccttctggcaccagatggggcttggttagtttgcaataagcaccttgcagaggttaaagccagcgggtccctagtcttaggcccagcctgcttgtgtgggctctggcctggcctggtggctggcccagggggcagcagtgcttagagcttctgcagggcttctcttgtttacacagctgcatcagacaatgccatttctccccaccacggaaccttccatctaagatttcttccagggaatgccagcaatcaggcagcacccagctgtgggggcagtggggtgggggagacccacattgatgactttttttttttcttttaatgaagaaacaccaaagaaagctgtggaaaggacctgccccacatgaaaaggataagccaagatggctgtaaacacagagcatttgagctgccactcttggagcacattgatttttcaaaagccagctctgtcaggaaaggaggtgctgttatgagcagctcttccagtgggcaaagaggacgcccataatttcttccattgctagctcatctgtgggaccaatttggtgtaagcaacctgtggcctgcacttgtggcctcgaaggaagcacaaaccctccatccacttcccatttcctctgcccttttccacctcccccttccatcccaccagctgccagtggctcccagaaagccttattgagccccttgttgacacttggggctgcggaggcctctccctactggtctggcctttcctgagaggcaggtcttccgtcctcagagcctttctggaacaaggagaatgcctgtgcaggtggacacacaggcctggcctgtcgctctcacttgtcttccagcggggagcttcacgttgccgagtggaagaaccatgacctccacttgcttccaaggtgctagggaagtttcagggtacgctggttcccctctccagctggaggccgagtttctggggactgcagatttttctactctgtgatcgattcaatgcccgatgcttctgtttcattcccgaccctttctactatgcattttccttttatcaggtgtataaagttaaatactgtgtatttatcactaaaaagtacatgaacttaagagacaactaagcctttcgtgtttttccacaggtgtttaagcttctctgtacagttgaaataaacagacagcaaaatggtgcc

SEQ ID NO: 3119 - DNA, 600 bp, Homo sapiens
cacaataggaagagggagggagggaggagagaggagggtgagagggagatgtgtctacagagaaggtcaggtgatgcaatgtgagaagtgactcagctgccatagctgccttttaggatgagggaagggaccagaagccaaggaatgtgggtggcctgtatctagaagctagaaaaggccaggaaacagatttttccctggagccccagaagaaacgcagtcctgctgacaccttgattttagtccagtgatgtccatgtcagacttcgagtgtacaaaattataaaataataaattcatagtgtttacgccactaagtctgtggtaacttcctatagcagcaatatgaagggaacagtgggtaaggagcatcagccatgtagaccacgctttaaagaagtttggcagtaaaataaagaagaaagacaagatgggacacgtgggatttagggaggatggtagtgtgttttaaaatgggagaaattttatgtttttgaattttcacattatttgtgtgatttctgtgttatttttatgcttcttagagacacagtatcagagtgcttcatctggcattccaaataccagaacataaaaatc

SEQ ID NO: 3120 - DNA, 600 bp, Homo sapiens; identical to SEQ ID NO: 3119

SEQ ID NO: 3121 - DNA, 600 bp, Homo sapiens
gcctccatcttccatctatcccagtgtcctggtccaatcacatgtgtgggtgcgaggaggctgtgagtccgggcgctgcgaccgctgtcagaaaaagatccggatctaccacagtctgaccgggctgcattgtgtatggtgccacctagagtctgtaagtacactgttcacgaccagtgtgccatgaaagccctgccttgtgaagtcagcacctatgccaagtctcggaaggacattggtactctgaaggacgacggacagcacatgtggaggcccaagaggttccccagaccagtctactgcaatctgtgcgagtcaagcattggtcttggcaaacagggactgagctgtaaccattcttcaggagatgatgaaagagattgactatgatggcagtggctctgtctctcaagctgagtgggtccgggctggggccaccaccgtgccactgctagtgctgctgggtctggagatggaagtggacaaaattatcctacagatgatgcgagtggctgaatacctggattgggatgtgtctgagctgaggccgtcaccttcaagctgtacgacacggacagaaatgggatcctggacagctca

SEQ ID NO: 3122 - DNA, 600 bp, Homo sapiens
attaattccgatactagtttgctttgctgaccaaatgcctggtaccagaggatggtgaggcgaaggccaggttgggggcagtgttgtggccctggggcccagccccaaactgggggctctgtatatagctatgaagaaaacacaaagtgtataaatctgagtatatatttacatgtctttttaaaagggtcgttaccagagatttacccatcgggtaagatgctcctggtggctgggaggcatcagttgctatatattaaaaacaaaaaagaaaaaaaaggaaaagtacatgatgatgcgggactgctggcatgcagtgccctcacagagacccaccttcaagcagctggtggaagacctggaccgcatcgtggccttgacctccaaccaggtggtctttcggggtgctcctgtgggagatcttcactctgggcggctccccataccccggtgtgcctgtggaggaacttttcaagctgctgaaggagggtcaccgcatggacaagcccagtaactgcaccaacgagctggccgactgcctgtgaagtggatggcacccgaggcattatttgaccggatctacacccaccagagtgatgt

SEQ ID NO: 3123 - DNA, 600 bp, Homo sapiens; identical to SEQ ID NO: 3122

SEQ ID NO: 3124 - DNA, 600 bp, Homo sapiens
catggtcattgagtacatcgggactatcattcgaaacgaagtagccaacaggaaagagaagctttatgagtctcagaaccgtggtgtgtacatgttccgcatggataacgaccatgtgattgacgcgacgctcacaggagggcccgcaaggtatatcaaccattcgtgtgcacctaattgtgtggctgaagtggtgacttttgagagaggacacaaaattatcatcagctccagtcggagaatccagaaaggagaagagctctgctatgactataagtttgactttgaagatgaccagcacaagattccgtgtcactgtggagctgtgaactgccggaagtggatgaactgaaatgcattccttgctagctcagcgggcggcttgtccctaggaagaggcgattcaacacaccattggaattttgcagacagaaagagatttttgttttctgttttatgactttttgaaaaagcttctgggagttctgatttcctcagtcctttaggttaaagcagcgccaggaggaagctgacagaagcagcgttcctgaagtggccgaggttaaacggaatcacagaatggtccagcacttttgcttt

SEQ ID NO: 3125 - DNA, 600 bp, Homo sapiens
gcccctaaaggagcaggagagagtggggaagaggatcctttcccgtccagagaccctaggagcctgggcccaatggtcccaagcctattgacagggatcacactggggcctcccagaatggaaagtcccagtggtccccacaggaggctcgggagcccacaagccattgaggaggctgccagctcctcctcagcaggccccaacctaggtcagtctggagccacagaccccatccctcctgaaggttgctggaaggcccagcacctccacacccaggcactaacagcactttctcccagcacttcgggactcacccccaccagcagttgctctcctcccagctccacctctgggaagctgagcatgtggtcctggaaatcccttattgagggcccagacagggcatccccaagcagaaaggcaaccatggcaggtgggctagccaacctccaggatttggaacaactccagcccagcctaagaacctgtctcccagggagcaggggaagacacagccacctagtgcccccagactggcccatccatcttatgaggatcccagccagggctggctatgggagtctgagtgtgcacaagcag

SEQ ID NO: 3126 - DNA, 600 bp, Homo sapiens; identical to SEQ ID NO: 3125

SEQ ID NO: 3127 - DNA, 600 bp, Homo sapiens
cgggtgccccctgcctccccctccagtcacagcctggcacccccatcaggggagcggagccgcctggcacgtggttccaccatccgcagcaccttccatggtggccaggtccgggaccggcgggcagggggtgggggtggtgggggtgtgcagaatgggccccctgcctctcccacactggcccatgaggctgcacccctgcccgccgggcggccccgccccaccaccaacctcttcaccaagctgacctccaaactgacccgaagttgccatctaccttgggatcaaacggaaaccgccccccggctgctccgattcccctggagtgtgaagctgaccagctcgcgccctcctgaggccctgatggcagctctgcgccaggccacagcagccgcccgctgccgctgccgccagccacagccgttcctgctggcctgcctgcacgggggtgcgggcgggcccgagcccctgtcccacttcgaagtggaggtctgccagctgccccggccaggcttgcggggagttctcttccgccgtgtggcgggcaccgccctggccttccgcaccctcgtcacccgcatctccaacgacctcgagctc

SEQ ID NO: 3128 - DNA, 600 bp, Homo sapiens; identical to SEQ ID NO: 3127

SEQ ID NO: 3129 - DNA, 1400 bp, Homo sapiens
ttctttgctaataattctgttcctggctgccgagagtgaagtttcaccatgtggaggtttggctcctatcacctggtggtctgattcataccctagcctgaggctccactggaagatctcgcagcctcagtgtatgggaaaccctttccccaggcttgtcccagcactgccgctccccacccctgagccaggaccccagaggatggccatgccccgtgcctggcagaggtctggtgccagcactgggagctgctccgcccttgccttggggccgagggagccctcgtccacccctgcacagcagctgggcacagaggagcgctcttccatcttgaccaggactgcaccaagaagcaccaggtgtcttcagcctccaacctccggggcgaccttctcttccagccacagtcccatgagggcccctagccagggacactggtctgtaaattgtaatcctttctccagcccagctctccacttgttccttgtgtgagctgagcaggcagtgcacctctgagtgtcccttttgtaaggcccaggggttgcactgagtctgcagaggccgcgacctcctagaacgctgtgggtgcaggtgagccggcgtgtcctggggagatgctgccagcacacaggggccctcctgctgccagcaggttggggtggttaagtcttattagtgtctattcttaaaattaagtgggctggagaagaatggagctccacatgccagcaccgtatatggaatacaaaagctggggaagcagggcctgccttacaggtgtggctgactctgagcccaggcctgcaggggtggagggcagtccctcagaatcccagaggcagtcccagcctcagaacccaggataggaaatgggtgtgtttagtggggaaagggacggggtgcagacggcagggccagtatggggccccctccctctcctctcctctcctatggtgagcccagcgtgggcaccgggccgtctcagccgtgttcccagggctgggaggacagctctggcccttcttaggcctagcctcgtcccaagctaaatgtaagccagttgggctgtgttaaaggaagcagtgtttttggttcgattctgcctctgtagctcaaggggggcagcccccagagtcctgtgcattctgccaaggctccatagctttgccaaatgcacggagctctgccattccggtgcagtgcaggccttgcgaagggtttatctgcgttcgtctcggtgggcttctcctgcatgggagttgtgttcctgtgcaagggggagctttgctccaggacaggatgactgtcttccctattcttagggacaagtcccaagatgccagaaaggcagtctcccaaggacccaccatgcagaagtgtcaataaaccacaagttctg

SEQ ID NO: 3130 - DNA, 550 bp, Homo sapiens
gaatctaatgctggacaaagatggccacataaaaattacagattttggactttgcaaagaagggatcacagatgcagccaccatgaagacattctgtggcactccagaatatctggcaccagaggtgttagaagataatgactatggccgagcagtagactggtggggcctaggggttgtcatgtatgaaatgatgtgtgggaggttacctttctacaaccaggaccatgagaaactttttgaattaatattaatggaagacattaaatttcctcgaacactctcttcagatgcaaaatcattgctttcagggctcttgataaaggatccaaataaacgccttggtggaggaccagatgatgcaaaagaaattatgagacacagtttcttctctggagtaaactggcaagatgtatatgataaaaaggtaagatttctttatggcatagtatgtttcctgcccacagatgatgaggatggtatggactgcatggacaatgagaggcggccgcatttccctcaattttcctactctgcaagtggacgagaa

SEQ ID NO: 3131 - DNA, 550 bp, Homo sapiens; identical to SEQ ID NO: 3130

SEQ ID NO: 3132 - DNA, 600 bp, Homo sapiens
atttatgaagagaaactagaagccagtgaactcttcaaagacaagaaggctttatacccatctagtgttgggcaaccattccaaggggcttacctggaaatcaacaagaaccccaagtataagaaactcaaagatgccattgaagaaaagatcatcattgctgaagtcgtgaacaaaattaaccgtgctaatgggaagagtacatctcggattttcctcttaacaaacaataatctccttcttgctgaccaaaagtctggacaaatcaagtcagaggttccattggtggatgtgaccaaggtatcaatgagctcacaaaatgatggcttcttcgccgtccacctcaaagagggctcagaagcagctagtaaaggagactttctcttcagcagtgatcacctgattgaaatggccaccaagctctatcgcacaactctcagccaaaccaaacagaagctcaatattgagatttccgatgagttcctggtacagttcagacaggacaaagtatgtgtgaagtttattcagggaaaccagaaaaatgggagtgtcccaacatgtaaacgaaaaaacaaccgtctccttgaagttgctgtccct

SEQ ID NO: 3133 - DNA, 600 bp, Homo sapiens; identical to SEQ ID NO: 3132

SEQ ID NO: 3134 - DNA, 375 bp, Homo sapiens
aggtgcatttggtgccagaaaacagtacatgatgagtgcatgaaaaatagtttaaagaatgaaaaatgtgattttggagaattcaaaaacctaatcattccaccaagttatttaacatccattaatcagatgcgtaaagacaaaaaaacagattatgaagtgagggatatcatcagtacagatgaaggcaaatgttggatacaaataattgtactaatcattatgtatctactgcttgatgtaactaggactcctcctatcaaagccctacaactctgtactcttctcccatattattcagctcgagtacttgtctgtggaggggatgcgactgtagggtgggtcctggatgcagttgatgacatgaagattaag

SEQ ID NO: 3135 - DNA, 375 bp, Homo sapiens; identical to SEQ ID NO: 3134

SEQ ID NO: 3136 - DNA, 600 bp, Homo sapiens
tcttcggagagctcaaagagaagcacaagcagagcggcgggagcgtgggtgcgctggaggagctggagaacgccttcagcctggccgaggagtcctgccccggcatctcagacaagctgatggtgcacctggtggagcgagtgcagaggttttcacacaacagaaaccacctgacatccacccgctgaagcgcactgctgttcagataggggacggaaggtcgtttgtttttgttctgagctccataagaactgtgctgacttggaaggtgccctgtgctatgtcgtgcctgcagggacacgtcggatcccgtgggcctcacatgccaggtcaccaggtgaccgtctccttccacccctgcagtgtgctgttgtgcacgtcagggacgctgttctctatgcccactgccctcctccctctcctggcccagcagtattgctcacgggggctccagccgccggcgtggccctcatgagctacgcctgggtcttctgcagactcatgcagccctatggccgctcagaccaaggcgcagagcaactatcagggcagctctgcctcctcctcccatgaggtggggagaggcaacagggcagcccc

SEQ ID NO: 3137 - DNA, 600 bp, Homo sapiens; identical to SEQ ID NO: 3136

SEQ ID NO: 3138 - DNA, 1400 bp, Homo sapiens
gtttggcctgatgaagaggatttcaactacacaatactatcattgtcaggactatgacctcaggcactctaaacatatgttttgtttggtcagcacagcgtttcaaaaagtgaagccactttataaatatttggagattttgcaggaaaatctggatccccaggtaaggatagcagatggttttcagttatctccagtccacgttcacaaaatgtgaaggtgtggagacacttacaaagctgcctcacttctcactgtaaacattagctctttccactgcctacctggaccccagtctaggaattaaatctgcacctaaccaaggtcccttgtaagaaatgtccattcaagcagtcattctctgggtatataatatgattttgactaccttatctggtgttaagatttgaagttggccttttattggactaaaggggaactcctttaagggtctcagttagcccaagtttcttttgcttatatgttaatagttttaccctctgcattggagagaggagtgctttactccaagaagctttcctcatggttaccgttctctccatcatgccagccttctcaacctttgcagaaattactagagaggatttgaatgtgggacacaaaggtcccatttgcagttagaaaatttgtgtccacaaggacaagaacaaagtatgagctttaaaactccataggaaacttgttaatcaacaaagaagtgttaatgctgcaagtaatctcttttttaaaactttttgaagctacttattttcagccaaataggaatattagagagggactggtagtgagaatatcagctctgtttggatggtggaaggtctcattttattgagatttttaagatacatgcaaaggtttggaaatagaacctctaggcaccctcctcagtgtgggtgggctgagagttaaagacagtgtggctgcagtagcatagaggcgcctagaaattccacttgcaccgtagggcatgctgataccatcccaatagctgttgcccattgacctctagtggtgagtttctagaatactggtccattcatgagatattcaagattcaagagtattctcacttctgggttatcagcataaactggaatgtagtgtcagaggatactgtggcttgttttgtttatgtttttttttcttattcaagaaaaaagaccaaggaataacattctgtagttcctaaaaatactgacttttttcactactatacataaagggaaagttttattcttttatggaacacttcagctgtactcatgtattaaaataggaatgtgaatgctatatactctttttatatcaaaagtctcaagcacttatttttattctatgcattgtttgtcttttacataaataaaatgtttattagattg

SEQ ID NO: 3139 - DNA, 600 bp, Homo sapiens
cgtcgtggagacctggataaagcatacaccaaacttatcagaggagtatttgttaatgtggagaaagtagcaaatgaaagccagaagacccccagggatgtggttatgatggaaaactttcaccatatttttgcaactctttctcgattgaaaatctcatgtctagaagcagaaaaaaaagaagccaaacaaaaatacacagatcaccttcagtcttatgtcatttactctttaggacaacctcttgaaaaactaaatcatttctttgaaggtgttgaagctcgcgtggcacagggcataagggaggaggaagtaagttaccaacttgcatttaacaaacaagaacttcgtaaagtcattaaggagtaccctggaaaggaagtaaaaaaaggtctagataacctctacaagaaagttgataaacatttatgtgaagaagagaacttacttgtggtgtggcactccatgcaagatgaatttatacgccagtataagcactttgaaggtttgatagctcgctgttatcctggatctggtgttacaatggaattcactattcaggacattctggattattgttccagcattgcacagtcccac

SEQ ID NO: 3140 - DNA, 600 bp, Homo sapiens
gttagtgcaaagcagctggtccgaggagaacccaatgtttcgtatatctgttctcggtactatagggcaccagagttgatctttggagccactgattatacctctagtatagatgtatggtctgctggctgtgtgttggctgagctgttactaggacaaccaatatttccaggggatagtggtgtggatcagttggtagaaataatcaaggtcctgggaactccaacaagggagcaaatcagagaaatgaacccaaactacacagaatttaaattccctcaaattaaggcacatccttggactaaggtcttccgaccccgaactccaccggaggcaattgcactgtgtagccgtctgctggagtatacaccaactgcccgactaacaccactggaagcttgtgcacattcattttttgatgaattacgggacccaaatgtcaaactaccaaatgggcgagacacacctgcactcttcaacttcaccactcaagaactgtcaagtaatccacctctggctaccatccttattcctcctcatgctcggattcaagcagctgcttcaacccccacaaatgccacagcagcgtcaggtaagaac

SEQ ID NO: 3141 - DNA, 600 bp, Homo sapiens; identical to SEQ ID NO: 3140

SEQ ID NO: 3142 - DNA, 600 bp, Homo sapiens
atgcacaattatttcacgcttgtgaagaacgagatcaaccccagcctttctgcagatgtccctaaggtagaggtgttggaacgggagctggcctggctgaaggagcatctgtcccagctggagtcccctgtggtgttttgtcacaatgacctgctctgcaagaatatcatctatgacagcatcaaaggtatggcttctctggccctggggcagcagcagggttttggttggagacccttggtgggcccatctctgagcaactttgtctggcctgcctccccctcaggcgtgaatgaggtggattactgcctgtacccggcgcgggagacccagctgcagtggctgcactactacctgcaggcacaaaaggggatggccgtgacccccagggaggtgcaaaggctctacgtgcaagtcaacaagtttgccctgggtcctagctgtgtgtcttccacaatgactgcatccctccagtgctgtagagtcggaaacaggcatggggagattgccaggctgaccctctctggtctgtttccaggcgtctcacttcttctgggctctctgggccctcatccagaaccagtactccaccatcgactt

SEQ ID NO: 3143 - DNA, 600 bp, Homo sapiens; identical to SEQ ID NO: 3142

SEQ ID NO: 3144 - DNA, 600 bp, Homo sapiens
atcagacagtgttgatgaggcatgaaaacattttgggtttcattgctgcagatatcaaagggacagggtcctggacccagttgtacctaatcacagactatcatgaaaatggttccctttatgattatctgaagtccaccaccctagacgctaaatcaatgctgaagttagcctactcttctgtcagtggcttatgtcatttacacacagaaatctttagtactcaaggcaaaccagcaattgcccatcgagatctgaaaagtaaaaacattctggtgaagaaaaatggaacttgctgtattgctgacctgggcctggctgttaaatttattagtgatacaaatgaagttgacataccacctaacactcgagttggcaccaaacgctatatgcctccagaagtgttggacgagagcttgaacagaaatcacttccagtcttacatcatggctgacatgtatagttttggcctcatcctttgggaggttgctaggagatgtgtatcaggagtgtctaaggcagatgggaaaactcatgacagaatgctgggctcacaatcctgcatcaaggctgacagccctgcgggttaagaaaacactt

SEQ ID NO: 3145 - DNA, 600 bp, Homo sapiens; identical to SEQ ID NO: 3144

SEQ ID NO: 3146 - DNA, 1400 bp, Homo sapiens
ctaaagaggcacattgaattcttggatgcagtggcagaatatgaagttgccgatgatgaggaccgaagtgattgtggactgtcaatcttagatagattcttcaatgataagttggcagcccctttaccagaaatacctccagatgttgtgacagaatgtagattgggactgaaggaggagaacccttccaaaaaagcctttgaggaatgtactagagttgcccataactacctaagaggggaaccatttgaagaataccaagaaagctcatatttttctcagtttttacaatggaaatggctggaaaggcaacccgtaacaaagaacacatttagacattacagagttctaggaaaaggcggatttggagaggtgagtaacgggagccagttcatagcagcgctgctagctgggtggggagcaagtttagcctacgcttatgaaaccaaagatgccttgtgcttggtgctcaccattatgaatggaggggatttgaagtttcacatttacaacctgggcaatcccggctttgatgagcagagagccgttttctatgctgcagagctgtgttgcggcttggaagatttacagagggaaagaattgtatacagagacttgaagcctgagaatattctccttgatgatcgtggacacatccggatttcagacctcggtttggccacagagatcccagaaggacagagggttcgaggaagagttggaacagtcggctacatggcacctgaagttgtcaataatgaaaagtatacgtttagtcccgattggtggggacttggctgtctgatctatgaaatgattcagggacattctccattcaaaaaatacaaagagaaagtcaaatgggaggaggtcgatcaaagaatcaagaatgataccgaggagtattctgagaagttttcagaggatgccaaatctatctgcaggatgttactcaccaagaatccaagcaagcggctgggctgcaggggcgagggagcggctggggtgaagcagcaccccgtgttcaaggacatcaacttcaggaggctggaggcaaacatgctggagccccctttctgtcctgatcctcatgccgtttactgtaaggacgtcctggatatcgagcagttctcggcggtgaaagggatctacctggacaccgcagatgaagacttctatgctcggtttgctaccgggtgtgtctccatcccctggcagaatgagggctgcctgaccatggtccccagtgagaaggaagtggaacccaagcaatgctgagcaccccggtgcggaccacagagcagaccctggcgccaggaaggagcatgtgttagcgtctcgtcccacctggaattgtaataaatacatctaaataaaacatgccttgggagtgtacagac

SEQ ID NO: 3147 - DNA, 600 bp, Homo sapiens
cggtattttggtgtggagctccatagagaagaaatgtacatcttcatggagtactgcgatgaggggactttagaagaggtgtcaaggctgggacttcaggaacatgtgattaggctgtattcaaagcagatcaccattgcgatcaacgtcctccatgagcatggcatagtccaccgtgacattaaaggtgccaatatcttccttacctcatctggattaatcaaactgggagattttggatgttcagtaaagctcaaaaacaatgcccagaccatgcctggtgaagtgaacagcaccctggggacagcagcatacatggcacctgaagtcatcactcgtgccaaaggagagggccatgggcgtgcggccgacatctggagtctggggtgtgttgtcatagagatggtgactggcaagaggccttggcatgagtatgagcacaactttcaaattatgtataaagtggggatgggacataagccaccaatccctgaaagattaagccctgaaggaaaggacttcctttctcactgccttgagagtgacccaaagatgagatggaccgccagccagctcctcgaccattcgtttgtcaaggtt

SEQ ID NO: 3148 - DNA, 600 bp, Homo sapiens; identical to SEQ ID NO: 3147

SEQ ID NO: 3149 - DNA, 600 bp, Homo sapiens
caggcccctggcccgcgggctggtccctgcatccttgcccatctgtcctgggattcaacccactattacttgctgcccgagggaccatcctacctggagcgctaccagcgcttcctgcgtgaggcccagagccccgaggagcctacccccctgcctgtgcctgctgctgctccacccaagcacaccccagcccccgccgcccccacggccaccgtgcggccgatgccccaggctgccttggaccccaaggccaacttctccaccaacaacagcaacccaggggcccggccaccacccccgagggccactgctcggctgccacagaggggctgccctggcgatgggccagaggcgggccggccagcagacaagatccagatggccatggtgcatggggtgaccacagaggagtgccaggcggccctgcagtgccacggctggagcgtgcagagggctgcccagtatctgaaggtggagcagctcttcgggctgggtctgcggcccagaggggagtgccacaaagtgctggagatgttcgactggaacctggagcaggccggctgccaccttctgggctcctggggccctgcccaccacaag

SEQ ID NO: 3150 - DNA, 1400 bp, Homo sapiens
gaaaaaaagaaaaaaaaaagaaagaaagagggaaaaagagctggtggtttgatcatttctgccatgatgtttacaagatggcgaccaccaaagtcaaacgactaacctatctatgaacaacagtagtttctcagggtcactgtccttgaacccaacagtcccttatgagcgtcactgcccaccaaaggtcaatgtcaagagaggaagagagggaggaggggtaggactgcaggggccactccaaactcgcttaggtagaaactattggtgcttgactctcactaggctaaactcaagatttgaccaaatcgagtgatagggatcctggtgggaggagagagggcacatctccagaaaaatgaaaagcaatacaactttaccataaagcctttaaaaccagtaacgtgctgctcaaggaccaagagcaattgcagcagacccagcagcagcagcagcagcacaaacattgctgcctttgtccccacacagcctctaagcgtgctgacatcagattgttaagggcatttttatactcagaactgtcccatccccaggtccccaaacttatggacactgccttagcctcttggaaatcaggtagaccatattctaagttagactcttcccctccctcccacacttcccacccccaggcaaggctgacttctctgaatcagaaaagctattaaagtttgtgtgttgtgtccattttgcaaacccaactaagccaggaccccaatgcgacaagtagttcatgagtattcctagcaaatttctctctttcttcagttcagtagatttccttttttcttttctttttttttttttttttttttggctgtgacctcttcaaaccgtggtacccccccttttctccccacgatgatatctatatatgtatctacaatacatatatctacacatacagaaagaagcagttctcacaatgttgctagttttttgcttctctttcccccaccctactccctccaattcccccttaaacttccaaagcttcgtcttgtgtttgctgcagagtgattcgggggctgacctagaccagtttgcatgattcttctcttgtgatttggttgcactttagacatttttgtgccattatatttgcattatgtatttataatttaaatgatatttaggtttttggctgagtactggaataaacagtgagcatatctggtatatgtcattatttattgttaaattacatttttaagctccatgtgcatataaaggttatgaaacatatcatggtaatgacagatgcaagttattttatttgcttatttttataattaattatgccatagcataatatgatttttttgtgcggggccttctaagataaaaataataataaagtgttacgttttattggtttc

SEQ ID NO: 3151 - DNA, 600 bp, Homo sapiens
tccctggagtacgggcagcacaggtgaaggcgagggggacagacagacagcctgcccctccgtctcccgtggccctgcagcccaccctatctgctccaggttctgaagaaggccttccaggccacgctcaggtggctcctgagctcacccaagacccccggctgctctgatctcggccccctcatcccgcagttcctcagagccccagcgcccttcaccgtggccccaggcgtctctactgggggctacagtgactgtcctgcggctctgtgacggctcggctgcccctgcctccagtgtggggggccacctctgtgggaccctggcgggctgcgtccgggtccagcgagcagccctcgacttcctggggacgctgtcacaggggacaggcttgctggacgggacggcagacgatgccacgacggtggacacactcctggcctccaagtcgtcctgcgccggcctcctgtgccgcaccctggctcacctggaggagctgcagccgctgtccacaggcactgaggacccaggccttccaggtccttctccagcccctggcctgtgtcctgaaggccacggttcaggcccccggacccccag

SEQ ID NO: 3152 - DNA, 600 bp, Homo sapiens; identical to SEQ ID NO: 3151

SEQ ID NO: 3153 - DNA, 1400 bp, Homo sapiens
ggcgacttcatctggggcgtcgtgcgcaaaggcctgcagtgcgcgcaacaaggacggttcttacacaggcttcatcaaggttcagctgaagctggtgcgccctgtctctgtgccctccagcaagaagccaccctccttgcaggatgcccggcggggcccaggacggggcacaagtgtcaggcgccgcacttccttttacctgcccaaggatgctgtcaagcacctgcatgtgctgtcacgcacaagggcacgtgaagtcattgaggccctgctgcgaaagttcttggtggtggatgacccccgcaagtttgcactctttgagcgcgctgagcgtcacggccaagtgggacgccttcagcatgcctgaactacataacttcctacgtatcctgcagcgggaggaggaggagcacctccgccagatcctgcagaagtactcctattgccgccagaagatccaagaggccctgcacgcctgcccccttgggtgacctcttgtacccccaggtggaaggcagacagcaggcagcgccaagtgcgtgccgtgtgagtgtgacagggccagtggggcctgtggaatgagtgtgcatggaggccctcctgtgctgggggaatgagcccagagaacagcgaagtagcttgctccctgtgtccacctgtgggtgtagccaggtatggctctgcacccctctgccctcattactgggccttagtgggccagggctgccctgagaagctgctccaggcctgcagcaggagtggtgcagacagaagtctcctcaatttttgtctcagaagtgaaaatcttggagaccctgcaaacagaacagggtcatgtttgcaggggtgacggccctcatctatgaggaaaggttttggatcttgaatgtggtctcaggatatccttatcagagctaagggtgggtgctcagaataaggcaggcattgaggaagagtcttggtttctctctacagtgccaactcctcacacaccctgaggtcagggagtgctggctcacagtacagcatgtgccttaatgcttcatatgaggaggatgtccctgggccagggtctgtgtgaatgtgggcactggcccaggttcataccttatttgctaatcaaagccagggtctctccctcaggtgttttttatgaagtgcgtgaatgtatgtaatgtgtggtggcctcagctgaatgcctcctgtggggaaaggggttggggtgacagtcatcatcagggcctggggcctgagagaattggctcaataaagatttcaagatcctgtacttgcggaagctgttggatgatgagcagcccctgcggctgcggctcctggcagggcccagtgacaaggccctgagctttgtcctgaaggaaaatgactctggggaggtgaac

SEQ ID NO: 3154 - DNA, 600 bp, Homo sapiens
agaacagcctgatgcagagacggcggccccggcggctgtacgtggtcatcctgacttccatccttgtcttcctcacctgttctctgcccttgggcatcaactggttcttactctactgggtggatgtgaaacgggatgtgaggctactttatagctgcgtatcacgcttctcttcgtctttgagcagcagtgccaacccggtcatttacttcctcgtgggcagccagaagagccaccggctgcaggagtccctgggtgctgtgctggggcgggcactgcgggatgagcctgagccagagggcagagagacgccatccacgtgtactaatgatggggtctgaagggagcccaaccaggaactcctccaaagccccacccagcccttccctaaaagtacccagcaagcctgcaatgcaaaggccttgcacctcaaaatgtttgggtcacgttcctctctgccagggagggttcaccactatcaccttgtgttcctaatctaaactaagaggtgaggcaatatatctttctgttttacctgtttagacacagatcctaactttgggtcccatcatgggcaaggctgtctgggaaatggagttt

SEQ ID NO: 3155 - DNA, 600 bp, Homo sapiens
tgtgctgcaccatgtgtgtgaccagcctgctcctgctgctgcgggtggagcgtggtccagagagacaccagcctcggggcttccccaccctggtcctgctggccgtcctgctcttcctcttctgcggcctgccctttggcatcttctggctgtccaagaacctgtcctggcacatccccctctacttctatcatttcagcttcttcatggccagtgtgcacagtgcagccaagcctgccatctactttttcttgggcagcacacctggccagaggtttcgggaacccctccggctggtgctccagcgggcacttggagatgaggctgagctgggagctgggagagaggcttcccaagggggacttgtggacatgactgtctaagcacagtgggtcacaactgcagcttcagcccatgggggtccaggggagctgcctgatgtaggtaaagctgggatcagagctccatcagtaagactcttgagggacatctttgctgatgacccagtgctgtgtcccctgggaggattctgggaaggggcaagcagagagtgatgcttctgtggagggcctggggttgtgtgtgttaggcagagctcct

SEQ ID NO: 3156 - DNA, 600 bp, Homo sapiens; identical to SEQ ID NO: 3155

SEQ ID NO: 3157 - DNA, 600 bp, Homo sapiens
gcgattgtctctgtcttcctcgtatcatccatctacttggggatcgactggttcctcttctgggtcttccagatcccagcccccttccccgagtacgtcactgacttgtgtatctgcatcaacagcagtgccaaacccatcgtctacttcctggctgggagagacaagtcacagcgcctgtgggaacctctcagggtggtcttccagcgggctctccgggatggtgcggagccgggggacgctgctagcagcacacccaacacggtcaccatggaaatgcagtgcccctctgggaacgcatcctgagaggccaacttctggggcaaggctgcagcagagagcggccagtagcttccagagacactctgcccgagggcaggagtagggcagctgcccctgtgctgccagggagaagacctgccttaacactcttgtcaggggtggccaggaggctgagcagccacctctggacagaccctgtggcctctgctccccaaccattctgcttctgtgactcagtgtaccaaagttgccctcaccagcatggtagggtcccttcttaacagaagctcaagagcgaaggcaagaaggaggtcacct

SEQ ID NO: 3158 - DNA, 1400 bp, Homo sapiens
gccaggatgttctccatattcaacatctggggcacattcaacaaagtgctcttcttcctcagcctcactgtcagccttgcagggctggtgggcaacgctctgctgctctggcacctcggtctgcacattaagaagggacccttcaacacctacctgctgcacctggctgctgccgatttcctcttcctctcatgccaagttggcttctctattgctacgatcgtgtcgggccatgaggacacactctacttcccagtcaccttcctgtggtttgccgtggggctctggctgctggctgccttcagtgtggactgttgcctcgcctacatgttcccctccttttgcagccccaaccgccgtcccaggttcacttcagttgtcctctgcctcgtgatctgggccctgaccatgccggccgtgctgttgccagccaacgcctgtgggctgctaaaaaacggaatgagtctgctggtctgcctcaagtaccattggaccagtgtcacctggctagcggtactgtctggcatggcatgtggggcaagcaagtttctcttaatctttgggaactgctgctcttcacagccaccccccaagttctgcaagttggcccagtgctctgggatccttctgttcttctgtcgcctacccctggttgtctactggtgcctgcggccagtcttaaaattcctgctccccttcttctttccactggccaccctcctggcctgcattgacagcagtgcaaagcccctcttgtactacatgaagggcaggcagctcaggaaggacccactgcaggtagccctaaacagggctctaggggaagagtcccagtcaggtcttggggggctatccttgcccatgcaccaagtgtagagagtggccattatacgcccacctaccctgccctcagagctgccagggggtcccagtcttgctcaaacctttgcgacggccaagctctgatcctgggaattttatggcttcctcttgtatgcaggagagaagggatgggggccagattgcatattgaacacgcacaggagacggcaaggagggcaggaacagacagagaagcaggtgcgtgaaggaggatcccagaactataatgaggacatggatcctacctccttctgcccctacagcatcctacctgaggaagctgcccctcaaccccagtacaccaggagcttcctcctgccgtagatgagtcagaagactagaactacagcatcagctcctggggagcattctctgcttttggagaaactgaggctgaccgcctccccaattctccagcctggtgttactactcatagcagccacaaggtggagctgtttcatcactaaataaacctagtctgtcctgtgcccaagtcttcctcaagttcttgcttcct

SEQ ID NO: 3159 - DNA, 600 bp, Homo sapiens
gaaggggattaccagctggtccagcatgagatcctttgctctatgaccaatagctatgaagtcttggagttcctaggccgggggacatttggacaggtggctaagtgctggaagaggagcaccaaggaaattgtggctattaaaatcttgaagaaccacccctcctatgccagacaaggacagattgaagtgagcatcctttcccgcctaagcagtgaaaatgctgatgagtataattttgtccgttcatacgagtgctttcagcataagaatcacacctgccttgtttttgaaatgttggagcagaacttatatgattttctaaagcaaaacaaatttagcccactgccactcaagtacatcagaccaatcttgcagcaggtggccacagccttgatgaagctcaagagtcttggtctgatccacgctgaccttaagcctgaaaacatcatgctggttgatccagttcgccagccctaccgagtgaaggtcattgactttggttctgctagtcacgtttccaaagctgtgtgctcaacctacttacagtcacgttactacaggcaagtggcaaatgctgaaaatcgtatcttaggctag

SEQ ID NO: 3160 - DNA, 600 bp, Homo sapiens
ggcagttacaccactgaggcattcctcagtgcacagcgcaattttgtgcaaagttgtgctgggtactgcttggtctgctacctgctgcaagtcaaggacagacacaatgggaatatccttttggacgcagaaggccacatcatccacatcgactttggcttcatcctctccagctcaccccgaaatctgggctttgagacgtcagcctttaagctgaccacagagtttgtggatgtgatgggcggcctggatggcgacatgttcaactactataagatgctgatgctgcaagggctgattgccgctcggaaacacatggacaaggtggtgcagatcgtggagatcatgcagcaaggttgtcgccgttgctcaggatcatccccatctggccccatgatgacggtggcccaggtcatctgttctcagcttccttgcttccatggctccagcaccattcgaaacctcaaagagaggttccacatgagcatgactgaggagcagctgcagctgctggtggagcagatggtggatggcagtatgcggtctatcaccaccaaactctatgacggcttccagtacctcaccaacggcatcatgtga

SEQ ID NO: 3161 - DNA, 600 bp, Homo sapiens
cggctctcaggcaggccagggactccaagtcaagtgaaggaccctgggggacggacactgggggatgctgctctgcccctgggcatggctcagaaccggttccttggcacgaggccccacccctccacgatggtgccccaccctgagcctgtgcaggaagcaccctggcccctgcagctctgggaacgtcctcccgacagctcctgggaatatcctggcactgaggtcactctgggctcccggctgacactcgtgccggaggcaaaggtcctggctgaccacgtgctgcccaagggccaatcgcgagtgcgcaggaccagtgaccctcccagccccaggacacttcttgggccagggcccagggcagagccaatgctcccccagatactccctggctgcaaacctcaggctggggctcagccctctctggccaggcccatcactgtcagcaaacacccccacactgctgcccccccagatggccatggcagccctcccggggcccgtgtctgcagcccccacgcagcccggccggccgatggaaacgcacacccacactctgtcccacctcactccgagctgggggttcggggaccacag

SEQ ID NO: 3162 - DNA, 600 bp, Homo sapiens
gaagagtcgatgaacacggtgctggtgcaggaggctggtcgctacaaccgcctactcaagttcatccacacaagtctggccgaattcctcaaggctgtgcgaggtgaggttgtcatgtcagcggagctagaggatgtcggctcgagtttctttgtcaacagcgtgccggtgtcctggagtgcgttggcctacccgtcgctgaagccgctgtcgaaatgggtcgaggatctggtgcggcgtgttcacttcattgcggactggtacgcacatggaccgcccgccgccttctggttcggcggcttcttctttccgcaggctttcctgaccggcacgcttcagaaccacgcccgtaaggtgcaccaggccatcgacagcatttcctttcagtttagcttgcaggatgggtcactggactacaagacggtaccccgaccggacaagggagcgctggtgtacggcttgtacctggagggggcgcgtgctgacagcactccagagtcccgaagcaaatctgctgtcctcaaagacaggacgcagatctctcctaaagctgcaggtcccgacctccccggtgatgaggctgaattacagcctaattaa

SEQ ID NO: 3163 - DNA, 600 bp, Homo sapiens; identical to SEQ ID NO: 3162

SEQ ID NO: 3164 - DNA, 600 bp, Homo sapiens
accccctgcccgggcagctcaagaagcagctggtgctccggatcatcagtggccagcagcttcccaagccgcgcgactccatgctgggggaccgtggggagatcatcgacccctttgtggaggtggagatcattgggctccctgtggactgcagcagggagcagacccgcgtggtggacgacaacgggttcaaccccacctgggaggagaccctggttttcatggtgcacatgccggagatcgcgctggtccgcttcctcgtctgggaccacgatcccatcgggcgtgacttcattggccagaggacgctggccttcagcagcatgatgccaggctacagacacgtgtacctagaagggatggaagaggcctccatcttcgtgcatgtggctgtcagtgacatcagcggtcagggtggggcctcggcttccgcaggaagtggtcttggtgccagccctgctgccctggctttgagctggggcccagtgccctctgggtcctgctggctgcagctggccctcggggaacccgcacacacagcaggaggggcctgcccaggcccagtgctgactctctcctgccatgctctcgggcccagag

SEQ ID NO: 3165 - DNA, 600 bp, Homo sapiens; identical to SEQ ID NO: 3164

SEQ ID NO: 3166 - DNA, 600 bp, Homo sapiens
ctctgcaatatcatatataacagaagactgccagatttcggcatttctttccagacatctaataaaccagtcctgcatcgtcctttgggtatggttgctagcttcagctccaagctcttctccttccctggtatcctcaaacctgacattgctgacccttcacacaacctccctgattttaaaggctttgactctggtggaagaaccaaacacttggtaaatggcttgtggatgtttcttgatgtgcagaacctccgttggatggctcctgaggtgttcacgcagtgcactcggtacaccatcaaagcagatgtcttcagctatgctctgtgtctgtgggaaattctcactggcgaaattccattcgctcatctcaagccagcggctgcggcagcagacatggcttaccaccacatcagacctcccattggctattccattcccaagcccatatcatctctgctgatacgagggtggaacgcatgtcctgaagcaaaatccagaccaagtcattacccagtctcatctgtgtacacagaaactcttaagaagaaaaatgaagatcgttttgggatgtggattgagtatctcagaagataa

SEQ ID NO: 3167 - DNA, 600 bp, Homo sapiens; identical to SEQ ID NO: 3166

SEQ ID NO: 3168 - DNA, 600 bp, Homo sapiens
ggattgccttcacatttccatcttcagctctcagaaattgagttccatgagattattggctcaggttcttttgggaaagtatataaaggacgatgcagaaataaaatagtggctataaaacgattttctgttgctgccatttccagttatcgagccaatacctactgctccaagtcagatgtggatatgttttgccgagaggtgtccattctctgccagctcaatcatccctgcgtaattcagtttgtgggtgcttgcttgaatgatcccagccagtttgccattgtcactcaatacatatcagggggttctctgttctccctccttcatgagcagaagaggattcttgatttgcagtctaaattaattattgcagtagatgttgccaaaggcatggagtaccttcacaacctgacacagccaattatacatcgtgacttgaacagactgagcgtggaagggagaagcgacgcccctcctgatcctctaaaacctttcaaatgctttcctgtaactggtggtgaactcactggcctgcaattttctggtgttactggtttcttacattgccattttctattctttggggatatggcctga

SEQ ID NO: 3169 - DNA, 600 bp, Homo sapiens; identical to SEQ ID NO: 3168

SEQ ID NO: 3170 - DNA, 600 bp, Homo sapiens
cgtacctcaccatcctgtgcatttagattaagttcatccctgcaaggatctgcagttactttgaagacatcaaaaatggcactgtccccttcagcaacggccaagaggatcaacagaacttctttgtcttcgggtgccactgtaagaagcttttccataaactcccggctagccagttctctagggaacttgaatgctgcaacagatgatccagagaacaaaaagacctcctcatcctctaaggcaggcttcacagccagcccgtttaccaacctcttgaatggcagctcccagccaactaccagaaattaccctgagctcaacaataatcagtacaacagaagcagcaacagcaacgggggcaacctgaacagccccccaggcccccacagcgccaagacagaggagcacaccaccatcctccgaccctcctacaccgggctttcttcttcttcagcgagattcctgagccgttctatccctgtaagtgcgcagacaccacctcctggtcctcagaaccctgaatgcaacttctgtgccttgccttcccagccgaggctgccaccaaagaaatttaatagtgccaaggaagccttctga

SEQ ID NO: 3171 - DNA, 600 bp, Homo sapiens; identical to SEQ ID NO: 3170

SEQ ID NO: 3172 - DNA, 600 bp, Homo sapiens
acacggaacgggccccctgttgtatctcaggtcactgctgtggttgcagccacaggggcaacacctgttactgccacagcgtccgacctggggccagcgtgcattcaaacgcactgctctgagaggccaggacgtccatgggttgggcgcagggggcggcggtgggaaaaggtgtcaggcaccatgggtcccgacctggagcccacgtgccagctgcagagatgggcactgaaggcttttgagcaagaggaggagctggagaagaagcaggcgctccctccattccagccacagatcacagacgactacggtctggacaactttgacacacagttcaccagcgagcccgtgcagctgaccccagacgatgaggatgccataaagaggatcgaccagtcagagttcgaaggctttgagtatatcaacccattattgctgtccaccgaggagtcggccagcttcgtgctggaggaacttgctgctgtgcctgcgtcgcggcggatccgcggggaccctgccgagggggctgtcatgcggtttccaaggtgcacattttccacggaaacagaactcgatgcactgacctgctccgccaggaaa

SEQ ID NO: 3173 - DNA, 600 bp, Homo sapiens; identical to SEQ ID NO: 3172

SEQ ID NO: 3174 - DNA, 600 bp, Homo sapiens
ttccaagtgatcctggagaagcccatccggatcccccggttcctgtccgtcaaagcctcccatgttttaaaaggatttttaaataaggaccccaaagagaggctcggctgccggccacagactggattttctgacatcaagtcccacgcgttcttccgcagcatagactgggacttgagccggggctgtgtgggcctggtgggctgtgtgagctcgcgcaccgccgggctggtctttgacatggccccacttgcgtggagccaaggctcctgtctcccagaagggtcagctgggaatgggggaccaccctccagggccccgaggagggatggggagacacatttcgtcctccggagccaggagagtgaggggccggacgagctcggcccatggcgcttcctggcaaccctcgactgtgctggcttggtgccgccaggagctagcggcacatgcgtcctgacctgtgagcacattggctgttggttccacagggatctgatagtgggggccggcctagagaagggcgtttgctttggtttcatggccggttttatcagcagttactggacaggaccagcagtcgcagcgttcacggcttga

SEQ ID NO: 3175 - DNA, 600 bp, Homo sapiens
gttgcttacatttcctcatcccggaagcatgacagcattaaagacgactcggaggaccttaagccagttatcgatgggatggatggaatcaaaatctctcaggggcttgggctgcaggactttgacctaatcagagtcatcgggcgcgggagctacgccaaggttctcctggtgcggttgaagaagaatgaccaaatttacgccatgaaagtggtgaagaaagagctggtgcatgatgacgaggatattgactgggtacagacagagaagcacgtgtttgagcaggcatccagcaaccccttcctggtcggattacactcctgcttccagacgacaagtcgggtcctgctcttgcctgtgcttggcagccacctcttgtctgtcagaagagccggcgtgacccggccgttccccgacctgctctacgtgcggtgccgtcctggtcaagggttcctgttttctggctgcttacgcctcctaattgcttctggggtaaattccaagcttcctgtgcgtgtggacgaggcttgtggtgaccaggccccagtgccccatcgtgtgcttcagcgtggcgccctcgcccgcaccgcctgcgcctga

SEQ ID NO: 3176 - DNA, 600 bp, Homo sapiens; identical to SEQ ID NO: 3175

SEQ ID NO: 3177 - DNA, 600 bp, Homo sapiens
tgcttcccagagcacaggtgctaccagacctctgtgtctccacttcaggtggtacacactcagcccctctccactgtcagatcctttgccagtcaaatcccagatccccgggggggcactgtggcaccctctttgagcgtggcctccctggagctgctgtcagagccatgggctgtgggacctggttcctctgagaagcctggatcccctttctatttccacctgccccagttcctggaccaaactgggctttccttagactctccttcccattctgagatccagtacaatctcacaggggtctactccctgctcagggaccctgacccagatcaaagtgtctgcctggatcagccctgccccagaaaccctgatgacacagtgcaggggaccctggagccaccagcaccccctaccctctaccaatcacacttgctgcgagcacctccttccttgctgcccctgtggatggcacaaagaaaccaaatttctggcaaacgcagcctgaggctgaatccttcttcgcagctttacagggtcactaactctggagtgagcctcaggggccatgaaggagcccctgggcccaagggagaatga

SEQ ID NO: 3178 - DNA, 600 bp, Homo sapiens
agagggtgcagtcggctgagaaactggcagcagcacttgccgcctctgagaagaagctagccacttctcgcaagcacagccttgacctgccccactctgaactaaagaaggaactgccgcccagggaagtgagccctctggaggtagttggagccaggagtgtgctgtctggcaagggggccctgccagggaagggggtgctgcagcctgctccctcacgggccctaggcaccctccggcaggaccgagccgaacgacgggagtcgctgcagaagcaagaagccattcgtgaggtggactcctcagaggacgacaccgaggaagggcctgagaacagccagggtgcacaggagctgagcttggcacctcacccagaagtgagccagagtgtggcccctaaaggagcaggagagagtggggaagaggatcctttcccgtccagagaccctaggagcctgggcccaatggtcccaagcctattgacagggatcacactggggcctcccagaatggaaagtcccagtggtccccacaggaggctcgggagcccacaagccattgaggaggctgccagctcctcctcagcaggccccaacctag

SEQ ID NO: 3179 - DNA, 600 bp, Homo sapiens
cttccttgttttctaagggaagcgacatctggagctatggagtgctgctgtgggaactgctcaccggagaagtcccctatcggggcattgatggcctcgccgtggcttatggggtagcagtcaataaactcactttgcccattccatccacctgccctgagccgtttgccaagctcatgaaagaatgctggcaacaagaccctcatattcgtccatcgtttgccttaattctcgaacagttgactgctattgaaggggcagtgatgactgagatgcctcaagaatcttttcattccatgcaagatgactggaaactagaaattcaacaaatgtttgatgagttgagaacaaaggaaaaggagctgcgatcccgggaagaggagctgactcgggcggctctgcagcagaagtctcaggaggagctgctaaagcggcgtgagcagcagctggcagagcgcgagatcgacgtgctggagcgggaacttaacattctgatattccagctaaaccaggagaagcccaaggtaaagaagaggaagggcaagtttaagagaagtcgtttaaagctcaaagatggacatcgaatcagtttaccttcag

SEQ ID NO: 3180 - DNA, 600 bp, Homo sapiens; identical to SEQ ID NO: 3179

SEQ ID NO: 3181 - DNA, 600 bp, Homo sapiens
cccatctacatcatcactgaatacatggagaatgggagtctagtggattttctcaagaccccttcaggcatcaagttgaccatcaacaaactcctggacatggcagcccaaattgcagaaggcatggcattcattgaagagcggaattatattcatcgtgaccttcgggctgccaacattctggtgtctgacaccctgagctgcaagattgcagactttggcctagcacgcctcattgaggacaacgagtacacagccagggagggggccaagtttcccattaagtggacagcgccagaagccattaactacgggacattcaccatcaagtcagatgtgtggtcttttgggatcctgctgacggaaattgtcacccacggccgcatcccttacccagggatgaccaacccggaggtgattcagaacctggagcgaggctaccgcatggtgcgccctgacaactgtccagaggagctgtaccaactcatgaggctgtgctggaaggagcgcccagaggaccggcccacctttgactacctgcgcagtgtgctggaggacttcttcacggccacagagggccagtaccagcctcagccttga

SEQ ID NO: 3182 - DNA, 600 bp, Homo sapiens
taatgctcgactgctggcagaaggacccaggtgagcggcccaggttctcccagatccacagcatcctgagcaagatggtgcaggacccagagccccccaagtgtgccctgactacctgtcccagctggcctctccccgggagaccaccaggtgtgggcccagatcccagctgtcggttgagcacagctcctctgacccgcaggcctcccaccccactagcggaccgtgccttctccaccttcccctcctttggctctgtgggcgcgtggctggaggccctggacctgtgccgctacaaggacagcttcgcggctgctggctatgggagcctggaggccgtggccgagatgactgcccaggacctggtgagcctaggcatctctttggctgaacatcgagaggccctcctcagcgggatcagcgccctgcaggcacgagtgctccagctgcagggccagggggtgcaggggtgtccagaatctgcgtctgagatctctctgcatagaggtgagtccaacactgctcctgccgtgaaagatgtcccaggatccatggcaggacggtgtgacccagggtaccgaggggaactgggtgccctgg

SEQ ID NO: 3183 - DNA, 600 bp, Homo sapiens
attcatactatccacgccaacggcagcctgcccaagcccatcctctggcacaagatgcacaattatttcacgcttgtgaagaacgagatcaaccccagcctttctgcagatgtccctaaggtagaggtgttggaacgggagctggcctggctgaaggagcatctgtcccagctggagtcccctgtggtgttttgtcacaatgacctgctctgcaagaatatcatctatgacagcatcaaaggtcacgtgcggttcattgactatgaatatgctggctacaactaccaagcttttgacattggcaaccatttcaatgagtttgcaggcgtgaatgaggtggattactgcctgtacccggcgcgggagacccagctgcagtggctgcactactacctgcaggcacaaaaggggatggccgtgacccccagggaggtgcaaaggctctacgtgcaagtcaacaagtttgccctgtgctgtagagtcggaaacaggcatggggagattgccaggctgaccctctctggtctgtttccaggcgtctcacttcttctgggctctctgggccctcatccagaaccagtactccaccatcgactttga

SEQ ID NO: 3184 - DNA, 600 bp, Homo sapiens
atggagaatggagatctcaatcagtttctttcccgccacgagccccctaattcttcctccagcgatgtacgcactgtcagttacaccaatctgaagtttatggctacccaaattgcctctggcatgaagtacctttcctctcttaattttgttcaccgagatctggccacacgaaactgtttagtgggtaagaactacacaatcaagatagctgactttggaatgagcaggaacctgtacagtggtgactattaccggatccagggccgggcagtgctccctatccgctggatgtcttgggagagtatcttgctgggcaagttcactacagcaagtgatgtgtgggcctttggggttactttgtgggagactttcaccttttgtcaagaacagccctattcccagctgtcagatgaacaggttattgagaatactggagagttcttccgagaccaagggaggcagacttacctccctcaaccagccatttgtcctgactctgtgtataagctgatgctcagctgctggagaagagatacgaagaaccgtccctcattccaagaaatccaccttctgctccttcaacaaggcgacgagtga

SEQ ID NO: 3185 - DNA, 600 bp, Homo sapiens; identical to SEQ ID NO: 3184

SEQ ID NO: 3186 - DNA, 600 bp, Homo sapiens
tatgaaaagctccagattctcaaaccagaggctaagatgaatgaggggtttgagtggcaactgaaattataccaggcaatgggatacgaagtggatacctctagtgcaatttataagcaatatcgtttacaaaaggttacagagaagtatccagaattgcagaatttacctcaagaactctttgctgttgacccaactaccgtttcacaaggattgaaagatgaggttctctacaagtgtagaaagtgcaggcgatcattatttcgaagttctagtattctggatcaccgtgaaggaagtggacctatagcctttgcccacaagagaatgacaccatcttccatgcttaccacagggaggcaagctcaatgtacatcttatttcattgaacctgtacagtggatggaatctgctttgttgggagtgatggatggacagcttctttgcccaaaatgcagtgccaagttgggttccttcaactggtatggtgaacagtgctcttgtggtaggtggataacacctgcttttcaaatacataagaatagagtggatgaaatgaaaatattgcctgttttgggatcacaaacaggaaaaatatga

SEQ ID NO: 3187 - DNA, 600 bp, Homo sapiens
gcccggggctccctgcctaccaccgatgcagagcctgactcctcacccactccaagagactgcagccctcaaaatggggggctccccaagcttggtgctccttcctccttttctccaggggcatcccttggaggcagcagtggggtcaacccctctccccactacctatgccccctaaccctcacagtgccgattgtctggatgtggaagagcttaaggaagggattggaagtcgaagaaaagagggcttcagaaatatgccatcgcggctgcacctgcaaagatgggcaggtggtgtctggcccagaagtacttctgggggaagaatgctctggctacggagcagagagtggttcctggctgtcaccaagtaggaagaagaatggggtacaaggacatgagagctcagcttccgacacctgctcataccaacgtgttttatcccgccccataataccaagctccaagtcccagggagcttggatggaagagtaccaggtcttagatgtccaaccaaggggcagtcctggagtagacactttggaccttgcccttggcccagtgtggacgcactgtggaagctcctcccctggtccatga

SEQ ID NO: 3188 - DNA, 600 bp, Homo sapiens; identical to SEQ ID NO: 3187

SEQ ID NO: 3189 - DNA, 600 bp, Homo sapiens
cagctgcttggcttcctgaaaccagagctgctaggcagtgaattcacccaccttgagttcccccgcagagttctgcccaaggagctggggcagaggatgttgtaccgggaccagaacatgaccggctgggcctacaaaaagatcgagctggaggatctcaggtttcctctggtctgtggggagggcaaaaaggctcgggtgatggccaccattggggtgacccgaggcttgggagaccacagccttaaggtctgcagttccaccctgcccatcaagccctttctctcctgcttccctgaggtacgagtgtatgacctgacacaatatgagcactgcccagatgatgtgctagtcctgggaacagatggcctgtgggatgtcactactgactgtgaggtagctgccactgtggacagggtgctgtcggcctatgagcctaatgaccacagcaggtatacagctctggcccaagctctggtcctgggggcccggggtaccccccgagaccgtggctggcgtctccccaacaacaagctgggttccggggatgacatctctgtcttcgtcatccccctgggagggccaggcagttactcctga

SEQ ID NO: 3190 - DNA, 600 bp, Homo sapiens
acctgcctcaccatcttggccgcccttttaaccctggtgtgcatccgcagaagctgcctgcatcggagacgcaccttcacctaccagtcaggctcggccttcctgggctcgggagccagcctctgtctgcacacatctttggctgatgttcttagccctgctgtggccacctgccaatgctactgtgtcccgtatgcctgtgcaccttcaggcctgcatgtgtgtatggacctatacatgatgcacctacatatggtgctgcccaagaacatcacgtgcatttgctatgtgccgtcagcaccagtgcttcttgcaaatccctgggccccaggaggtacaccctactgtggcatgacctgtgccgagctctatgaaaagctgccccagggctaccgcatggagcagcctcgaaactgtgacgatgaagtgtacgagctgatgcgtcagtgctggcgggaccgtccctatgagcgacccccctttgcccagattgcgctacagctaggccgcatgctggaagccaggaaggcatatgtgaacatgtcgctgtttgagaacttcacttacgcgggcattgatgccacagctgaggaggcctga

SEQ ID NO: 3191 - DNA, 600 bp, Homo sapiens; identical to SEQ ID NO: 3190

SEQ ID NO: 3192 - DNA, 600 bp, Homo sapiens
gacactttaaaaacagaagaagtattgctgtttacagatcagactgatgatttggctaaagaggaaccaacttctttattccagagagactctgagactaagggtgaaagtggtttagtgctagaaggagacaaggaaatacatcagatttttgaggaccttgataaaaaattagcactagcctccaggttttacatcccagagggctgcattcaaagatgggcagctgaaatggtggtagcccttgatgctttacatagagagggaattgtgtgccgcgatttgaacccaaacaacatcttattgaatgatagaggacacattcagctaacgtattttagcaggtggagtgaggttgaagattcctgtgacagcgatgccatagagagaatgtactgtgccccagaggttggagcaatcactgaagaaactgaagcctgtgattggtggagtttgggtgctgtcctctttgaacttctcactggcaagctcttgcagttcaatcctctggaacgacttggtgctggagttgctggtgttgaagatatcaaatctcatccattttttacccctgtggattgggcagaactgatgagatga

SEQ ID NO: 3193 - DNA, 600 bp, Homo sapiens; identical to SEQ ID NO: 3192

SEQ ID NO: 3194 - DNA, 600 bp, Homo sapiens
gtgaaggccccagagatgttgagaacccgcagagggcgtgggcaggcccaggaagcagtgagtcggggacagtcaccctccactgcagcagtgacccggggccacagcctgagcacctggatgctccccgaggtgggagcggcgttggtcaaagcggagaccacgtgtgccacaccccagagctgcctgcacttacaggcgtttcgagctgatccgggccaggtcaccagctacccgtacagtgaggacgcccgccagggtgagcagtacatgaacacccggtgcccagcctggtgtgaccgcatcctcatgtccccgtctgccaaggagctggtgctgcggtcggagagcgaggagaaggttgtcacctatgaccacattgggcccaacgtctgcatgggagaccacaagttccacattcacggggcccccaacccctgcgctgccgtggctgtgcacaagggccgagctgcctctgctggccatcagctcctcccagcccggttcatggctgccctgcccgtgttcctggccttccgaatcatgcccggggcaggtaaacctcatgcccatgtgcacaagtgttgtgtcgtgcagtga

SEQ ID NO: 3195 - DNA, 600 bp, Homo sapiens; identical to SEQ ID NO: 3194

SEQ ID NO: 3196 - DNA, 600 bp, Homo sapiens
gaacagccttggcatggtgtgggggcacatggggcacgttcaccaggcagcgtcatcggggtcattgtggcagctgggccacaggctggaggagggcaagaccgcctgcacgcactcattcctggcgcctcctgtgcctttgacttggtgaatatccatcttttccatgatgcttccaatctggtcgcctgggaaacaagcccttccgtgtactcgggaatccggcacaaggcactgggctacaatgcggagttacactcccgactaagcgtgcgagggcctggagctgccctgcgcctcgcccaccttccagcagctggcatcctcagacgccgaccttctgttcccggggccggggacctgtccggcctcccggatatctctggagctggcactgacaccgaggcagggatcggtctgagcctggggactgtgctctcaactgcccaccgtagggaagcagcacaggtccatgtcccgtatcagctgcggggccggcagcaccaggcccaggagggagggcaggtcccagccctggaggaggatgcaggccaggttaaaacccagaggcaccgtaggaccttcgcaccgttgctctaa

SEQ ID NO: 3197 - DNA, 600 bp, Homo sapiens; identical to SEQ ID NO: 3196

SEQ ID NO: 3198 - DNA, 402 bp, Homo sapiens
atgtgcccaattcagtgttgtgtatgtgtctgggtaacacatacacccattgcagtcagtcacttgtttgcagaagcaattttcagaaaggttgtaatgaacaaaatgtttcagatattttggaggatagactgtgcagtgacctccacatatgaaataggaaaccctccagattacagggaggaaaattgcatgaagaagcatggtatgcccatgaatcacatggctcagcagattatcaaagaagactttaccacatttgattatataccatatatcaatgaaagcaacttgagagatttgaatagaaaatttcctcaagttaaaaactgcaaagctaaaattgaactacttgggtgctatgattcaccaaaacaacttgttattgaaaacccctgttaa

SEQ ID NO: 3199 - DNA, 600 bp, Homo sapiens
gcctatctgcattccaaaggaatcatttacagggacctcaagccagaaaatctcatcctagatcaccgaggttatgccaaactggttgattttggctttgcaaagaaaataggatttggaaagaaaacatggactttttgtgggactccagagtatgtagccccagagatcatcctgaacaaaggccatgacatttcagccgactactggtcactgggaatcctaatgtatgaactcctgactggcagcccacctttctcaggcccagatcctatgaaaacctataacatcatattgagggggattgacatgatagaatttccaaagaagattgccaaaaatgctgctaatttaattaaaaaactatgcagggacaatccatcagaaagattagggaatttgaaaaatggagtaaaagacattcaaaagcacaaatggtttgagggctttaactgggaaggcttaagaaaaggtaccttgacacctcctataataccaagtgttgcatcacccacagacacaagtaattttgacagtttccctgaggacaacgatgaaccaccacctgatgacaactcaggatgggatatagacttctaa

SEQ ID NO: 3200 - DNA, 600 bp, Homo sapiens; identical to SEQ ID NO: 3199

SEQ ID NO: 3201 - DNA, 600 bp, Homo sapiens
tcagccggcaccgccctgctgcacatctatgacaaagtgatgaccgtccagaggggtgcccggcctggtgtccccaaagctgtggtggtgctcacaggcgggagaggcgcagaggatgcagccgttcctgcccagaagctgaggaacaatggcatctctgtcttggtcgtgggcgtggggcctgtcctaagtgagggtctgcggaggcttgcaggtccccgggattccctgatccacgtggcagcttacgccgacctgcggtaccaccaggacgtgctcattgagtggctgtgtggagaagccaagcagccagtcaacctctgcaaacccagcccgtgcatgaatgagggcagctgcgtcctgcagaatgggagctaccgctgcaagtgtcgggatggctgggagggcccccactgcgagaaccgtgagtggagctcttgctctgtatgtgtgagccagggatggattcttgagacgcccctgaggcacatggctcccgtgcaggagggcagcagccgtacccctcccagcaactacagagaaggcctgggcactgaaatggtgcctaccttctggaatgtctgtgccccaggtccttag

SEQ ID NO: 3202 - DNA, 600 bp, Homo sapiens; identical to SEQ ID NO: 3201

SEQ ID NO: 3203 - DNA, 600 bp, Homo sapiens
ccccccagccctgcggccggggccccactgccatggctgccaccacctacctcagagaccgctgccaccaggagtgcggctgccagggagggcggcccgagcgcgggcaggaagcccccggcgccccccacggccaccagcacgctgcagcagggcctgcgcagcctgcgcctctcctcggaccacctgcaggacaccagccgcctcaagccctccttctctctggacatcaaccccgagggcgtgcaagggccgggcagggtgctgtttgcgcccttcggccgggcgggcgccccggaacccaacggctgcagcgacctgccacggcgggaggcagcaagggctgagcccgggacgcgcggaccagctgagctacctgactggcagggcggcactactgcaggagaggagcttggcctccgggggtcaggcaggaggggggcctggctagcctgtgctggctccactgggcggggagccctggactgccaggataacgaattggaaaagatcacaaggaggttcaccatggagctagcaaagaagggctttattgcatttcccccaccatggacaaatgcctatgaaattaaactataa

SEQ ID NO: 3204 - DNA, 600 bp, Homo sapiens
aagtgggccagtttgaacttgggagtcctcatgtgtattgaatgctcaggtatccaccgcagtcttggcacccgcctttcccgtgtgcgatctctggagctggatgactggccagttgagctcaggaaggttatgtcatctattggcaatgagctagccaacagcatctgggaagggagcagccaggggcagacaaaaccctcaataaagtccacgagggaagagaaggaacgctggatccattccaaatatgaggagaagctctttctggccccactaccctgcactgagctgtctctgggccagcagctgctgcgggccaccgctgatgaggacctgcagacagccatcctgctgctggcacatggctcccgtgaggaggtgaacgagacctgtggggagggagacggctgcacggcactccatctggcctgccgcaaggggaatgtggtcctggagcagctcctgatctggtacggggtggacgtcatggcccgagatgcccacgggaacacagcgctgacctacgcccggcaggcctccagccaggagtgcatcaacgtgcttctgcagtacggctgccccgacgagtgcgtgtag

SEQ ID NO: 3205 - DNA, 600 bp, Homo sapiens
gactggtggtccttcggggttctcctttatgaaatgctgattggtcagtcgcctttccacgggcaggatgaggaggagctcttccactccatccgcatggacaatcccttttacccacggtggctggagaaggaagcaaaggaccttctggtgaagctcttcgtgcgagaacctgagaagaggctgggcgtgaggggagacatccgccagcaccctttgtttcgggagatcaactgggaggaacttgaacggaaggagattgacccaccgttccggccgaaagtgacatgggccatatccgtgctgaagggggccaggctcatggacttcccaacagattccaccccagagaacgcacaggctattagtcatgatagcgaatggccagaagaagcagcactttctgttgataatggttgttctcaatcttgggacactgaattgaacaccatactgaacagcatcaatttcgacaaagaattcttaaacgagaagccccggctgtcatttgccgacagagcactgatcaacagcatggaccagaatatgttcaggaacttttccttcatgaaccccgggatggagcggctgatatcctga

SEQ ID NO: 3206 - DNA, 600 bp, Homo sapiens; identical to SEQ ID NO: 3205

SEQ ID NO: 3207 - DNA, 600 bp, Homo sapiens
aagccctcacactcgcccaggtgcgtcagcatcaggtgtgtgtgtggggacggccatgtgaagccctcacactcgcccagttgtgtgtgtggggatggccacgtgaagccctcacacttgcccagggacggccatgtgaagccctcacactcgcccaggtgcgtcagcatcagttgtgtgtgtggggacggccatgtgaagccctcacactcacccaggtgtgtcgacatcagttgtgtgtggggggacggccatctgaagccctcacactcacccagggacggccatgtgaagccctcacactcgcccaggtgcgtcagcatcagttgtgtgtgtggggacggccatgtgaagccctcacactcgcccaggtgcgtcggcatcaggtgtgtgtgccgggacagccacgtgaagccctcacactcgcccaggtgtgccggctttggttgtgtgtgcggggacggccacgtgaagccctcatgctcactcaggcatgctggtattctggggctgccaggacaggacggctgccggcagccctgggtgtcctcaggcagaattgctggtggagagctgctgtctgccaggtggccactgtga

SEQ ID NO: 3208 - DNA, 600 bp, Homo sapiens
gaggcgacggcgctggaccgctataggctgcagaaggcggggttcacgcacgtgctgaacgcggcccacggccgctggaacgtggacactgggcccgactactaccgcgacatggacatccagtaccacggcgtggaggccgacgacctgcccaccttcgacctcagtgtcttcttctacccggcggcagccttcatcgacagagcgctaagcgacgaccacagtaagatcctggttcactgcgtcatgggccgcagccggtcagccaccctggtcctggcctacctgatgatccacaaggacatgaccctggtggacgccatccagcaagtggccaagaaccgctgcgtcctcccgaaccggggctttttgaagcagctccgggagctggacaagcagctggtgcagcagaggcgacggtcccagcgccaggacggagaaaacggcagcagacatgaagcgggtagtgacagcttccagggccaggaatcccaaaccagacagaaaccaaagagagttgctgctgttggagatgccggccgtcaaggaccaggcatggaaatggcctggagaaaccagaatgtgataaaggccttctag

SEQ ID NO: 3209 - DNA, 600 bp, Homo sapiens
aaaacccatgatgccatctcctctggggaggaaaatactgctctgtggaacctcgcagggcctttcggcacagccagaattccctgtgacctcaagctcagcatgtccgcattccggattcctcctccccgcccagactggctctgcctgctgcgtcctgctgggacaccagttgcgcagtgcctgaagccaggaacctggacctccttccagcagatgtatctgcttccatctgcctctcagaaaaacccaccatgttaccgtgaagaagcttacatccactttgcccagcagatatatgggaagaaggtggaagctagttctctgttggtcctaggagtcattactaatgaccaggaggctgatttctggattaagcatgaaaatattgttgccctggaagacatttatgaaagcccaaatcacctgtacttggtcatgcagctggatcaggtgggaaaagaagtgattgaagtgggccagatgcaacacctgaccgcagcgcagctgcctgcagcctccgctcctgcagcagggctgctgggtcccgtggaggaaaccacattgtcggatgagtggcagctgctgaaaactgaatga

SEQ ID NO: 3210 - DNA, 600 bp, Homo sapiens; identical to SEQ ID NO: 3209

SEQ ID NO: 3211 - DNA, 600 bp, Homo sapiens
gaccggatagtggagaaggggttttatacagagaaggatgccagcactctgatccgccaagtcttggacgccgtgtactatctccacagaatgggcatcgtccacagagacctcaagcccgaaaatctcttgtactacagtcaagatgaggagtccaaaataatgatcagtgactttggattgtcaaaaatggagggcaaaggagatgtgatgtccactgcctgtggaactccaggctatgtcgctcctgaagtcctcgcccagaaaccttacagcaaagccgttgactgctggtccatcggagtgattgcctacatcttgctctgcggctaccctcctttttatgatgaaaatgactccaagctctttgagcagatcctcaaggcggaatatgagtttgactctccctactgggatgacatctccgactctgcaaaagacttcattcggaacctgatggagaaggacccgaataaaagatacacgtgtgagcaggcagctcggcacccatggatcgctggtgacacagccctcaacaaaaacatccacgagtccgtcagcgcccagatccggaaaaactttgccaagagcaaatggaga

SEQ ID NO: 3212 - DNA, 600 bp, Homo sapiens
atgggcaggattgtcttaaaaacccagcaggaaaacctagaagagaaaaacattgttcaagatgacaaagaggtgatcttgagctcagaggaggagagtttctttgtccaagtgcatgatgtttctccagagcaacctcgaacagtcatcaaagcaccccgcgtcagcactgcacaggatgtcattcagcagaccttatgcaaagccaaatattcctacagcatcctgagcaaccccaatccaagcgactatgtgcttttggaagaggtggtgaaagacactaccaacaagaagactaccacaccaaagtcctctcagcgggtccttctggatcaggagtgtgtgtttcaagcccaaagcaagtggaaaggtgcaggaaaattcatccttaagctaaaggagcaggtgcaggcatctcgagaagataaaaagaaaggcatttctttcgcaagtgaactcaagaagctcaccaagtcaactaaacagccccgaggacttacatcaccttctcagctcttgacctcagaaagtatccaaaccaaggaggagaaacctgtgggtggcttgtcctccagtgacacaatggattaccgacagtga

SEQ ID NO: 3213 - DNA, 600 bp, Homo sapiens
tatgtgtattattatagctacctgttaaagaatcatctggattatagaccagtggcactgttgtttcacaagatgatgtttgaaactattccaatgttcagtggcggaacttgcaatcctcagtttgtggtctgccagctaaaggtgaagatatattcctccaattcaggacccacacgacgggaagacaagttcatgtactttgagttccctcagccgttacctgtgtgtggaccagaggaaacctcagaaaaagtagaaaatggaagtctatgtgatcaagaaatcgatagcatttgcagtatagagcgtgcagataatgacaaggaatatctagtacttactttaacaaaaaatgatcttgacaaagcaaataaagacaaagccaaccgatacttttctccaaattttaaggtgaagctgtacttcacaaaaacagtagaggagccgtcaaatccagaggctagcagttcaacttctgtaacaccagatgttagtgacaatgaacctgatcattatagatattctgacaccactgactctgatccagagaatgaaccttttgatgaagatcagcatacacaaattacaaaagtctga

SEQ ID NO: 3214 - DNA, 600 bp, Homo sapiens
gccacgttctacgataagcattgtgacctggagagcctgggcatggtcctctacatcatgctgagtggctacctgcccttcgtgggtcactgcggggccaactgtggctgggaccggggtgaggtctgcagggtgtgccagaaaaagctgtttgaaagcatccaggaaggcaagtatgaatttcctgacaaagactgggcacacatctccagtctgcagagcaggcagcagcgtctgctctatggctccattcaggctttttcatctacgaaggccctgaagttcccaccaaccccccatttccctagggtcctcgaggaaaaagctttttccaaaggggttgtctttgaaaaggaaagcaatcacttgtcattttgcataattgcctgcagcaggaacatctcttcgctgggctccacctgctcagccgcctgcagatctgggatccggtgtgccctcaccgctctagcggtggctggggctgcagcctgcagggagaagcaagaagcatcagttgacagaggctgccgacccgtacctgttccctctctgctctgtcaccctcctctggcggtccttccaccttcctctgtcctctga

SEQ ID NO: 3215 - DNA, 98 bp, Homo sapiens
ctggagggaagccttttggctataaccagtctcagcaagacatcctacaagagaatactattcttaaagctgctgaagtgcagttcccaccaaaatga

SEQ ID NO: 3216 - DNA, 600 bp, Homo sapiens
ctccttcaggatgaagtcctgattccttccaaggccttcttcgtgggacccgtgactgcttttcagcctcttttcttgccctcttcttgtcctcgagccatagtgaactgcttgaaactctgctggaaatgctgctgctgtgtccaaaataagagtgagccaagccgcagaagcgtgcctgtggaggagagcattagcggagtgcgcatggcctgttgtactgcctgggctaatgctcaaagctgtgcagcatcagcaaaaatgactcagggccaagtttcctcaaaaaaacgaaagtcaatccaagaagaaaaacgaagaccaaggaaagacagtcagggaaaattattagatttggaagatttctattataaggaatttttgcccagtcgttctggaccaaaggaacatagccctagtttaagagaacgaagaccacagcaagaactccagaatcaatgtattaaggctaatgaaaggtgctgggcggcggagagccccgagaaggaggaggagagagagccagcagccaacccctacgacttcaggaggctcctgcgcaaaacctcccagcgccggcgcctcgtccagcagtcctaa

SEQ ID NO: 3217 - DNA, 600 bp, Homo sapiens; identical to SEQ ID NO: 3216

SEQ ID NO: 3218 - DNA, 600 bp, Homo sapiens
ttagcctctaaaagaaatgctgttgcttttcgaagttttaacagtcatattaatgcatccaataactcagaaccatccagaatgaacatgacttctttagatgcaatggatatttcgtgtgcctacagtggttcatatcccatggctataacccctactcaaaaaagaagatcctgtatgccacatcagaccccaaatcagatcaagtcgggaactccataccgaactccgaagagtgtgagaagaggggtggcccccgttgatgatgggcgaattctaggaaccccagactaccttgcacctgagctgttactaggcagggcccatggtcctgcggtagactggtgggcacttggagtttgcttgtttgaatttctaacaggaattccccctttcaatgatgaaacaccacaacaagtattccagaatattctgaaaagagagctaaaacgtcatcctctcttcagtgatgtggactgggaaaatctgcagcatcagactatgcctttcatcccccagccagatgatgaaacagatacctcctattttgaagccaggaatactgctcagcacctgactgtatctggatttagtctgtag

SEQ ID NO: 3219 - DNA, 600 bp, Homo sapiens; identical to SEQ ID NO: 3218

SEQ ID NO: 3220 - DNA, 600 bp, Homo sapiens
acaggtcctgtggtggctggtgtgctggggattaccatgtccagatactgtctatttggagacactgtcaacatggcatccagaatggagagcagcagttcacctctccggattcatgtctctcagagcactgcaagcaccctggtggcattgggagggtacgatttgctaaagagaggcaccattccagtcaagggcaaaggagagcaaacaactttctggttgaaagataaagaaggcttcactcttccactcccgaatttactgaggaaaaagccaaagtcccagagatattgtgagcctgtgcctccagcaaatgcagatttggaggagctgaagatggtgaactcatttcctggggtgccagggctgacttgtggctctcagccctgtgcaactgccctagctgccagatatttacagcccattaacttgagaatttgtgttgaacccagtttcattctgcaggaggggaaagtggagaggatgaagcctgtctttcttgtgcaagatgcctgctctctaacctttggtgctgattttccttatcagctaatcagcttgcaaggagataggagctcatatctgacagcatcttga

SEQ ID NO: 3221 - DNA, 600 bp, Homo sapiens
ctaaagagcaaaaacatcctcatcaagaaaaatgggagttgctgcattgctgacctgggccttgctgttaaattcaacagtgacacaaatgaagttgatgtgcccttgaataccagggtgggcaccaaacgctacatggctcccgaagtgctggacgaaagcctgaacaaaaaccacttccagccctacatcatggctgacatctacagcttcggcctaatcatttgggagatggctcgtcgttgtatcacaggagggatcgtggaagaataccaattgccatattacaacatggtaccgagtgatccgtcatacgaagatatgcgtgaggttgtgtgtgtcaaacgtttgcggccaattgtgtctaatcggtggaacagtgatgaagtgagtggaactcagtcccctgaagaagtgattcgtaaatgccaccaaatatattctctgctcactgaacatctctttacttttcagtgtctacgagcagttttgaagctaatgtcagaatgctgggcccacaatccagcctccagactcacagcattgagaattaagaagacgcttgccaagatggttgaatcccaagatgtaaaaatctga

SEQ ID NO: 3222 - DNA, 600 bp, Homo sapiens; identical to SEQ ID NO: 3221

SEQ ID NO: 3223 - DNA, 600 bp, Homo sapiens
gggatgttggaccctcccttcgttccagacatgagcttgagcaggcagggggaggatggtaatcacagcattgctctcgaccctggctgcctggcgaaccgcctggggagcatgaacaacactcgccttggatgcagtccccagggagtctggggctgcacgccaacccccagtcatccctgccagccccccacagtcatcccgccccccacagtcttccctgccagccccccacagtcttccctgccagcccccccagtcgtccctgccagccccccacagtcatccctgccagccccccaccatcgtccctgccagccccccaccgtcccccgcgctgtgtactgtaaggacgtgctggacatcgagcagttctccactgtgaagggcgtcaatctggaccacacagacgacgacttctactccaagttctccacgggctctgtgtccatcccatggcaaaacgagatgatagaaacagaatgctttaaggagctgaacgtgtttggacctaatggtaccctcccgccagatctgaacagaaaccaccctccggaaccgcccaagaaagggctgctccagagactcttcaagcggcag

SEQ ID NO: 3224 - DNA, 600 bp, Homo sapiens; identical to SEQ ID NO: 3223

SEQ ID NO: 3225 - DNA, 600 bp, Homo sapiens
agtctcagccacagcgtcatctcccaaacgagcttccgggccgagtacaaggccacgggggggccagccgtgttccagaagccggtcaagttccaggttgatatcacctacacggagggtggggaggcgcagaaggagaacggcatctactccgtcaccttcaccctgctctcaggccccagccgtcgcttcaagagggtggtggagaccatccaggcccagctgctgagcacacacgacccgcctggcggcccagcacttgtcagggctgacatcccccttggtgcagctgtcattgtgattttcgacctcatgggccatttctcagctataaattgcgctctcagctgtgggcttctggtgactggaaggcaggaacgagctgccccagccagggctgagcgggtggcgctttctcttggcaatcagaaggctgccgctcattctggacctcttcctgagagtgctctcccgggcatgcggcttgcgaggagtggctcccacaccccagccgggtgcgcccttggccagcgcctgccagccacctctgtcacttccagtgaagtccaggagcccacagggccagcgggtgccatgtga

SEQ ID NO: 3226 - DNA, 600 bp, Homo sapiens; identical to SEQ ID NO: 3225

SEQ ID NO: 3227 - DNA, 600 bp, Homo sapiens
aagagctgccaaagggtcttacgaaatgaagtccacaactggacagagttaggctccacacctaaccagggaatcaggaaagatgagctcagccccattgcatttacttcttgcagctggcttcactccttaaaagttggtggggtcacagaagcagcaaagcctccttccagaggctctaagcatttgatgctcacatccactcctcccaaggatgagatgacctcactggctctggtcaatactaatcccttcaccccaaagtcctatagaaaattattccttcaatccagtgtcaagaggaaaattcgagatgatcttgaggaagctgaatgctcggaggtagaaaaaattggggttggtgaatttggtacagtctacaagtgcattaaaagcctggatagaagtgtttatgcaataaagcactatatgaaaactttttcaggatttcacctgagaatttggctttgcgtgaagtttatgctcatacagtgtttggacatcaccccacctggccatgtgacatcaataagcaaactcaaagtggaaaaagcagatagttgctgcctagcaaatgagattttgcaagaggattattag

SEQ ID NO: 3228 - DNA, 600 bp, Homo sapiens; identical to SEQ ID NO: 3227

SEQ ID NO: 3229 - DNA, 600 bp, Homo sapiens
aattccataagtgactgtgctaaaagtgttttgaaacaacttatgaaagtagatcctgctcacagaatcacagctaaggaactactagataaccagtggttaacaggcaataaactttcttcggtgagaccaaccaatgtattagagatgatgaaggaatggaaaaataacccagaaagtgttgaggaaaacacaacagaagagaagaataagccgtccactgaagaaaagttgaaaagttaccaaccctggggaaatgtccctgatgccaattacacttcagatgaagaggaggaaaaacagcaaagtcatgctgactctatgagatggggaacaagcttgtgcaagaagaaatctgagtcagcacagtacaggcgagaacctaagaaggacagtacatctactgcttatgaaaagcaatttcctgcaaccagtaaggacaactttgatatgtgcagttcaagtttcacatctagcaaactccttccagctgaaatcaagggagaaatggagaaaacccctgtgactccaagccaaggaacagcaaccaagtaccctgctaaatccggcgccctgtccagaaccaaaaagaaactctaa

SEQ ID NO: 3230 - DNA, 600 bp, Homo sapiens; identical to SEQ ID NO: 3229

SEQ ID NO: 3231 - DNA, 600 bp, Homo sapiens
aatgctgcctctgaagaaggagacgaagatgattgggcatccaacaaagttatgtttaaaataggtgatcttgggcatgtaacaaggatctccagtccacaagttgaagagggcgatagtcgttttcttgcaaatgaagttttacaggagaattatacccatctaccaaaagcagatatttttgcgcttgccctcacagtggtatgtgctgctggtgctgaacctcttccgagaaatggagatcaatggcatgaaatcagacagggtagattacctcggataccacaagtgctttcccaagaatttacagagttgctaaaagttatgattcatccagatccagagagaagaccttcagcaatggcactggtaaagcattcagtattgctgtccgcttctagaaagagtgcagaacaattacgaatagaattgaatgccgaaaagttcaaaaattcacttttacaaaaagaactcaagaaagcacagatggcaaaagctgcagctgaggaaagagcactcttcactgaccggatggccactaggtccaccacccagagtaatagaacatctcgacttattggaaagaaaatgaaccgctct

SEQ ID NO: 3232 - DNA, 600 bp, Homo sapiens; identical to SEQ ID NO: 3231

SEQ ID NO: 3233 - DNA, 600 bp, Homo sapiens
ctggatggatgcatttatgccattaagcgatcaaaaaagccattggcgggctctgttgatgagcagaacgctttgagagaagtatatgctcatgcagtgcttggacagcattctcatgtagttcgatatttctctgcgtgggcagaagatgatcatatgcttatacagaatgaatattgtaatggtggaagtttagctgatgctataagtgaaaactacagaatcatgagttactttaaagaagcagagttgaaggatctccttttgcaagttggccgaggcttgaggtatattcattcaatgtctttggttcacatggatataaaacctaaatcccctatccctgcaacaaagcccgaaagggattctactgggacagttgctcggtcccagggcccaggcattggagagagcctcgctccagagactctgtggccccaccggagccggtgccggcttttaggggttttctcacggaaatgttcagctgccgacgctcttaatctgattgagacttcggcacgtaaacgcggttctaggagcccggactggctcagtgcacgacttatcagaaacttacccgtatctaacacacaatag

SEQ ID NO: 3234 - DNA, 465 bp, Homo sapiens
atggacgtaccgacaatggtctggggtattttgaaatacgttgttggccggctggcccagggcgttgttgtcgccagattccccgtcctggtttctgagaggtcctcaacaagcacgagctgcaagcgcttctactccctgcgccacatcgcctcagacgtgggctggggccgcgcctggctgcgctgtgccctcaacgaacactccctggagtgctacctgcacatgctcctggccgaccgctgcaggctcagtactttttatgaagactggtcttttgtgatggatgaagagaggtccagtatgcttcctaccatggcagcagctgaggaggccggctgcagccccaagacagagcgctactcctggcagtgcgtcaatcagagcgtcctgtgcggtgagtccccagcaccaccatgccacccaccccgagtatcccctgggcatcctggcatagccagatga

SEQ ID NO: 3235 - DNA, 600 bp, Homo sapiens
catatccagattgctgatctcttaaaggaagtgatccccgaagtctacgggacccccagttacctggcccctgagatcatcgagagctgcatgaatgaggaccatccgggctacgggaaggaggtggacatttggagcactggcgtcatcatgtacacgctactggctggctccccacctttctgccaccggaagcagatgctggtgctgaggatgatcataagcagcaactaccagtttggatcgcccgagtgggacgattacttggacaccgtgaaggacctggtctcccgattcctgatggtgcaaccccagactgctgcacagcggaagaggccttggcacaccccttcttccagcatactggtggaggaagtgcggcacttcagcccacgcgggaagttcaaagtacaaagtgtcctgacccaagccctgtggcagttgtcaccagctccccaacttccgtgccagctcatcgatgcctatgctttccgaatctatggccactgggtgaagaaggggcagcagcagaaccgggcggcccttttcaagaacacacccaaggccgtgctcctctccctggccaaggagggctactga

SEQ ID NO: 3236 - DNA, 600 bp, Homo sapiens
gaggtgttcgagcgcgaccaggtggacgcgagcgaccgcacgtgccgccgccgcgggacattcaagcgcagcaagctccgggcgcgcgacggcggcgagcgtatcagcatgccactcgacttcaagcaccgcatcaccgtgcaggcctcacccggccttgaccggaggagaaacgtcttcgaggtcgggcctggggattcgcccacctttccccggttccgagccatccagttggagcctgcagagccaggccaggcatggggccgccagtccccccgacgtctggaggactcaagcaatggagagcggcgagcatgctgggcttgggctggggaagcccagaatgggaggagaaggtcccgcatggacgaagccacatggtacctggattcagatgactcatcccccttaggatctccttccacacccccagcactcaatgcaggctccagggagaaaagaaagacaggaagcccacctggcatttggtacccaagggaagctggacccagatgggggaaggaatcagcctgtgtggggtggagccaaacaagtgtcagccacactgtgcttctcagagccccttctgggagcctgtag

SEQ ID NO: 3237 - DNA, 600 bp, Homo sapiens; identical to SEQ ID NO: 3236

SEQ ID NO: 3238 - DNA, 600 bp, Homo sapiens
ctctacctgggctcgcagaaggacgtcctaaacaaggatctgatgacgcaaaatggaataagctacgtcctcaacgccagcaactcctgccccaagcctgacttcatctgcgagagccgcttcatgcgggtccccatcaacgacaactactgtgaaaaactgctgccctggctggacaagtccatcgagttcatcgataaagccaagctctccagctgccaagtcatcgtccactgtctggctggcatctcccgctctgccaccatcgccatcgcctacatcatgaagaccatgggcatgtcctccgacgacgcctacaggttcgtgaaggacaggcgcccgtccatctcgcccaacttcaacttcctgggccagctgctggagtacgagcgcagcctgaagctgctggccgccctgcagggcgacccgggcaccccctcagggacgccggagcctccgcccagcggcggcagcgacctgcggcggcgggaggcagcgagggctgagccccgggacgcgcggaccggctggcccgaggagccggccccggagacgcagttcaagcgccgcagctgccagatggagttcgaggagggcatg

SEQ ID NO: 3239 - DNA, 600 bp, Homo sapiens
ggcaagctggcactgcccccctacctcaccccagatgcccgggaccttgtcaaaaagtttctgaaacggaatcccagccagcggattgggggtggcccaggggatgctgctgatgtgcagagacatccctttttccggcacatgaattgggacgaccttctggcctggcgtgtggacccccctttcaggccctgtctgcagtcagaggaggacgtgagccagtttgatacccgcttcacacggcagacgccggtggacagtcctgatgacacagccctcagcgagagtgccaaccaggccttcctgggcttcacatacgtggcgccgtctgtcctggacagcatcaaggagggcttctccttccagcccaagctgcgctcacccaggcgcctcaacagtagcccccgggcccccgtcagccccctcaagttctccccttttgaggggtttcggcccagccccagcctgccggagcccacggagctacctctacctccactcctgccaccgccgccgccctcgaccaccgcccctctccccatccgtcccccctcagggaccaagaagtccaagaggggccgtgggcgtccagggcgctag

SEQ ID NO: 3240 - DNA, 600 bp, Homo sapiens; identical to SEQ ID NO: 3239

SEQ ID NO: 3241 - DNA, 600 bp, Homo sapiens
caagaaggtaatatcttgttgctggaaggccgagagaattctgaaaaacagaaactgatgctcattgatttcgaatacagcagttacaattacaggggattcgacattggaaatcacttctgtgagtggatgtatgattatagctatgaaaaatacccttttttcagagcaaacatccggaagtatcccaccaagaaacaacagctccattttatttccagttacttgcctgcattccaaaatgactttgaaaacctcagtactgaagaaaaatccattataaaagaagaaatgttgcttgaagttaataggtttgcccttgcatctcatttcctctggggactgtggtccattgtacaagccaagatttcatctattgaatttgggtacatggactacgcccaagcaaggtttgatgcctatttccaccagaagaggaagcttgggcacactctggtttccctgcttctagcccagaagcgaagagccctggaggacgttggagactgggagcagtgctggtgcctggggatgctgagcggctgggcaggagggaggcttttgctgttcagccttctagagagttacagttttaagcag

SEQ ID NO: 3242 - DNA, 600 bp, Homo sapiens; identical to SEQ ID NO: 3241

SEQ ID NO: 3243 - DNA, 198 bp, Homo sapiens
ctcttcaggcagcccagtaatagtcctccccccatgagcagtgccatgatccagcctcacggggctgcatcttcttcccagtttcaaggcttaccttcccgcagtgcaatctttcagcagcaacctgagaactgttcctctcctcccaacgtggcactaacctgcttgggtatgcagcagcctgctcagtcacagcag

SEQ ID NO: 3244 - DNA, 198 bp, Homo sapiens; identical to SEQ ID NO: 3243

SEQ ID NO: 3245 - DNA, 600 bp, Homo sapiens
ccacccccatatcatcaggctctaccaggttatggagacagaacggatgatttatctggtgacagaatatgctagtggaggggaaatatttgaaaattcaaaatcgatttcctgtacttctaacaatattactcttcgtcgggtatgtaaatctcttagtgtcacttacttcttttcattttgcaaggaagggcagaccaaaaagattaaagaagaccaatgccaagtcatggtcatgggaaaagcatatacgaatataaagcagctatttgtcagcaggcagctgaaaggcgattttcagcagggagtgaaaaccactgcaggctgctggcttcctggcacacccactagacctcaccacctggtggcccatggtagaatggcagaaaaggaggcacgtcggaagttcaaacagatcgtcacagctgtctatttttgtcactgtcggaacattgttcatcgtgatttaaaagctgaaaatttacttctggatgccaatctgaatatcaaaatagcaggtgctccccagctttgtcgaactgaagttcaggcggtactgataaaggacataaatattgtattgaggacatggcatttgag

SEQ ID NO: 3246 - DNA, 600 bp, Homo sapiens; identical to SEQ ID NO: 3245

SEQ ID NO: 3247 - DNA, 348 bp, Homo sapiens
atgcaggtggcaataaaaataatcgataagtctcagctggatgcagtgaaccttgagaaaatctaccgagaagtacaaataatgaaaatgttagaccaccctcacataatcaaactttatcagaagaattcttccaacagaaggcaagaaaagagaagatccaagaagatggacagtgagaaagggaattggcattttcgtaggaaagaggactacttcagagagaggttcctaaaattgaggtgtaatgaaggcttgtcttcctcacagggtggagatcagattggatacagatatgaacgtgcatattgccttgcaaagaagctttctaaggacattaaacagtga

SEQ ID NO: 3248 - DNA, 348 bp, Homo sapiens; identical to SEQ ID NO: 3247

SEQ ID NO: 3249 - DNA, 600 bp, Homo sapiens
cacgccacacatagctcccggagcgcacagccttgcctgtctcttctgtctgggatccgccagaactgccttccagtcgctacagagcccaaatgcttagcagtgcccctgtgccagcaaagcactgtgggtcttgggaagtggttcttgtcagcccgagggacactgggttctccactgtccttcacaggaaattctagcttcctcagcctttgtgccaccactagagacacagacagtggcgctgtaactgtccctgaccagggcacatccctcccaagcccacctgtgcttcccagccaggatgccctcagttgtgccagcagagttgggtgtccagcagcagcctacaagtatatggggcactgggcagagaaagctggggcagcccagggtcgtgctgaggtgcctttccctcggggccctggaaagcgccaccccatcgggccttttggtgtccacctggctgttccccacatcctggtcactgatggtctccagagccccaaccacaggaaagacctggctcctttcagaactcatatcagtttaagagaacaactctggagacagaaatggcttggctttccgacgcaatga

SEQ ID NO: 3250 - DNA, 600 bp, Homo sapiens; identical to SEQ ID NO: 3249

SEQ ID NO: 3251 - DNA, 600 bp, Homo sapiens
cccacaggctgtggggtgagaggcccctcctccggtgtgctccagagagacccacagaggcaactcaggagtaagatgtgtgagcgcactcgtttcaggcctgtgctggtgtacccggctgtgggccagcgtctccaggagctgcaccgagctgggggcgacctcatgcaccgagacgagcagagtcgcacgctcctgcaccacgcagtcagcactggcagcaaggatgtggtccgctacctgctggaccacgcccccccagagatccttgatgcggtggaggaaaaagccctgaacttcctgccctttctgatggcccttgggagacagatgggtggatcaggggacgggatggggtacacagccagcccctgctcccccagcggggagacctgtttgcaccaagcagcggccctgggccagcgcaccatctgccactacatcgtggaggccggggcctcgctcatgaagacagaccagcagggcgacactccccggcagcgggctgagaaggctcaggacaccgagctggccgcctacctggagaaccggcagcactaccagatgatccagcgggaggaccaggagacggctgtgtag

SEQ ID NO: 3252 - DNA, 600 bp, Homo sapiens
tcggctgccaaacccaagctggatcaggccctcgtggtggagcacatcgagaagatggtggagtctgtgttccggaactttgacgtcgatggggatggccacatctcacaggaagaattccagatcatccgtgggaacttcccttacctcagcgcctttggggacctcgaccagaaccaggatggctgcatcagcagggaggagatggtttcctatttcctgcgctccagctctgtgttgggggggcgcatgggcttcgtacacaacttccaggagagcaactccttgcgccccgtcgcctgccgccactgcaaagccctgatcctgggcatctacaagcagggcctcaaatgccgagcctgtggagtgaactgccacaagcagtgcaaggatcgcctgtcagttgagtgtcggcgcagggcccagagtgtgagcctggaggggtctgcaccctcaccctcacccatgcacagccaccatcaccgcgccttcagcttctctctgccccgccctggcaggcgaggctccaggcctccagcagagatccgtgaggaggaggtacagacggtggaggatggggtgtttgacatccacttgtaa

SEQ ID NO: 3253 - DNA, 600 bp, Homo sapiens
tccactttggaagttaccaggctttcctaataggatggttctaggaagaacacacataaaagatgtagcagccaaaaggaaaattgagttaaacagttacttacagagtttgatgaatgcttcaacggatgtagcagagtgtgatcttgtttgtactttcttccaccctttacttcgtgatgagaaagctgaagggatagctaggtctgcagatgcaggttccttcagtcctactccaggccaaataggaggagctgtgaaattatccatctcttaccgaaatggtactcttttcatcatggtgatgcatatcaaagatcttgttactgaagatggagctgacccaaatccatatgtcaaaacatacctacttccagataaccacaaaacatccaaacgtaaaaccaaaatttcacgaaaaacgaggaatccgacattcaatgaaatgcttgtatacagtggatatagcaaagaaaccctaagacagcgagaacttcaactaagtgtactcagtgcagaatctctgcgggagaattttttcttgggtggagtaaccctgcctttgaaagatttcaacttgagcaaagagacggttaaatg

SEQ ID NO: 3254 - DNA, 600 bp, Homo sapiens
  misc_feature (533)..(533): n is a, c, g, or t
ctcaccagaccctgacgaccctctgagttcctacatcaatgccaactacatccggggctatggtggggaggagaaggtgtacatcgccactcagggacccatcgtcagcacggtcgccgacttctggcgcatggtgtggcaggagcacacgcccatcattgtcatgatcaccaacatcgaggagatgaacgagagtgtagagagttgtgggaagggaacaggattgtatggcagcctgatctgggcccctgcagaaatgcaccgagtattggccggagagcaggtggcgtacgacggtgttgagatcactgtgcagaaagtcattcacacggaggattaccggctgcgactcatctccctcaagagtgggactgaggagcgaggcctgaagcattactggttcacatcctggcccgaccagaagaccccagaccgggcccccccactcctgcacctggtgcgggaggtggaggaggcagcccagcaggagggccccactgtgcccccatcatcgtccactgcagcatctgctngccagcagctgcggcaggagggtgtggtggacatcctgaagaccacgtgccagctccgtcaggacag

SEQ ID NO: 3255 - DNA, 600 bp, Homo sapiens; identical to SEQ ID NO: 3254
  misc_feature (533)..(533): n is a, c, g, or t

SEQ ID NO: 3256 - DNA, 1400 bp, Homo sapiens
gtgacacttattcagaactgtcccgcctctgtgcctcagatggtcctggcacctttgaatcctggcgaagcgactccgatgtggtttgtggaacacaaagatgtccagaacaacatatctacaaagaatgtggaccctccaaccctgcaacttgttctaatgtggctccttttcaagacagtgaatgtgtgagcggctgcacctgcccagaaggttatctgttggatgacattggagagaaaggaaaatgtgtattaaaagctgaatgtccctgtgaatccagtggaacagtgtatcagccaggagaagtccgagaaggtccttgtggttctcagtgcacatgccaagatgcaaagtggtcttgcaccgaagcattatgccctggaagatgtaaggtggaaggaagttcccttaccacctttgatggtgttaagtacaactttcctggaaactgccacttcctggccgttcactctgttccagttgacaaatacgtattcaacagtgatggaacagtcacaaatgacaagattagaaatcaaggttattactattcagataaaatacagatattcaatgcatcttcctcataccttcaagtagaaacatactttcatgtgaaactacaaatacaaattgttcctgtgatgcaattgtatgtttctatgccacccaaccaattcacagacactgtgggactctgtggttcctacaacaacaaagcagaggatgatttcatgtcaagtcagaatatattggagaagacatctcaggcatttgctaactcttgggaaatgatgtcctgtcctaaaggaaacccctcttcatgtattagtatagaaaaagaaaaatttgctgaaaggcactgtggaattcttcttgattcaagtgggcctttggcttcctgccacccaattgtgaaccctaaaccctatcatgaggaatgcaaaaaatatacttgcacttgtgaaaacagtcaggactgcctatgtacaattttaggcaactatgtgaaagcgtgtgctgagaaggaaacatacatagtgggatggagaactggcctatgtgaacattcttgcccaagtggcctagtgttcaagtacaatgtaaaagcctgtaatagttcttgccgatccttgtcagaaagagataggagctgtgatgtagaagatgttccagttgatggatgcacctgccctgatgcaatgtaccagaataatgaaggaaactgtgtactgaaatctcagtgtgactgttacataaacgacgaggtcatgcaaccaggcaaactcatccatattgatgacaataaatggtatggaaattatacgtatacttgctatgacactgaaatcaagagactgcgttcttttcagataaatgatctttcgtcagtatga

SEQ ID NO: 3257 - DNA, 95 bp, Homo sapiens
tgatgcagatagggggagggggcaccaggggagatgatgaatgcgaatttctggctttgggaactaactcggtcattgctgttgaaaaagattaa

SEQ ID NO: 3258 - DNA, 600 bp, Homo sapiens
ccagaagtgatcctgggccacccctacgacgtggccattgacatgtggagcctgggctgcatcacggcggagttgtacacgggctaccccctgttccccggggagaatgaggtggagcagctggcctgcatcatggaggatttagtacccaaatcgtcttatattagggaattagggggaagatgggaaccttctcttcgcatgaccccggaccaggccctcaagcatgcttggattcatcagtctcggaacctcaagccacagcccaggccccagaccctgaggaaatccaattcctttttcccctctgagacaaggaaggacaaggttcaaggctgtcatcactcgagcagaaaagcagatgagatcaccaaagagactacagagaaaacaaaagatagccccacgaagcatgttcagcattcaggtgatcagcaggactgtctccagcacggagctgacactgttcagctgcctcaactggtagacgctcccaagaagtcagaggcagctgtcggggcggaggtgtccatgacctccccaggacagagcaaaaacttctccctcaagaacacaaacgttttaccccctattgtatga

SEQ ID NO: 3259 - DNA, 600 bp, Homo sapiens; identical to SEQ ID NO: 3258

SEQ ID NO: 3260 - DNA, 273 bp, Homo sapiens
gatatggatgaagaaattgaggcagaatacaacattttgcagttccttcctaatcatcccaatgttgtaaagttttatgggatgttttacaaagcggatcactgtgtagggggacagctgtggctggtcctggagacagaagttcaccagcagctaagtgctgacacatcattcccagcatccaccccggatgggaaagccagcagtgtcaccgcacgcatgctggacctgctgctgctcagatctaaaacttctgaaaatgacaaaccctaa

SEQ ID NO: 3261 - DNA, 273 bp, Homo sapiens; identical to SEQ ID NO: 3260

SEQ ID NO: 3262 - DNA, 600 bp, Homo sapiens
cactgctccactgcccaacaagaagtaatggcagacaatttgcaggctacttttggagagtccttgctttctgatatgcttgatgattttcctgatactctaccatcaccagagaccaggaagctaaaaattgctctggccttatctgatcttgtcatttatacgaaagctgagaaattcaaaagctttcaacattcaagattatatcagcaatttaatgaaaataattctattggggagacacaagcccgaaaactttcaaaattgcgagtccatgagtttatttttcacaccaggaagttcattaccagaatatatcccaaagcaacaagagcagactcttctaattttaatccccaagaattttggaatataggttgtcaaatggtggctttaaatttccagacccctggtctgcccatggatctgcaaaatgggaaatttttggataatggtggttctggatatattttgaaaccacatttcttaagagagagtaaatcatactttaacccaagtaacataaaagagggtatgccaattacacttacaataagggtactatatgtgggtagtattccagcatccttctatatctga

SEQ ID NO: 3263 - DNA, 600 bp, Homo sapiens; identical to SEQ ID NO: 3262

SEQ ID NO: 3264 - DNA, 600 bp, Homo sapiens
tcacatgaagttacaaacatacagccatctggggtccagactcaaggagaggcagattcaccagaagcctacctggcagtcctggcttcaatttccttttctcctgtgtctgcaaagtggtcaaaagtgctgcttaacttctcagcctctcaactgctcccacttgtctttttcctctctgaggctgtgcaacaaacagttgaagaatcatcacctgtgtacctaggtgagaagtttccagacaagaagcctaaggtgcagttagtcatatcctacgaggatgtgaagctgaccatactagtgaaacacatgaaaaacattcatctcccagatggctctgcgcccagtgcacatgttgaattttatcttttaccatatcccagtgaagttcgtaggaggaaaacaaaatctgttccaaaatgtacggaccccacttacaatgaaattgtagtatatgatgaagtcacagagctccaaggacatgtcttaatgcttattgtgaagagtaaaactgtatttgtgggagcaattaacatccgactctgtagtgtcccactcgataaagaaaaatggtatccattaggaaacagtataatttga

SEQ ID NO: 3265 - DNA, 600 bp, Homo sapiens; identical to SEQ ID NO: 3264

SEQ ID NO: 3266 - DNA, 600 bp, Homo sapiens
tcatgtctctcatttctagataagaaagtgcctccctgccctcggaatttctctgccaagctcttctgtttggcaggccggtgtgctgcaacgcgggcaaagttaagaccatcaatggatgaagttttaaatactcttgaaagtactcaagccagcttgtattttgctgaagatcctcccacatcactaaagtccttcaggtgtccttctcctctattcctggagaatgtaccaagtattccagtggaagatgatgaaagccagaataacaatttactaccttctgatgaaggcctgaggatagacagaatgactcagaaaactccttttgaatgcagccagtctgaggttatgtttctgagcttggacaaaaagccagagagcaagagaaatgaggaagcttgcaacatgcccagttcttcttgtgaagaaagttggttcccaaagtatatagttccatcccaggacttaaggccctataaggtaaatatagatccttcttcagaagctccagggcattcttgcaggagcaggccagtggagagcagctgttcctccaaattttcctgggatgaatatgaacagtacaaaaaagaataa

SEQ ID NO: 3267 - DNA, 600 bp, Homo sapiens
attttaccaaatcccctcagcagagtgtgtttaagaccaaaaaatgtaaccgattcattgagcacctacattaatgctaattatattaggggctacagtggcaaggagaaagccttcattgccacgcagggccccatgatcaacaccgtggatgatttctggcagatggtttggcaggaagacagccctgtgattgttatgatcacaaaactcaaagaaaaaaatgagcaccttgccctcaaaggaacagacaatcttgatcagcagagaaaccaagtccaaactggcctcatgagcagtcagcatgctcaccagcgaatgcaccattccaaagcgagtcccacccaaaccagtggaccagcccctgcatgtccctggtgcactcaacagttgggtgcactacttctaaggatgccccaacctgagctggcagacctgtccgcatataccaccagggacttctgctctgagttggcaagccaagccccatgcttgccagccaagtacactgcccccagagaatccctaacccaagctggcagactggctgctgcatgctcaccagccatgtatgcatctcacagcgggtccccaccttaa

SEQ ID NO: 3268 - DNA, 600 bp, Homo sapiens; identical to SEQ ID NO: 3267

SEQ ID NO: 3269 - DNA, 600 bp, Homo sapiens
gggaacaaaacgttcacaacatcgtcatggtgacccagtgtgttgagaagggccgagtaaagtgtgatcattactggccagcggaccaggattccctctactatggggacctcatcctgcagatgctctcagagtccgtcctgcctgagtggaccatccgggagtttaagatatgcggtgaggaacagcttgatgcacacagactcatccgccactttcactatacggtgtggccagaccatggagtcccagaaaccacccagtctctgatccagtttgtgagaactgtcagggactacatcaacagaagcccgggtgctgggcccactgtggtgcactgcagtgctggtgtgggtaggactggaacctttattgcattggaccgaatcctccagcagttagactccaaagactctgtggacatttatggagcagtgcacgacctaagacttcacagggttcacatggtccagactgagtgtcagtatgtctacctacatcagtgtgtaagagatgtcctcagagcaagaaagctacggagtgaacaagaaaaccccttgtttccaatctatgaaaatgtgaatccagagtatcacagag

SEQ ID NO: 3270 - DNA, 600 bp, Homo sapiens; identical to SEQ ID NO: 3269

SEQ ID NO: 3271 - DNA, 600 bp, Homo sapiens
caccccagccctggctccactctcttcacctgctcctgtggcactgacttctgcaatgccaattacagccatctgcctcctccagggagccctgggactcctggctcccagggtccccaggctgccccagccctgctacagcgaaagaactacagagtgcgaggtgagccagtgccagagccaaggccagactcaggcagggactggagtgtggagctgcaggagctgcctgagctgtgtttctcccaggtaatccgggaaggaggtcatgcagtggtttgggccgggcagctgcaaggaaaactggttgccatcaaggccttcccaccgaggtctgtggctcagttccaagctgagagagcattgtacgaacttccaggcctacagcacgaccacattgtccgatttatcactgccagccgggggggtcctggccgcctgctctctgggcccctgctggtactggaactgcatcccaaggagctcagggccataaaaatgcagatggaggatcggtgtgaaataacgggcccatataaatccctctgccgcccgcctgcaagatggattggccgcattgaaattcctccgcgaggataa

SEQ ID NO: 3272 - DNA, 600 bp, Homo sapiens
ccagctgccatcatggaagctggcacccagaggtacatggcaccagagctcttggacaagactctggacctacaggattggggcatggccctccgacgagctgatatttactctttggctctgctcctgtgggagatactgagccgctgcccagatttgaggcctgacagcagtccaccacccttccaactggcctatgaggcagaactgggcaatacccctacctctgatgagctatgggccttggcagtgcaggagaggaggcgtccctacatcccatccacctggcgctgctttgccacagaccctgatgggctgagggagctcctagaagactgttgggatgcagacccagaagcacggctgacagctgagtgtgtacagcagcgcctggctgccttggcccatcctcaagagagccacccctttccagagagctgtccacgtggctgcccacctctctgcccagaagactgtacttcaattcctgcccctaccatcctcccctgtaggcctcagcggagtgcctgccacttcagcgttcagcaaggcccttgttccaggaatcctcagcctgcctgtaccctttctcctgtgtaa

SEQ ID NO: 3273 - DNA, 600 bp, Homo sapiens
gttggacaagggaatacggagagaacggtctggcaataccactttcggacctggccggaccacggcgtgcccagcgaccctgggggcgtgctggacttcctggaggaggtgcaccataagcaggagagcatcatggatgcagggccggtcgtggtgcactgcagtgctggaattggccggacagggacgttcattgtgattgatattcttattgacatcatcagagagaaaggtgttgactgcgatattgacgttcccaaaaccatccagatggtgcggtctcagaggtcagggatggtccagacagaagcacagtaccgatttatctatatggcggtccagcattatattgaaacactacagcgcaggattgaagaagagcagggtatcatcagaaccaaaaataaagttttaaagaaaagcaagaggaaagggcacgaatatacaaatattaagtattctctagcggaccagacgagtggagatcagagccctctcccgccttgtactccaacgccaccctgtgcagaaatgagagaagacagtgctagagtctatgaaaacgtgggcctgatgcaacagcagaaaagtttcagatga

SEQ ID NO: 3274 - DNA, 600 bp, Homo sapiens
gtcatgctcactcagtgtaatgagaaaaggagggtgaaatgtgaccattactggccattcacggaagaacctatagcctatggagacatcactgtggagatgatttcagaggaagagcaggacgactgggcctgtagacacttccggatcaactatgctgacgagatgcaggatgtgatgcattttaactacactgcatggcctgatcatggtgtgcccacagcaaatgctgcagaaagtatcctgcagtttgtacacatggtccgacagcaagctaccaagagcaaaggtcccatgatcattcactgcagtgctggcgtgggacggacaggaacattcattgccctggacaggctcttgcagcacattcgggatcatgagtttgttgacatcttagggctggtgtcagaaatgaggtcataccggatgtctatggtacagacagagcctgaggatgcacttagtctggagcgacaacccaaggcaacgccggcagacagcaccgcctgcctcagagcagccgtgggagcagtacatttttatccatcagtgtgtgcaactgatgtggatgaagaagaagcagcagttctgcatcagtga

SEQ ID NO: 3275 - DNA, 402 bp, Homo sapiens
atgctatatgccaccattgctctgctctgcatcctcttggatctggactcaggctcactgagcaggctttatctggaacgtcaccttggtcacagcagtaagaaaagaaaagtggttcttacagtgctggtgtttacagtgtgcccacatctccctcacttgtcatcagctaatcctttgcccatgcctgagaaaggcaaggatagggctgcaggaccctctgacaaagaaggcagtatgtccaaaggcactgagggggattacaagctcctcaagaaaatcagccaaggaagcttcaccagggtaaagttgggccggaacattctcacagggacccaggtggctgtgaatgtcatcttgaaaggtcagcagagatcctccagcctccagagtgtacagtga

SEQ ID NO: 3276 - DNA, 402 bp, Homo sapiens; identical to SEQ ID NO: 3275

SEQ ID NO: 3277 - DNA, 293 bp, Homo sapiens
tagcagatttggatccagtggttgttacattctggtaccgagcccctgaactacttcttggagcaaggcattataccaaagctattgaactactaacgtcagaaccaatatttcactgtcgacaagaggacatcaaaactagtaatccttatcaccatgaccagctggacagaatattcaatgtaatgggatttcctgcagactctcaggaaaacccattggcagatattggagagaacacattatgtagcatgtattgtttgagcaacttggatgccagcaaaagtagctga

SEQ ID NO: 3278 - DNA, 293 bp, Homo sapiens; identical to SEQ ID NO: 3277

SEQ ID NO: 3279 - DNA, 600 bp, Homo sapiens
ctgtcccccaagtggtgcttcctggacgccaccactgccagccgcttctacaggatcaaccgagcccaggagcacctcaactatgtgactgagatcgcacaggatgagatttatatcctggaccctgagctgctgggggcatcggcccggcctgacctcccaacccccacttcccctctccccacctcaccctgctcacccacgccccggtcactgcaaggggatgctgcaccccctcaaggtgaagagctgattgaggctgccaagaggaacgacttctgtaagctccaggagctgcaccgagctgggggcgacatcatgcaccgagacaagcagagtcgcacgctcctgcaccacgcagtcagcactggcagcaaggatgtggtccgctacctgctggaccacgctcccccagagatccttgatgcggtggaggaaaacggggagacctgtttgcaccaagcagcggccctgggccagcgcaccatctgccactacatccaggctgagaaggctcaggacaccgagctggcggcctacctggagaaccggcagcactaccagatgatccagcgggaggaccaggagacggctgtgtag

SEQ ID NO: 3280 - DNA, 600 bp, Homo sapiens; identical to SEQ ID NO: 3279

SEQ ID NO: 3281 - DNA, 164 bp, Homo sapiens
acgcattttacgaattcaccttccgaaggttctttgatgacaatggctacccctttcgatgcccaaagccttcaggagcagaagcttcacaggctgagagctcagatttagaaagctctgatctggtggatcagactgaaggctgccagcctgtgtacgtgtag

SEQ ID NO: 3282 - DNA, 600 bp, Homo sapiens
tttgaagctctggctgctcatgacgctctggttgagctcagtggagccatgaacactactgcctgtagtctgatgacgatagcaaataatattcgttttctgggttctggcccttggtcaggtctgggagaactgatcttgcctgaaaatgaaccaggaagtagtatcatgccaggcaaggtgaaccctactcagtgtgaagcaatgaccatggttgtagcccaagtcatggggaatcatgttgctgtaacagttggaggcagcagtggacattttgagttgaatgttttcaagccaatgatgattaaaaatgtgttacactcagccaggctgctggcggatgcttcagtttcctttacagaaaactgcgtggtgggaatccaggccaatacagaaaggatcaacaagctgatgaatgagtctcaaatgttggtgacagctctcaatcctcgtatagcgtatgacaaggcagcaaagattgctaagacagcacacaaaaatggatcaaccttaaaggaaactgttattgaacttggctatctcacaccagaacagtttgatgaacaggtaaaaactaaggacatgctgagtccaaagtga

SEQ ID NO: 3283 - DNA, 600 bp, Homo sapiens; identical to SEQ ID NO: 3282

SEQ ID NO: 3284 - DNA, 453 bp, Homo sapiens
atgaaggaaaaagaaaaagaaataattggaaacgggaatgcgaatcagacaggaggactatgtgtttctaaaggctgctggtcctcaaagagggatcttcagaaccatatggtggcaaaagataccttggaaatgaggacagttaaggagaaagtgtattctaactgttccaataaaattcaaatcgcttttctggctgactattactcagtttttcccattaatgtacaaacagaaaaacatcagtgctacaggctttgtacaaagaaggctctttggtttacaactcgaaaggtatttcaggtgttaaatgaaaagaaacagatatatgctataaaatatgtgaacttagaagaagcagataaccaaactcttgatagttaccggaacgaaatagcttatttgaataaactacaacaacacagtgataagatcatccgactttatgattag

SEQ ID NO: 3285 - DNA, 453 bp, Homo sapiens; identical to SEQ ID NO: 3284

SEQ ID NO: 3286 - DNA, 600 bp, Homo sapiens
tctttgctggaagtgcccataggaaatagagagagggtctttggctgcacctctatgtcaggattaccagattacatgagcccagaggtcatcctgtgcaggggccattcaaccaaagcagacatctacagcctgggggccacgctcatccacatgcagacgggcaccccaccctgggtgaagcgctaccctcgctcagcctatccctcctacctgtacataatccacaagcaagcacctccactggaagacattgcagatgactgcagtccagggatgagagagctgatagaagcttccctggagagaaaccccaatcaccgcccaagagccgcagacctactaaaacatgaggccctgaacccgcccagagaggatcagccacgctgtcagagtctggactctgccctcttggagcgcaagaggctgctgagtaggaaggagctggaacttcctgagaacattgctgattcttcgtgcacaggaagcaccgaggaatctgagatgctcaagaggcaacgctctctctacatcgacctcggcgctctggctggctacttcaatcttgttcggggaccaccaacgcttgaatatggctga

SEQ ID NO: 3287 - DNA, 600 bp, Homo sapiens; identical to SEQ ID NO: 3286

SEQ ID NO: 3288 - DNA, 600 bp, Homo sapiens
tataaaatgtcaaaggtgagactctctcatgtggctaaacaccctcctactgcagacagaactgagcccaacagcattcacctgctgctgggagaagaaacagggcttggaggaggcaagactgttcagcatgaattagaactgatttatgagcttgctgtagcacttggaatagaaaaactcttcagcgcctttgatccctctcacactacaccaggccgcccactgtctggcagcctgcaagtctccattcagaagcggctccgtgctgcccagcgatggcgccctggcggcgcggaagcccgcggccaaatgacacgacttgggggcaaaggaggacaacagttcccaccagagtctcggcgtttctacctcttcgcaccctttcctgccaccctttgtcccctggaagcccggagacatcagcggctgcaattttgctactcgctgctcggcgtggaactgtcagacacatcaccttcactttgggatatggaatttgataagcagttagccacagaatatgaacaaccccttgagaatgagattgaagaactgatccaggggacaaaagaggggaaactgagagttcccaattaa

SEQ ID NO: 3289 - DNA, 600 bp, Homo sapiens
accttcgtgcggaaattccacgacatccggatccggtggtgcagcccggagcatggcgcaatcctcgcaatggaagaacgcaagaaggagaaggtgaaagccgcggctaagcgcatcaaggagcaaaaagaggctgaaaaggacgggcgcaaacgccgcaaggagcggctggcagagctcaggccagacggatactacaaggctcaggctcagaaagctttcaacgcctttatccgtgcgcgcgacgccgatttgccatgcatcagctgcggcgagaccaatccgcctgatctgcatggtggccagtgggattgcggccatttcaagacagtaggtgcttaccctgaactgcgctttgaagaacgcaacgcccataagcagtgcaaatcctgtaatgccggagctggcaagtacaccgccaaagaggcgaccgtggcgcagcaatacgaagctgggttggtcgctcgttacggtcagggatacgtcaactggctcaatggtccccacgaaatgaccaactaccgccgtgaagacttcatccggatccgggatgagtaccgcgacaagctcaaagcactgaaacagcgggaggcagcatga

SEQ ID NO: 3290 - DNA, 600 bp, Homo sapiens
tacatcttaacaccgggtccacttcctaacatgtgctgccatttctggcttacggtttggcagcagaagaccaaagcagttgttgtgctgaaccgcattgtggagaaagaatcggttaaattgagagaatctggctccttgaaccctgaccatgggcctgcagtgatccattgtagcgaaggcactgggtgcacgggcaccttctctctggtagacgcttgtcttgttttgatgggaaaaggagattatattaacattaaacaaaccccagatcaactgagattctcatacatggctataatagaaggagcaaaatgtataaaggtagattctagtatacagaaacggtggaaagaattttctaaggaaaacttagctcctgcttttgatcattcaccgaacaaaataatgactgaaaaatacaatgggaacagaattggtctagaagaagaaaaactgacagatacaatggaagagaacagtgagaatgctctacggaaacatattctagaggacagaaaggccaccacagctcagaaggtgcagcagatgaaacagaggctaaatgagaacgaacaaaaaagaaaaaggccaagatag

SEQ ID NO: 3291 - DNA, 600 bp, Homo sapiens
ttcggtgctcgctccagaagccccaggggcactaagcagagagcccagtgccaaacatttcataattaccgcttcaaagattctgcatcacacgcacgtcagcgatgttccaggggcagagaaaggaagcgtgcactggaggtgtcaccgggcttcattaccgccatcataaagattgagtacttacctgccaggtcgcagtgttcagtgctggagcgcctccatctgctcatgcagtgtcagcctcatccaggatacaatggtgagagtctgagtcaatggatttggccatattggatacctggtcaccagggcagctttcaactcggcaaaatggacactgtcatcatcaatgatctcttcactggcctcaactccatgaacatcatccctgtatctactagtgtggccgaggctatgggcaaggtcatccctgagccagataagaggctcacagagtggcacctgcactcttctaccttcaatgccacgactggcattaccttcaatggccactttgtcaggctcctttcctgggatgaatttggcagcagcaacagggtggtggaccttatggtccacacggcctccaaggagtaa

SEQ ID NO: 3292 - DNA, 600 bp, Homo sapiens
ggaggagcgcctcagactctgctgcagatgatggcagtggccgacatcacctccacctgccccacggggcctgacaatggccaagttattgtgattgaaggcattccaggaaacaggaaacagtggcggcatgaagctccaggaactttaatgagtgttttggcagcagcacatctaacgagtagctcattttctgccgatgaagaatttgcaatgggaacattaaaacaatggctacccaaagaagaagatgaagggaaggtagaaatggtctctggcattgaagtagatgaggaacaactagaaccaagatctgatgatgatgatacaaattttgaagaatctgaagatgagttgagagatgaagtagtagaatacttagaaaaactcgctactttcaaaggggaagaaaaaacagaagaggcctccagtacctctaaggactctagaaagtcaagagaaagagaggggataagtatgcagaaatctgaagaattaagggagggcttggagaatatttctactacatctaatgaccacatttgtattactgatgaagaccaaggaacatcaacaaccagtcaaaatatacaagtgtga

SEQ ID NO: 3293 - DNA, 600 bp, Homo sapiens; identical to SEQ ID NO: 3292

SEQ ID NO: 3294 - DNA, 600 bp, Homo sapiens
cccgagcaagaggaagaacaagatagaaagggtagccatactgatttggaaagcattaatgaaaatttagttgaaagtgcattgagaagagtaaacagagaagaaaaaggtaataagtcagtccatctgaggaaagccagttcaccaaatcttcatagacgacagtgggagaaaaatgtacccaatacagctcttacagctttggaaaatgcatccatactcacctccagtttaacagcagaggacgatagaggtggttctgtaataaagtacagcaaaaatactactcgtaagcagtggctcaaagagacccctgacactttgttgaacatccttaagaatgctgatctcagcttggcttttcaaacatacacaatatatagaccaggttcagaagggttcttgaaaggccccctgtctgaagaaacagaagcatcggacagtgttgatggaggtcacgattctgtcattttggatccagagcgacttgagcctgggctagatgaggaggacacggactttgaggaggaagatgacaaccccgactgggtgtcagagctgaagaagcgagctggatggcaaggcctgtgcgacagataa

SEQ ID NO: 3295 - DNA, 600 bp, Homo sapiens; identical to SEQ ID NO: 3294

SEQ ID NO: 3296 - DNA, 600 bp, Homo sapiens
cctgcctctcccagcctgtcccatgaagccacaccattgtcccagactcgaagccgaggctccactaatctctttagtaaattaacttcaaaactcacaaggaggagttacgtagagagggtggccacaagggggcgccagcctgccatgagcaccgtccagatccagcttggcctccgctctacatttgtgtttgtgttcaaagcacggcgaggccttcagccttcctgcctgggcgttaacagcctttggagtcgcaatgtatctgctgagcaaaaagatgaaaacaaagaagcaaagcctcgatccctacgcttcacctggagcatgaaaaccactagttcaatggatcccggggacatgatgcgggaaatccgcaaagtgttggacgccaataactgcgactatgagcagagggagcgcttcttgctcttctgcgtccacggagatgggcacgcggagaacctcgtgcagtgggaaatggaagtgtgcaagctgccaagactgtctctgaacggggtccggtttaagcggatatcggggacatccatagccttcaaaaatattgcttccaaaattgccaatgagctaaagctgtaa

SEQ ID NO: 3297 - DNA, 600 bp, Homo sapiens; identical to SEQ ID NO: 3296

SEQ ID NO: 3298 - DNA, 442 bp, Homo sapiens
gaactctgaaggcaccctcaacctcctcaactgcgagcctccacgcttgatctacttcaagagcaagttctcgggagcggttctcaacgtgccggacacctccgacaacagcaagaagcagatgctgcgcaccaggagcaaaaggcggttcgtcttcaaggtcccagaggaagagagactgcagcagaggcgagagatgcttagagacccagaattgagatccaaaatgatatccaacccaaccaacttcaaccacgtggcccacatgggcccaggcgacggcatgcaggtgctcatggacctgcctctgcctgattcggactccaccaaacactcaactccatcgaatagctccaaccccagcggcccaccgagccccaactccccccacaggagccagctccccctcgaaggcctggagcagccggcctgtgacacctga

SEQ ID NO: 3299 - DNA, 442 bp, Homo sapiens; identical to SEQ ID NO: 3298

SEQ ID NO: 3300 - DNA, 600 bp, Homo sapiens
atgaggagctctagactaacgccactgatggcggccgtcatccataagatgcccctgggctatgaccacttcatgaagtttatctggggagtatttgggaaacagggttatcaatgccaagtgtgcacatgtgttacccataaacactgccatcatctaaccattacagcctgtatttgccaaaacaatattaaccaagaagattcaaagattgccaaacagagaggcaaaatgccatcgtatgtattttgtgtgcaaacttgtccggaggagcgtaagaagaaacacccagatgcttcagtcaacttctcagagttttctaagaagtgcttagtgagggggaagaccatgtctgctaaagagaaaggacaatttgaagctatggcaagggcagacaaggcccgttacgaaagagaaatgaaaacatatatccctcctaaaggggagacaaaaaaaaggtctccttcagcctttttcttgttctgttctgcgtgtggcccaaaagtcaaaagagaacattctggcctgtccattggtgattcggcgaagaaactgggagggatgtggaataacactgctgcagatgacaagcagccttaa

SEQ ID NO: 3301 - DNA, 600 bp, Homo sapiens; identical to SEQ ID NO: 3300

SEQ ID NO: 3302 - DNA, 600 bp, Homo sapiens
aaaagatgtcacgatggcactattgaattcacgagcatcgatgcacacaatggcgtggccccatcaagacgtggtgatttggaaatacttggttattgcatgatccaatggcttactggccatcttccttgggaggataatttgaaagatcctaaatatgttagagattccaaaattagatacagagaaaatattgcaagtttgatggacaaatgttttcctgagaaaaacaaaccaggtgaaattgccaaatacatggaaacagtgaaattactagactacactgaaaaacctctttatgaaaatttacgtgacattcttttgcaaggactaaaagctataggaagtaaggatgatggcaaattggacctcagtgttgtggagaatggaggtttgaaagcaaaaacaataacaaagaagcgaaagaaagaaattgaagaaagcaaggaacctggtgttgaagatacggaatggtcaaacacacagacagaggaggccatacagacccgaagtgaggagtcccaaggagcaatacatcgaagcatgtctcagccagaggctagcagcagcagctatgacagtgagtgggaacaaaattaa

SEQ ID NO: 3303 - DNA, 600 bp, Homo sapiens; identical to SEQ ID NO: 3302

SEQ ID NO: 3304 - DNA, 354 bp, Homo sapiens
atgcatcacctcttcaatcaccccaacatcctttacctcacggcttactgtctgagggatcactgtgtcattgatgaacagactgatgtctggtccctgggctgtgtgatatatgccacaatgtttggggaaggcccttacgaaatggtgttcaagaaacgtgacagtgtggcccttgctgtgcagaaccaactcagcatcccacaaagccccacgcattcttcaggagtgtggcagctcctggcctcaatgatgactgtggacctgcagcagcaccctcacaatgcttgcctcctcagtcagctggaggtactgcagcccccagctcctggccagcacactgcccaaatctga

SEQ ID NO: 3305 - DNA, 600 bp, Homo sapiens
ggcaggttgccagagcacataacgaagtttttaattactcagatactcgtggctttgcggcaccttcattttaaaaatatcgttcactgtgacctcaaaccagaaaatgtgttgctagcctcagctgatccttttcctcaggcaagtataaaagcctctctcagcaaaaagccagttggaagcattgctagcttccatgtgaaactttgtgattttggttttgcccggatcattggagagaagtctttccggaggtcagtggtgggtacccccgcttacctggctcctgaggtcctaaggaacaagggctacaatcgctctctagacatgtggtctgttggggtcatcatctatgtaagcctaagcggcacattcccatttaatgaagatgaagacatacacgaccaaattcagaatgcagctttcatgtatccaccaaatccctggaaggaaatatctcatgaaggtggaaaaccagggcctccaagttcaggggaaggagaatcactttggactttaccagttaggactccactttcagaggagatagaatttaggccagtcagtgaagaatggaaagaaagagacatagcattttag

SEQ ID NO: 3306 - DNA, 600 bp, Homo sapiens; identical to SEQ ID NO: 3305

SEQ ID NO: 3307 - DNA, 600 bp, Homo sapiens
aaagaactcgctgggaaaatcagagaaggcaaattcaggatgttaaaggattaccatcgaccttctgttgaagaaattctcgagaaccctttaatagcagatttggttgcagaagagcaaagaagaaatcttgagagaagagggcgacaattaggagagccagaaaaattgccggattccagccctgtattgagtgagctgaaactaaaggaaattcagttagaggagcaagagcgagctctcaaagcaggagaagaaaggttggagcagaaagaacaggagctttgtgtttgtgagagactagcagaggacagactgactataccagaaaatctgttgaagaattacagcttgctaaaggaacagaagttcctgtctctggcaagtagtccagaacttcttaatcttccatcctcagtaattaagaagaaagttcatttcagtggggaaagtaaagagaatgtcatgaggagtgagaattctgagagtcagctcacatctaagtccaagtgcaaggacctgaagctgcgggctcaagccctgtcagattttgagaaaaattatcaactaaaaagcagacagatcctgggcatgcgctag

SEQ ID NO: 3308 - DNA, 600 bp, Homo sapiens; identical to SEQ ID NO: 3307

SEQ ID NO: 3309 - DNA, 600 bp, Homo sapiens
atacatagagacgtgaagccagaaaatatcctcatcacgaaacattccgtgattaagctttgtgactttggatttgctcggcttttgactggaccgagtgactactatacagactacgtggctaccaggtggtaccgctcccctgagctgctggtgggggacacgcagtacggccccccggtggatgtttgggcaattggctgtgtctttgctgagctgctgtcaggagtgcctctgtggccaggaaaatcggatgtggatcagctgtatctgattaggaagaccttgggggatctcattcctaggcaccagcaagtgtttagcacgaatcagtacttcagtggagtgaaaattccagaccctgaagatatgtccctctgcctgtcagtaaccctgacagagggaggcctgcttgcttctggggctgtgaaacgctcacagatgggctccagcgtatcacaggcaaccagttggcctcatccagacattgttgctgagacagcagagctcgatgatatagcaatggcacgtcaaaccccagtgatgctcagattcaaccgacagaaagaacaagagaaatatttaagctatggagcatga

SEQ ID NO: 3310 - DNA, 600 bp, Homo sapiens
gttttatgccctttggactgtcaggtccaagtgtactgttggccgcagcatccagtctgtgctatcagagcaaggcgctatggtcaggagacccttagccaccaaagagatctgaaactggacaatgtcctgttggaccacgagggtcactgtaaactggcagacttcggaatgtgcaaggaggggatttgcaatggtgtcaccacggccacattctgtggcacgccagactatatcgctccagagatcctccaggaaatgctgtacgggcctgcagtagactggtgggcaatgggcgtgttgctctatgagatgctctgtggtcacgcgccttttgaggcagagaacgaagatgacctctttgaggccatactgaatgatgaggtggtctaccctacctggctccatgaagatgccacagggatcctaaaatctgccctccctgtcatcacctttaccactgccctctccacccgcaacacccccgaggttgtggacttcctctcagatttcatcatccgagcattgtctgcaggaatcctgtttgcctgtacgcacaaaggagggagaaccacagttaattcggggatcctcttttag

SEQ ID NO: 3311 - DNA, 600 bp, Homo sapiens; identical to SEQ ID NO: 3310

SEQ ID NO: 3312 - DNA, 600 bp, Homo sapiens
atatcttcgctgcataaagaaaagtggccaactttgttttttctagagccaggacacagaccttttcagtatgtcacctttgctgcttcttcacacagatcttcaaaaataacgactctctctcctctctgtggtctcgtcagagagcaggaatcctggccagctggtcaggtcactcagaaaaatggcacagctgtttctgaaagtagccccattcataagatgtctgctgcccacaactgcagtgttggggaaaggcacactgttataaagagcttcttttctttaaagaggaaagaaaaatacatgttcatgaccaagaaccccaccatgcgcttgggcagcctgactcagggaggcgagcacgccatcttgagacatcctttttttaaggaaatcgactgggcccagctgaaccatcgccaaatagaaccgcctttcagacccagaatcaaatcccgagaagatgtcagtaattttgaccctgacttcataaaggaagagccagttttaactccaattgatgagggacatcttccaatgattaaccaggatgagtttagaaacttttcctatgtgtctccagaattgcaaccatag

SEQ ID NO: 3313 - DNA, 600 bp, Homo sapiens; identical to SEQ ID NO: 3312

SEQ ID NO: 3314 - DNA, 600 bp, Homo sapiens
acctggagtgtgagagaggagcaggtgaagcagtgggcggcagagatgctggtagcgctggaggcgctgcacgagcagggggtgctgtgccgggacctccaccccgggaacctgctcctggaccaggcaggtcacatccggctcacatattttggccagtggtcagaggtggagccccagtgctgcggggaggccgtggacaatctctacagcgccccaggcaagaaggggggaggccaggaggtgggtgggatttccgagctgacggaagcctgtgactggtggagctttgggtctctactgtatgaactgctgacgggaatggcactgtcccagagccacccttcaggaatccaggcccacacccagctccagctgcccgagtggctcagtcgcccagcggcctctctgctgactgagctgctgcagttcgagcctacccggcgcctgggcatgggagaaggtggtgtcagcaaactcaagtcccatccctttttcagtaccatccaatggagcaagctggtggggacatctctggagactcatctcaggacactgatccactggctcagtggacccaaaccagactgtcctggctag

SEQ ID NO: 3315 - DNA, 600 bp, Homo sapiens; identical to SEQ ID NO: 3314

SEQ ID NO: 3316 - DNA, 600 bp, Homo sapiens
gggatggcacgagatatctaccgggccagttattaccgcaggggggaccgggccttgctcccagtcaagtggatgcccccagaggccttcctggagggcatcttcacatccaagacagattcctggtcttttggggtgctgctctgggagatcttctcactgggctacatgccctatcctgggcgcaccaaccaggaggtgctggacttcgtcgttggaggaggccggatggaccctcctaggggctgcccagggcctgtgtaccgcatcatgacccagtgttggcagcacgagcctgagctccgccctagctttgccagcatcttggagcgtctgcagtactgcactcaggacccggatgtgctgaattcactcctgccaatggagctggggcccaccccagaggaggaagggacttctgggctggggaacagatctttggagtgcctaagacccccacagccccaggaactgagtccagagaagttgaaaagctggggaggtagccctcttggcccctggctgtcctctggcctcaagcccctcaaatccaggggcctccaacctcagaacctttggaatcccacttatcgctcctga

SEQ ID NO: 3317 - DNA, 600 bp, Homo sapiens
cctccaccgacccccgccccccgtactccctctgaacaacaaagggcttctcgccaagcttacttcctctccctgcagcaaatctccaaaatgatggagctggccagagagaaacaggcggcagagctgaaggccctgaaggagacgtcggagaacgacaccaaagagatgaagaaaaagctggagacaaagagactggagcggatccagggcatgaccaaagtcaccacagacaagatggcccaggagaggttgaagagagagattaacaactcccacatccaggaagtagtgcaggtgatcaagcagatgacggagaacttggagaggcaccaggagaagctggaggagaagcaggcggcttgcctggaacagatacgggagatggaaaagcagttccagaaggaggcgctggcagagtacgaggccaggatgaagggtctggaggcagaggtgaaggagtcggtgagggcctgcctcaggacctgctttccctccgaggccaaggacaagcctgagagggcctgcgagtgccccccagagctgtgtgagcaggacccactcatagcaaaggcagatgcccaggagagccgcctctga

SEQ ID NO: 3318 - DNA, 600 bp, Homo sapiens; identical to SEQ ID NO: 3317

SEQ ID NO: 3319 - DNA, 600 bp, Homo sapiens
tatgtggcccttgtctcggataaagaaggaagccatgtcaaggttaagtctttcgagaaggaaaggcagacagagaagcgtgtgctggagactgaacttgtggaccatgtactgcagaaactgaggactaaagtcactgatgaaaggaatggcagagaagcttccgataatcttgcagtgcaaaatctgaaggggtcattttctaatgcttcaggtttgtttgaaatccatggagcaacagtggttcccattgtgagtgtgctagccccggagaagctgtcagccagcactaggaggcgctatgaaactcaggtacaaactcgacttcagacctcccttgccaacttacatcagaaaagcagtgaaattgaaattctggcttgggatgctgatgaacaggcatttaacacaactgtgaagcagctgctgtcacgcctgccaaagcaaagatacctcaaattagtctgtgatgaaatttataacatcaaagtagaaaaaaagtggttaaacaaactctcatttgactgtgagaactcatcgaaactggggaaccatgatgataaaattatacagccaggtgggaagcagctcatgagataa

SEQ ID NO: 3320 - DNA, 600 bp, Homo sapiens; identical to SEQ ID NO: 3319

SEQ ID NO: 3321 - DNA, 978 bp, Homo sapiens
gtgttgagaaagattgggggtgggggctttggagaaatttacgatgccttggacatgctcaccagggaaaatgttgcactgaaggtggaatcagctcaacaaccaaaacaagttctgaaaatggaagttgctgttttgaaaaagctgcaagatacctctgagttgtctctactcaagtctttggatgttaaatatgttttaatcacatggtgtagaggctacaaacaggtacagccagagctacatcttcctgggttgcacagatcccaggatacctgttttactatcagccaagcccatgaagggtatgtcagcatcagcttggtgtggatagtgccacttcacctttctcctacttggctccaaggagatgcttccagcttcattttgttgggggtgctttgtaatctggaccgttctgataacatttttatggagctgctcttgctgtcatgttggcctaatgacttcttactgaatgatcccaatgaaaaggctgaatgtaaggaaaagggtcggaatctggcagatcttcgccgtagccagtcccgaggcacattcaccattagtaccactctccggctgggtagacagattttggagtctattgaaagcattcattctgtgggattcttgcatcgagacatcaaaccgtcgaacttcgctatgggtcgctttcctagtacatgtaggaaatgttacatgcttgattttggcttggctcgacaatttaccaattcctgtggtgacgtcagaccacctcgagctgtggcaggttttcgagggacagttcgttatgcatcaatcaacgcacatcggaacagggaaatgggaagacatgatgacctttggtccttattctacatgttggtggagtttgtggttggtcagctgccctggagaaaaataaaggacaaggtaattttgggaatggagatgtcaattgtggtagaagaaataaaaatttctgctgaataa

SEQ ID NO: 3322 - DNA, 600 bp, Homo sapiens
atttgtgtcctaaatgaacttcatgaagctctaaaaaagtaccactactcccggagaagatcatatgagaaaggatctactcagagatgctgcaggaagtggattaccactgagacatccatcatcacccagctgtttgaagagcagctcaattatagcatcgtatgtttaaagtgtgagaaatgcacctacaagaacgaagtcttcactgtcttctcactccccattccatccaaatatgaatgctcccttcgggactgtctccaatgtttttttcaacaagacgcactgacctggaacaacgaaattcactgctccttttgtgaaaccaagcaagaaactgctgtgagggccagtatttccaaagcaccaaaaataattattttccacctaaaaaggtttgacattcagggtacaacaaaaaggaagctgagaacggatattcattacccactcactaacttggacctcactccttatatttgctcaattttccggaaatatcctaaatacaacctctgtgcagtggtgaaccattttggtgatttggatggtggccactacactgctttctgcaagaattcagtcacccaggcctga

SEQ ID NO: 3323 - DNA, 600 bp, Homo sapiens
ttcctggccgagtgctacaacctcagcccgaccaaggacaagatgcttgtggctgtgaaggccctgaaggatcccaccctggctgcccggaaggatttccagagggaggccgagctgctcaccaacctgcagcatgagcacattgtcaagttctatggagtgtgcggcgatggggaccccctcatcatggtctttgaatacatgaagcatggagacctgaataagttcctcagggcccatgggccagatgcaatgatccttgtggatggacagccacgccaggccaagggtgagctggggctctcccaaatgctccacattgccagtcagatcgcctcgggtatggtgtacctggcctcccagcactttgtgcaccgagacctggccaccaggaactgcctggttggagcgaatctgctagtgaagattggggacttcggcatgtccagagatgtctacagcacggattattacaggatctatgtaggtgttgatgaaaacaagggatggctcattgtttttctctgtgaaaggcagatgtttgattatgccaagctgataactactgacttcactggagtctcaggaaactatgtctga

SEQ ID NO: 3324 - DNA, 600 bp, Homo sapiens; identical to SEQ ID NO: 3323

SEQ ID NO: 3325 - DNA, 453 bp, Homo sapiens
atgccagaagggcccgttcagtgtggtgtggcagcggcagaggctagcagcaacggcagcttccacaccctgggttctgagaaacttggatttgaggagctggacaaggtgggaggacacaccatgctccccattcgctggatgcctcctgaaagcatcatgtaccggaagttcactacagagagtgatgtatggagcttcggggtgatcctctgggagatcttcacctatggaaagcagccatggttccaactctcaaacacggaggtcattgagtgcattacccaaggtcgtgttttggagcggccccgagtctgccccaaagaggtgtacgatgtcatgctggggtgctggcagagggaaccacagcagcggttgaacatcaaggagatctacaaaatcctccatgctttggggaaggccaccccaatctacctggacattcttggctag

SEQ ID NO: 3326 - DNA, 453 bp, Homo sapiens; identical to SEQ ID NO: 3325

SEQ ID NO: 3327 - DNA, 600 bp, Homo sapiens
tatgttacagttcaagttggaaagaacaaaagaagaacaaaaaccatttttggaaatttgaatccagtatgggatgagaagttttattttgagtgtcataactccacagatcgaatcaaagtcagagtatgggatgaagatgatgatattaaatccagagtcaagcaacatttcaaaaaggagtcagatgattttctgggacaaacaattgtagaagtgaggaccttgagtggagaaatggatgtctggtacaacttagagaaaaggacagataagtcagctgtatctggggccatacgattgaaaatcaatgtggagataaaaggagaagagaaggttgctccatatcatattcaatatacatgtttacatgagaatctgttccattacttgactgaagtgaaatctaatggtggagtgaaaatcccagaagtcaaaggggatgaagcctggaaggttttctttgatgatgcttcccaagaaatagttgatgaatttgctatgcgttatggaattgaatccatttatcaagctatgacttcttttattgtcacctacaccattttaggcattacattttccacaacttttgacctgtga

SEQ ID NO: 3328 - DNA, 600 bp, Homo sapiens; identical to SEQ ID NO: 3327

SEQ ID NO: 3329 - DNA, 600 bp, Homo sapiens
tttgttgatgtcgtatcttatgctgcgtactgctcgtcctatgttgatgcaggagtcgtgcatcgcgtgatatccgttgatgtgttgtctagtatagaaggacaaaaggttagacagatgcagatacagcttgtattactgggaattatagtgtgcgattcatcatatatcattggattttatggagcattttttgtagaaaacaggatttcaatatgtacagaattcatggatgacgtgaagccctccaatatgctagtaaacacaagaggacaggttaagctgtgtgattttggagttagcactcagctggtgaattctatagccaagacgtatgttggaacaaatgcttatatggcgcctgaaaggatttcaggggagcagtatggaattcattctgatgtctggagcttaggaatctcttttatggaggccctggagagtggggcacacagagctgaggagagcccacctctggtagaaaagaaagatacccaaagcccagaatggtgtgatgagtcttcagtagagatgtttacaaaggactctgagccacaaggggaagggggtggggtttcacacaaaggaattgacatttaa

SEQ ID NO: 3330 - DNA, 600 bp, Homo sapiens; identical to SEQ ID NO: 3329

SEQ ID NO: 3331 - DNA, 600 bp, Homo sapiens
atagaacgtttattgtgtacgttttacaagttcagcactgtgctagcctctgtggggattcccaaagcagaaagaaattctcttcagtgggccacagagctaaatgtacaagccaaatgcttcctgaaagaggtggctggtttctctttgcgccagcttggccttgcccagcatgcacaagcctcagtacaacaactgtgctacaaatggggccacacagagaaaacagagcagcaggctcaggagcagggacaagctcactcagagcagcgtatcggtagctggagcctgtgcacgccaggcaaggccaaactgtctcaaagagcaaccagccacctctgcaagggtgtgcctggagccggtgcagcagacgttaaactcactcgctgccggttggggcacatcagttcttctcccatagaggtcgggccccagtgccatctgcttttcctcaggcctctgctccatcagtctccaggacagcacatgaaaaagccccacccaacacgagaaccacacacagagcacaaaacacccaacggccccccaaactgggaaacagccccacacgggacaacaaacatcacccatacagattag

SEQ ID NO: 3332 - DNA, 600 bp, Homo sapiens
ggtgtctgcacccagaagcagcccatctacatcgtcatggagcttgtgcaggggggcgacttcctgaccttcctccgcacggagggggcccgcctgcgggtgaagactctgctgcagatggtgggggatgcagctgctggcatggagtacctggagagcaagtgctgcatccaccgggacctggctgctcggaactgcctggtgacagagaagaatgtcctgaagatcagtgactttgggatgtcccgagaggaagctgatggggtctatgcagcctcagggggcctcagacaagtccccgtgaagtggaccgcacctgaggcccttaactacggccgctactcctccgaaagcgacgtgtggagctttggcatcttgctctgggagaccttcagcctgggggcctccccctatcccaacctcagcaatcagcagacacgggagtttgtggagaaggggggccgtctgccctgcccagagctgtgtcctgatgccgtgttcaggctcatggagcagtgctgggcctatgagcctgggcagcggcccagcttcagcaccatctaccaggagctgcagagcatccgaaagcggcatcggtga

SEQ ID NO: 3333 - DNA, 600 bp, Homo sapiens; identical to SEQ ID NO: 3332

SEQ ID NO: 3334 - DNA, 600 bp, Homo sapiens
gtgatcgtggaggagaagggcgggctctacatcgtcactgagtacatggccaaggggagccttgtggactacctgcggtctaggggtcggtcagtgctgggcggagactgtctcctcaagttctcgctagatgtctgcgaggccatggaatacctggagggcaacaatttcgtgcatcgagacctggctgcccgcaatgtgctggtgtctgaggacaacgtggccaaggacacgggcaagctgccagtcaagtggacagcccctgaggccctgagagagaaggtggggctggcctcccctggggcctacagaggtgggcaggagtcctggaaattctccactaagtctgacgtgtggagtttcggaatccttctctgggaaatctactcctttgggcgagtgccttatccaagaattcccctgaaggacgtcgtccctcgggtggagaagggctacaagatggatgcccccgacggctgcccgcccgcagtctatgaagtcatgaagaactgctggcacctggacgccgccatgcggccctccttcctacagctccgagagcagcttgagcacatcaaaacccacgagctgcacctgtga

SEQ ID NO: 3335 - DNA, 600 bp, Homo sapiens; identical to SEQ ID NO: 3334

SEQ ID NO: 3336 - DNA, 600 bp, Homo sapiens
attgcctgcagcatggagtacctgagctctcggaacttcatccaccgagacctggccgctcggaactgcatgctggcaggggacatgacctggctggccctggagagcctggctgacaacctgtatactgtgcacagtgatgtgtgggccttcggggtgaccatgtgggagatcatgacacgtgggcagacaccatacgctggcatcgaaaacactgagatttacaactacctcattggcgggaatcacctgaaacagcttccagagtgtatggaggacgttcttacactcccactccatccaagccaaggtctccttaggccttcagacgaccttttgtatgatctcatgtaccagtgctggagtgctgaccccaagcagcgcccaagctttacttgtctgcgaatggaactggagaacattctgggccagctgtctgtgctatccgccagccaggaccccttatacatcaacatcgagagagccaaggagcccactgtgggaggcagcctggagctgcctagcggggatcagccctacagtggatctggggatggcagtggcatggggacagtgggtggcactcccagtgaatgttga

SEQ ID NO: 3337 - DNA, 600 bp, Homo sapiens
tgcaatgaggtcaccctgaagatttacatgggcaacacatctgtggatcaggatatccccaagcttcagaaactaggcagtattcatgccctgaataccactgagggcaggtctttcatgcacataaacaatgccaacttctccaaggactctggcatcacctacctgggcatcaaggccaatgaagtgcaggagttcaacctcagcacctactttgaaagggctacagacttcactgaccaggccttggctcaaaatggccagaagttggacatcaagtccatcctgagtatcatgaggcagaactgtgagatcagccccaatgatgggttcctggctcagctttgccatctcaatgacaaactagccaaggaggggaaggtgaaaccctggggtgcccctaccacctttgctcgagaggttcagtgggagaggccctggttgaagcccctgctgagcagtgaacctgagcatcatggctgtgagacactggtcctctcctctggtccccagcatcctcagccagcaccagacagtgccccgctccctgcttttctgtcacctgatgaatcgtctgagtcagctaagagcgagtgctaa

SEQ ID NO: 3338 - DNA, 600 bp, Homo sapiens; identical to SEQ ID NO: 3337

SEQ ID NO: 3339 - DNA, 600 bp, Homo sapiens
gaaggcagagcccctgaacagcggaagacagagcccacccagctgaagaccaagcacctgagagagtacactctcaaatgccactcaagcatgcctcccaacaactcctatgtcaacttcgagcgttttgcctgtgtggtggaagacgtggctcgggtcgacctgggatgccgtgccctggtggaggcccacgataccatccaggacgatgtggaggccctggtctccatcttcaatgagaaggaagcttggtaccgagaggagaatgagagcgcccggcatgacctgtcccagctcaggtatgagttccgcaaggtggagtcattgaagaagctgctgcgagaagacatccaggccacgggatgtagcctcggaagcatggccaggaaactggaccatctgcaagcccagtttgagattctgaggcaggagctctccgcagacctgcagtggattcaggagctggtgggcagcttccagctggagagtgggagctctgagggcctgggctccacattctaccaggacaccagtgaatccctgtcagagctgctcagcagatcatgcactgaggaatttctggcaggctggaagctctaa

SEQ ID NO: 3340 - DNA, 600 bp, Homo sapiens
gatgatttggaagccctaggccatatgttcatgtatttccttcgaggcagcctcccctggcaaggactcaaggctgacacattaaaagagagatatcaaaaaattggtgacaccaaaaggaatactcccattgaagctctctgtgagaactttccagaggagatggcaacctaccttcgatatgtcaggcgactggacttctttgaaaaacctgattatgagtatttacggaccctcttcacagacctctttgaaaagaaaggctacacctttgactatgcctatgattgggttgggagacctattcctactccagtagggtcagttcacgtagattctggtgcatctgcaataactcgagaaagccacacacatagggatcggccatcacaacagcagcctcttcgaaatcagaactgcgtattacaatccggcagaaaggggatgaaaaccttaatagttctgcctgcttgcttctacctggcaaaacgtcctttgcattatctgatcaaattcaatcaggaaagccttaggactgttacagctgagcattatgatgttaacaactcagccatctggcacaggggaagaggcacctaa

SEQ ID NO: 3341 - DNA, 437 bp, Homo sapiens
gacggctagcagcagaattcattgtcggaaggaaatataaactgctttggaagatctggtgtagctccttcggagacatctgtctggcgatcagcatcaccaacggtgaagaagtggtagtgaagccagaatctcagggccaggcatccccagttgctgtacaagagcaggctttacaagatgcttcaagtaagttattccgtattgattttggtttggccaaaacgtacggagacaacaggacaaggcaacacataccatacagagaagataaaaacctcactggcactgccctgtatgctagccatgcacatcttagtattgagcagagtcgccgggatgacatggaatcgttagaatattgggaggggcagcaggcccaaaccccaacaggtaagcaacctgacaaaaccaagggtaacatgaaaggtttctaa

SEQ ID NO: 3342 - DNA, 423 bp, Homo sapiens
atgtctccaagaacatccgagtttcttctctacgaaaagaaaaacaaaaaaaaagatcgggcccgggacacccagacagatgagattgtcgcactgaagaaggtgcggatggacaaggagaaggatggtgagcaggaaattggggtgttgggacctccgcactgggaggaggcagaaggatgcatccccatcagcagcttgcgggagatcacgctgctgctccgcctgcgtcatccgaacatcgtggagctgaagcagaaactaactaaacaggaacagagacacacaaatcaatgggacctgaaggtttccaacttgctcatgaccgacaagggttgtgtgaagacagcggatttcggcctggcccgggcctatggtgtcccagtaaagccaatgacccccaaggtggtcactctctggtaa

SEQ ID NO: 3343 - DNA, 423 bp, Homo sapiens; identical to SEQ ID NO: 3342

SEQ ID NO: 3344 - DNA, 600 bp, Homo sapiens
actctggacccggaactgatggtgcggaggagaccctcagtgcggtgctgaaagtaccccgcgctgagatctctacccgcgacggtgtcctacctccttcgccctacctcccgttgatccaccgcacaccccggggccgcccatataattcacttgggcagcgaggatatcatgatgatgatgatgatgaggaccacgatgtcggtgcagaacgaagtcgagttgcggcggacgctcgcgcctctacacctccctccctgcacagtgtgccccccccttcaactattctcgccgcaaaaacgttcgcccacaacggacgtgtgccgtcgcctatgacactcgtgctcacatgtcagacagcgttgcagaggactgaccctgctacacgacacacatgtctcgtccgtcctgtcatactctgcacgaactcgaccgataccacccgactcctcgtacctcgagacgacacgctgcatcacgtcgcaccggacacggactgccatgggcacgactgttgttacactcgagctgacgaggccggctgcagccccaatacagagcgctactcctggcagtgcgtcaatcagagcgtcctgtgcg

SEQ ID NO: 3345 - DNA, 600 bp, Homo sapiens; identical to SEQ ID NO: 3344

SEQ ID NO: 3346 - DNA, 600 bp, Homo sapiens
ggtgggactcctgattatgtaactcccagggtgctgggaaagaaagggcaccgtttcaaggtggatgtgtggtcccttgggtacatcacatataccttgttagtgggcaaaccaccttctgaaacctcttgtctaagagacctacctctggtcaagaacacacacactgttcccaagcacagctacccaatggccacctccctcatccagaagatacttcaaatccgacagcactcccaaacccctgagaagctgctgaataacggcttctgggtcagtgagcagtatttccacaaccacctgagcaaacacttactgaagaagggtgtcaacgtcacgccacgggaaggccatgagcctgcccaccccctcccccgggagcacctgtctccatgcctgcagcaccatcatcccgccctcaacagtggcgctgtgcggggctggccagagcacatcgccctcgcaggggggcttgctgtggaagtggaagttctatttgtgcacgttccagactatggacagctcggcaccacatttgcaccaatcagcatgtttgcccatgtcctgccaaggagagaagtttacatcatcactgacaag

SEQ ID NO: 3347 - DNA, 600 bp, Homo sapiens; identical to SEQ ID NO: 3346

SEQ ID NO: 3348 - DNA, 390 bp, Homo sapiens
atggctcctaagtcagggtgttatgtcctgaaaataggtgacaacggcaaaccatccaccctggtgttgactgactttaacaaggttcagttcacagagattgagggcagaaaaaggaaacggcctcaaaaggctgaggaggccggctgcagccccaagacagagcgctactcctggcagtgcgtcaatcagagcgtcctgtgcactgaggaggccggctgcagccccaagacagagcgctactcctggcagtgcgtcaatcagagcgtcctgtgcggtgagtccccagcaccaccatgccacccaccccgagtatcccctgggcatcctggcatagcagatgacttccgtgcccctgttgcaataaccactgcttccaagtctctatag

SEQ ID NO: 3349 - DNA, 390 bp, Homo sapiens; identical to SEQ ID NO: 3348

SEQ ID NO: 3350 - DNA, 600 bp, Homo sapiens
agggacctgaaggtttccaacttgctcatgaccgacaagggttgtgtgaagacagcggatttcggcctggcccgggcctatggtgtcccagtaaagccaatgacccccaaggtggtcactctctggtaccgagcccctgaactgctgttgggaaccaccacgcagaccaccagcatcgacatgtgggctgtgggctgcatactggccgagctgctggcgcacaggcctcttctccccggcacttccgagatccaccagatcgacttgatcgtgcagctgctgggcacgcccagtgagaacatctggccgggcttttccaagctgccactggtcggccagtacagcctccggaagcagccctacaacaacctgaagcacaagttcccatggctgtcggaggccgggctgcgcctgctgcacttcctgttcatgtacgaccctaagaaaagggcgacggccggggactgcctggagagctcctatttcaaggagaagcccctaccctgtgagccggagctcatgccgacctttccccaccaccgcaacaagcgggccgccccagccacctccgagggccagagcaagcgctgtaaaccctga

SEQ ID NO: 3351 - DNA, 442 bp, Homo sapiens
ccgttacatctgccagtttgcctcccttgcgtttgtcattcactctgccaggctctccttctgcctccgcatgcccaacgatccggagaaaaacacggaccatgacatcaaaaggccttggccaaggaatcgtgattattgtgatacaagattctgcacctcaaaggggatccctgtagtgagttttggaaaacgtacaaagcctgacttacaatatgcctgttatctgtggcgtttcatctggggaacttacttttccttgatagggtgctgccatggccacgactgttgttacactcgagctgaggaggccggctgcagccccaagacagagcgctactcctggcagtgcgtcaatcagagcgtcctgtgcggtgagtccccagcagcaccatgccacccaccccgagtatcccctgggcatcctggcatagccagatga

SEQ ID NO: 3352 - DNA, 442 bp, Homo sapiens; identical to SEQ ID NO: 3351

SEQ ID NO: 3353 - DNA, 600 bp, Homo sapiens
gtggagtggctacacgaggagctgagctgggagcaaaagctggaggagatgcccaagaaaaagagcatgacctggaaccctgatgagaagatggtcaactacctggtcatctggtgtgctgatctagaggtgcaggagaaatgcgccctcatggagcaggaggaggagctcaagaagcagcttggccctgatggcctggaacccgtggaggtgacgagttcccccctgaggaactccaaaagggcttcaatgcgaaggacgcgcaaatgcagcaagatggaccccaccaaggccaagttccccatgcagcagtgtatcgacgccggcctccgggtccccaactctgagactcccatcgcctatacgaaatatggttccttttgtggcttgggaggccatggccagccctgcgatgccattgactggtgctgccatggccacgactgttgttacactcgagctgaggaggccggctgcagccccaagacagagcgctactcctggcagtgcgtcaatcagagcgtcctgtgcgatgagtccccagcagcaccatgccacccaccccgagtatcccctgggcatcctggcatagccagatga

SEQ ID NO: 3354 - DNA, 600 bp, Homo sapiens; identical to SEQ ID NO: 3353

SEQ ID NO: 3355 - DNA, 600 bp, Homo sapiens
tgcatccccatcttctgggtcagcaagtgggtggactattcggacaagtacggccttgggtatcagctctgtgataacagcgtgggggtgctcttcaatgactcaacacgcctcatcctctacaatgatggtgacagcctgcagtacatagagcgtgacggcactgagtcctacctcaccgtgagttcccatcccaactccttgatgaagaagatcaccctccttaaatatttccgcaattacatgagcgagcacttgctgaaggcaggtgccaacatcacgccgcgcgaaggtgatgagctcgcccggctgccctacctacggacctggttccgcacccgcagcgccatcatcctgcacctcagcaacggcagcgtgcagatcaacttcttccaggatcacaccaagctcatcttgtgcccactgatggcagccgtgacctacatcgacgagaagcgggacttccgcacataccgcctgagtctcctggaggagtacggctgctgcaaggagctggccagccggctccgctacgcccgcactatggtggacaagctgctgagctcacgctcggccagcaaccgtctcaaggcctcctaa

SEQ ID NO: 3356 - DNA, 600 bp, Homo sapiens
tttgttaaatgaagatatgcacatccagatcacagattttggaacagcaaaagtcttatccccagagagcaaacaaggtagtatccgggcgcgcacatccctgtacctcggcctttctggcatgcagccaggtgtggaggcagcactcaccaaacaggaaggagaggaaggccacaggtgtgggcagggctgggtggacagggtggacgctgtgggcttcagcgtcggtagtcccgtggcatgcgggggcatcagcagccagtgcggggctctgggcctgagtttccagcagctggaggggcaggacaaaaacctagactttttaataatggcatttgaaaaagtacaagtcacaaaagcaacactcgatgatagtaaagaacagaaacgccgaatatccagggccaactcattcgtgggaacagcgcagtacgtttctccagagctgctcacggagaagtccgcctgtaagagaaacgagtatcttatatttcagaagatcattaagttggaatatgactttccagaaaaattcttccctaaggcaagagacctcgtggagaaacttttggtaaatatcgtgaatttccttttagaaag

SEQ ID NO: 3357 - DNA, 600 bp, Homo sapiens; identical to SEQ ID NO: 3356

SEQ ID NO: 3358 - DNA, 600 bp, Homo sapiens
tgcaacatggagctgccccacggtggggagggctggcagcagctgcgccagggctacctgccccctgagttcactgccggtctgtcttccgagctgcgttctgtccttgtcatgatgctggagccagaccccaagctgcgggccacggccgaggccctgctggcactgcctgtgttgaggcagccgcgggcctggggtgtgctgtggtgcatggcagcggaggccctgagccgagggtgggccctgtggcaggccctgcttgccctgctctgctggctctggcatgggctggctcaccctgccagctggctacagcccctgggcccgccagccaccccgcctggctcaccaccctgcagtttgctcctggacagcagcctctccagcaactgggatgacgacagcctagggccttcactctcccctgaggctgtcctggcccggactgtggggagcacctccaccccccggagcaggtgcacacccagggatgccctggacctaagtgacatcaactcagagcctcctcggggctccttcccctcctttgagcctcggaacctcctcagcctgtttgaggacaccctagacccaacctga

SEQ ID NO: 3359 - DNA, 600 bp, Homo sapiens; identical to SEQ ID NO: 3358

SEQ ID NO: 3360 - DNA, 600 bp, Homo sapiens
gggcagcctgacaaccacgggtttggcaactgcgtggagctgcaggcttcagctgccttcaactggaacgaccagcgctgcaaaacccgaaaccgttacatctgccagtttgcccaggagcacatctcccgccagcagccgcgcctcttcctcccggacccgggacccgccccttgtccggggccacggccgcagcgcccggaggggccgccctgcgcatgcccgcgggagcctcccttgcgtttgtcattcactctaccaggctctccttctgcctccgcatgcccaacgatccggagaaaaacacggaccatgacatcaaaaggccttggcaaaggaatcgtgattattgtgatacaagattctgcacctcaaaggggatccctgtacagaggagggccaggagagagcttcacccacctgctgtcctgcccatgtgacatccgcaggtgctgccatggccacgactgttgttacactggagctgaggaggccggctgcagccccaagacagagcgctactcctggcagtgcgtcaatcagagcgtcctgtgcgaccaccccttgggtatatctaatggcttgagcacagagctgtag

SEQ ID NO: 3361 - DNA, 600 bp, Homo sapiens
aaggactccttccgctgggccacaggggagcaccaggccttcaccagttttgcctttgggcagcctgacaaccacgggtttggcaactgcgtggagctgcaggcttcagctgccttcaactggaacaaccagcgctgcaaaacccgaaaccgttacatctgccagtttgcctcccttgcgtttgtcattcactctgccaggctctccttctgcctccgcatgcccaacgatccggagaaaaacacggaccatgacatcaaaaggccttggccaaggaatcgtgattattgtgatacaagattctgcacctcaaaggggatccctgtaccagatcacctggtggaggtaccgttggttttgggcccctctctcagcacttgctaccagagaggacagctctacaccagagagtgctgccatggccacgactgttgttacactcgagctgaggaggccggctgcagccccaagacagagcgctactcctggcagtgcgtcaatcagagcgtcctgtgcgtatgctacgctggtgacattgaccaaattgaccacacattaatgataagcttagttggtgatgacctcaacggaataacgtga

SEQ ID NO: 3362 - DNA, 600 bp, Homo sapiens
ctcaggggaggacctggacggcagaaggcaaaggaaattttaacaaaaggatcagatgtgcaagaggttcgttgccctgatactgtctgtggagatgtgcatggtcaattacatgatcttatggaactctttagaattggtggaaaatcaccagatacaaactacttattaatggtagatggacagatattctgcctccatggtggcctgtctccatccacatacacactggatcatataagagccctgggtcatttacaagaagttccacatgagggcccaatgtatgatctattacggtcagatccagatgatcgtggtggatggggtatttcaccctgtgtgctggctacacatttggacaagacatttctgaaacctttaaccatgccaatgcttgtaatggagggataccattggtgtcatgatcagaatgtggttactattttcagtgcacccaattactgttattgttgtggtaaccaggctgcgatcatggaactagatgacgctttaagatattccttccttcagtttgacccagcactttgttgtggcgagcctcatgttacacagcacaccccagactacttcctataa

SEQ ID NO: 3363 - DNA, 600 bp, Homo sapiens; identical to SEQ ID NO: 3362

SEQ ID NO: 3364 - DNA, 600 bp, Homo sapiens
cgtctgggggagatgcgcttcactctgggcaccttcctgcgtctggcagccctgcgcacctaccgcggccgactggcctacctccctgtaggaagagtgggttccaagacacctgcctcccccgttgtggtccagcagggcccggtagatgcacaccttgtgccactggaggagccagtgccctctcactggacagtggtgcccgacgaggactttgtgctagtcctggcactgctgcactcgcacctgggcagtgagatgtttgctgcacccatgggccgctgtgcagctggcgtcatgcatctgttctacgtgcgggcgggagtgtctcgtgccatgctgctgcgcctcttcctggccatggagaagggcaggcatatggagtatgaatgcccctacttggtatatgtgcccgtggtcgccttccgcttggagcccaaggatgggaaaggtgtgtttgcagtggatggggaattgatggttagcgaggccgtgcagggccaggtgcacccaaactacttctggatggtcagcggttgcgtggagcccccgcccagctggaagccccagcagatgccaccgccagaagagcccttatga

SEQ ID NO: 3365 - DNA, 600 bp, Homo sapiens; identical to SEQ ID NO: 3364

SEQ ID NO: 3366 - DNA, 600 bp, Homo sapiens
atcggatactggggcggtggctgcagactatgggaagggatgggggacgagacttaccctctagccaggcatgacgatggtctgctggaagtcgttggagtatatgggtctttccactgtgctcagattcaagtaaaactggctaatccttttcgaataggacaggcacatacagtgaggctagaactggatggtgagcgagtagcactgcccagcttggaaggtattatagttctgaacatcggatactggggcggtggctgcagactatgggaagggatgggggacgagacttaccctctagccaggcatgacgatggtctgctggaagtcgttggagtatatgggtctttccactgtgctcagattcaagtaaaactggctaatccttttcgaataggacaggcacatacagtgaggctgattttgaagtgctccatgatgccaatgcaggtggatggggagccttgggcccaagggccctgcactgtcaccataactcacaagacacatgcaatgatgttatatttctctggagaacaaacagatgatgacatctctagtacttcggatcaagaagatataaaggcgactgaatag

SEQ ID NO: 3367 - DNA, 498 bp, Homo sapiens
atgtgtgactttggcatcagtggctactgggtggactctgtggccaagacaatggatgccggctgcaagccctacatggcccctgagaggatcaacccagagctgaaccagaagggctacaatgtcaagtctgacgtctggagcctgggcatcaccatgttgccagctcctcagatttttccagagcagccggaacctgcattgttttataaaatcttcagaattcagattgagatggccatcctgcggttcccttacgagtcctgggggaccccgttccagcagctgaagcaggtggtggaggagccgtcaccccagctcccagctgaccatttctcccccgagtttgtggacttcactgctcagtgcctgaggaagaaccccgcagagcgtatgagctacctggagctcatggagcaccccttcttcaccttgcacaaaaccaagaagacggacattgctgccttcatgaaggagatcctgggagaagactcatag

SEQ ID NO: 3368 - DNA, 600 bp, Homo sapiens
aagttctaccggaaggtgctggataaaaacatgacaattccagaggacatccttggggagattgctgtgtctatcgtgcgggccctggagcatctgcacagcaagctgtcggtgatccacagagatgtgaagccctccaatgtccttatcaacaaggagggccatgtgaagatgtgtgactttggcatcagtggctacttggtggactctgtggccaagacgatggatgccggctgcaagccctacatggcccctgagaggatcaacccagagctgaaccagaagggctacaatgtcaagtccgacgtctggagcctgggcatcaccatggtactgtggggggccagggcctgcccttggtggtcaggatgggtgggagcccccaaccctcgctcctgggtgcagagcgtggttgtatctggggccggggcctctgaccccctgtccccgctgcagattgagatggccatcctgcggttcccttacgagtcctgggggaccccgttccagcagctgaagcaggtggtggaggagccgtccccccagctcccagccgaccgtttctcccccgagtttgtggacttcactgctcagtggtga

SEQ ID NO: 3369 - DNA, 600 bp, Homo sapiens; identical to SEQ ID NO: 3368

SEQ ID NO: 3370 - DNA, 600 bp, Homo sapiens
catgaccccagccctctacagcggtacagtgaggaccccacagtacccctgccctctgagactgatggctacgttgcccccctgacctgcagcccccagcctggtatggagtccagtctaagcagagagactgatgggcaggggaggtgggaccttcagcccagggtccactgtgggggcagagggagtggcagagacaccggggttccttcccctaatgggtcaccttctcttgacctttcagaatatgtgaaccagccagatgttcggccccagcccccttcgccccgagagggccctctgcctgctgcccgacctgctggtgccactctggaaaggcccaagactctctccccagggaagaatggggtcgtcaaagacgtttttgcctttgggggtgccgtggagaaccccgagtacttgacaccccagggaggagctgcccctcagccccaccctcctcctgccttcagcccagccttcgacaacctctattactgggaccaggacccaccagagcggggggctccacccagcaccttcaaagggacacctacggcagagaacccagagtacctgggtctggacgtgccagtgtga

SEQ ID NO: 3371 - DNA, 600 bp, Homo sapiens; identical to SEQ ID NO: 3370

SEQ ID NO: 3372 - DNA, 600 bp, Homo sapiens
ccgtacctcatcctgcagcggctggaggacagagcccggctgcctaggcctcccctctgctccagggccctctactccctcgccttgcgctgctgggccccccacccttccgaccggcctagcttttcccacctggaggggctgctgcaagaggccgggccttcggaagcatgttgtgtgagggatgtcacagaaccaggcgccctgaggatggagactggtgaccccatcacagtcatcgagggcagccccgactccacaatctggaagggccagaatggtcgcaccttcaaagtgggcagcttcccagcctcggcagtgacgctggcagatgcggggggcttgccagccacccacagaaagaaggcaaatctttgggatgcgcccccagcacggggccagaggaggaacatgcccctggagaggatgaaaggcctcttgtccgatcctgagttgcagaggaagattatggagatggagctgagtgtgcatggggtcacccaccaggagtgccagacagcactaggagccactgggggagatgtgcattaccagtgggacctctcagctgccagccgctatgtcctggccaggccctga

SEQ ID NO: 3373 - DNA, 600 bp, Homo sapiens; identical to SEQ ID NO: 3372

SEQ ID NO: 3374 - DNA, 600 bp, Homo sapiens
ctgcagagcacccccgcacgactagggagtgagggcagctgtgctttaggtctggactttgtggactcgcacccagcagggccgtattcacagccttcagtcctcagcaggactcaggcttcgtgtctgtctctggttttcctgggtttgcctggcaccgaagggagctctgaagcacaaccccgtcctagccagcaactaggcagggcctgggccccgccccctcttccaccactgcctccactgcggggaactttgtgtaccaaaatgcactggcttcagtgggcctccaggtcttcgggagttcagcagtcacacgctgactggttgggtctgaccaccccagtgccctcttcccctttatctctgtcccatacccatcgtgtggtacgtcacatcccagagggcaaaagcctcagtcggcaaaaggcgcggtgtggcaaaggagcagagaactttgacaagttcttcacacgaggacagcccgtcttaacaccacctgatcagctggttattgctaacatagaccagtctgattttgaagggttctcgtatgtcaacccccagtttgtgcaccccatcttacagagtgcagtatga

SEQ ID NO: 3375 - DNA, 600 bp, Homo sapiens; identical to SEQ ID NO: 3374

SEQ ID NO: 3376 - DNA, 522 bp, Homo sapiens
atggctgacgttttcccgggcaacgactccacggcgtctcaggacgtggccaaccgcttcgcccgcaaaggggcgctgaggcagaagaacgtgcacgaggtgaaggaccacaaattcatcgcgcgcttcttcaagcagcccaccttctgcagccactgcaccgacttcatctggccagggggagctgcacagggtggcagtcacggagtgaatcctgccaccagccagctgtgtggcacagggggtttgggaaacaaggcttccagtgccaaggagtttcatacagcggtgtctcagacactgaccaaatctgtttatggaatcaaggaagtaacatttgaatttgatcttagggaatggatgtaccttaaacaagtagccctgtatggagaagaggagagagggaacgataatgaagaacagagacgtggaggccggaagatgccagctctaccagaaaaagtagcaaaagtcaatgtgattgaagtagggggagtgcgggagcagggagggtgtgattga

SEQ ID NO: 3377 - DNA, 522 bp, Homo sapiens; identical to SEQ ID NO: 3376

SEQ ID NO: 3378 - DNA, 1400 bp, Homo sapiens
ccgggcctcagcctgcagccatgctctccacccttaaggatgcaccgcgtgttctggctgcaaagaatcatgcaggaagggctctgtccatgaattcccaatggtcatgggtggtcagccagctcagagctgatggtttgggtgggggcaggcaggacacagccatagtctcagctcttactaggggtattcgttttgtgactcacattcccccaggcctgtgcccaccgttggagacaggaaacacctacctccaccttgccctcaggcagcccctcctgctggagaccagctcctcagtcctgtccaagtcccctgagggcagctgggaagcccctgtctttttaggagagcagctgcacagccatggagggaaggctctggaaccttcttccttggggaactgggttttattgccagttatagcttgggagtggtctgaatggaaccctcaggtgttcgcaggtgtgcaggacagaaagctcaggtgtttgcaggtgtgcaggacagaaagctcaggtgttcgcaggtgtgcaggacagaaagctcaggtgttcgcaggtgtgcaggacagaaagcgcaggtgttcgcagaaagccaaacttggccctgctggcaacaaagtcatcagtccctctgaagacaggaaacaaccttccaacaaccttgaccgagtgaaactcacggacttcaatttcctcatggtgttgggaaaggggagttttggaaaggtgatgcttgccgacaggaagggcacagaagaactgtatgcaatcaaaatcctgaagaaggatgtggtgattcaggatgatgacgtggagtgcaccatggtagaaaagcgagtcttggccctgcttgacaaacccccgttcttgacgcagctgcactcctgcttccagacagtggatcggctgtacttcgtcatggaatatgtcaacggtggggacctcatgtaccacattcagcaagtaggaaaatttaaggaaccacaagcagtattctatgcggcagagatttccatcggattgttctttcttcataaaagaggaatcatttatagggatctgaagttagataacgtcatgttggattcagaaggacatatcaaaattgctgactttgggatgtgcaaggaacacatgatggatggagtcacgaccaggaccttctgtgggactccagattatatcgccccagagaaaatttactggtatcaagaaagaaatttgatctacgggaagaaatttgatggtgagcacttcatcctgaagcatacaggtgaagagaatatcgtggaaaccatggagcactttgggtccaagaatgccaaggccagcaagaagctcatcattgctgactgtggacgactcttaataaatttgactcatgttctatcttaa

SEQ ID NO: 3379 - DNA, 1362 bp, Homo sapiens
atgaggagtcagggtgaagttcggaggtacctaaagagacagtcctgccgatttggacttggcagtcgagaaaaagacatggttacaccttctgcctcctctgtgtgtttaatagatgaacaaataccagctgctggggaatcttatgacattataacttacctagaatatgacttccaggtggctgtagacacaagaatgcatctaggaaatgtgatgcccggtggagtcctggcaggtggaggcagcagccgaaatgaagacacagatgagagacaccaaggtgcctgccatctgggactcaccgaagagaaagatcagatgtccaggtttatagatgtaggaaaggatcctgaggctgctctgatcatttccatgatgaatttgatgaatttgatgaatttggtagctatcaggagacctactcttgggccagtgggggcagcttgtgccctggaccccaggagcaagcacaagttcaaaatccacacttacggaagccccaccttctgcgatcactgtgggtcactgctctatggacttatccatcaagggatgaaatgtgacacctgcgatatgaacgttcacaagcaatgcgtcatcaatgtccccagcctctgcggaatggatcacactgagaagagggggcggatttacctaaaggctgaggttgctgatgaaaagctccatgtcacaggtaaggcttgctcatcccggagcagcatcgtgggcaggcatttggatgaaggttacactgatattaaggcagggggcctggttactccctcctcggggctgtttctgggtgggctctgccacaacatggctttttcctgtggttttcccaccaaatccactttcggttcatcggcacactcagtcaagttatcctggagtcttattggcctaggacccatcccgtgtcctcaagatggcttgagttctcggtaccatgacccactccatgttggtgtatggttcagctctcaggcatcagcctatttccttgcacttggggtccctgagggaccaactgtatacattacccttgttgacaagggcattcattttcatttgatcagcaaaggtaccttttgcagtgacaggcaggctgtggaatataataacttgttggaggctgccagcaaggagatgcaccaagctccttatttaaaggaaaaggcattagttggaagtcatttctgttcaataaatcttggttatgggatttggatccagatcaggaacgtagatggtgatgcagcagatgtatctgctcctttggtttgggatggagagggagagggtgctggcaagaagctgcttatcctcaggggcacccagagtgtccactgttggtga

SEQ ID NO: 3380 - DNA, 600 bp, Homo sapiens
ccacaatctgcgggctctacctctggccctgtaccccagcctgcctgcccaccccctggccctgcaccccaccccactggccctcctgggcccatccctgtccccgcgccaccccagattgccacctccaccagcctcctggctgcccagtcacttgtgccaccccctgggctgcctggctccagcaccccaggagttttgccttacttcccacctggcctgccgcccccagacgccgggggagcccctcagtcttccatgtcagagtcacctgatgtcaaccttgtgacccagcagctatctaagtcacaggtggaggaccccctgccccctgtgttctcaggcacaccaaagggcagtggggctggctacggtgttggctttgacctggaggaattcttaaaccagtctttcgacatgggcgtggctgatgggccacaggatggccaggcagattcagcctctctctcagcctccctgcttgctgactggctcgaaggccatggcatgaaccctgccgatattgagtccctgcagcgtgagatccagatggactccccaatgctgctggctgacctgcctgacctccaggacccctga

SEQ ID NO: 3381 - DNA, 600 bp, Homo sapiens; identical to SEQ ID NO: 3380

SEQ ID NO: 3382 - DNA, 600 bp, Homo sapiens
ccttcaacccctcagctcacttcagagagctcagatacagaggacagtgctggaggcgggccagagaccagggaagctctggctgagagcgaccgtgcagctgagggtctgggggctggagttgaggaggaaggagatgatgggaaggaaccccaagttgggggcagcccccaacccctgagccatcccagcccagtgtggatgaactactcctacagcagcctgtgtttgagcagcgaggagtcagaaagcagtggggaagatgaggagttctgggctgagctgcagagtcttcggcagaagcacttgtcagaggtggaaacactacagacactacagaaaaaagaaattgaagatttgtacagccggctggggaagcagcccccaccgggtattgtggccccagctgctatgctgtccagccgccagcgccgcctctccaagggcagcttccccacctcccgccgcaacagcctacagcgctctgagcccccaggccctggcatcatgcgaaggaactctctgagtggcagcagcaccggctcccaggagcagcgggcaagcaagggggtgacattcgccggggatgttggcaggatg

SEQ ID NO: 3383 - DNA, 600 bp, Homo sapiens; identical to SEQ ID NO: 3382

SEQ ID NO: 3384 - DNA, 402 bp, Homo sapiens
atgaaccgtctagcccctgtggagatctcctatgagaacatgtgttttctgataactcacaaccctaccaatgctactctcaacaagttcacagaggaacttaagaagtatggagtgacgacttcgatagtagatgattggttaaacctgttaaacaccaaatttcgtgaagagccaggttgctgtgttgcagtgcattgcgttgtggaattgggaagggcacctgtgctggttgcacttgctttgattgaatgtggaatgaagtacgtagatgcagttcagtttataagacaaaaaagaaggggagtgttaaattccaaacagctgctttacttaagatgcgattacgcttcagagataccaatgggcattgctgtgttcagcagaaagaaatgtaaatga

SEQ ID NO: 3385 - DNA, 402 bp, Homo sapiens; identical to SEQ ID NO: 3384

SEQ ID NO: 3386 - DNA, 543 bp, Homo sapiens
gcgattttggaatcagtggctacttggtggactctgttgctaaaacaattgatgcaggttgcaaaccatacatggcccctgaaagaataaacccagagctcaaccagaagggatacagtgtgaagtctgacatttggagtctgggcatcacgatgattgagttggccatccttcgatttccctatgattcatggggaactccatttcagcagctcaaacaggtggtagaggagccatcgccacaactcccagcagacaagttctctgcagagtttgttgactttacctcacagtgcttaaagaagaattccaaagaacggcctacatacccagagctaatgactcaggcaacatctactgagctaatagccactagcagaacaaaaggcaaggtggggctggcaggtgttggaagcagtcaccaagataatctgaggtttggcatgtcctgttttgatagtaaaaagcttttaagtacattaaaagatttccaaatgtccagaggatgtgggaaagctaataagcatgatggtagagtccttg

SEQ ID NO: 3387 - DNA, 543 bp, Homo sapiens; identical to SEQ ID NO: 3386

SEQ ID NO: 3388 - DNA, 600 bp, Homo sapiens
ctcagtggaggagaactatttatgcagttagaaagagagggaatatttatggaagacactgcctgcttttacttggcagaaatctccatggctttgggacatttacatcaaaaggggatcatatacagagacctgaagccggagaatatcattcttaatcaccaaggtcatatgaaactaacagactttggactacgcaaagaatctattcatgatggaacacccccatttactggggagaatagaaagaaaacaattgacaacatcctcaaatgtaaactcaatttgcctccctacctcacacaagaagccagagatctgcttaaaaaggctcatccattctttagacacattaactgggaagaacttctggctcaaaaggtggagcccccttttaaacctctgttggtggagaaggaggaggatggtgatgatgattattttttggtcatggagcataatgtgacccactttaaaaaacaacaaacaattcaatctgaagaggatgtaagtcagtttgattccaagtttacacgtcagacacctgtcgacagcccagatgacgcaactctcagtgaaactgccaatcaggtctttctg

SEQ ID NO: 3389 - DNA, 600 bp, Homo sapiens
gtgactggtgaggaggacttgggctctggagcctcgggtgattgctacacttttggcagcaatcagcacggacagttgggcaccaatactcgccgaggcagtcgggcaccctgtaaggtccaaggccttgagggcatcaagatggcaatggtagcctgtggggatgccttcactgtagctattggggcagagagcgaagtgtactcttggggcaaaggggcgcgaggtcgattgggaaggagggatgaggatgccggactccctcggccagtgcagttggatgagacacacccttacacggtgacttccgtgtcctgttgccatggaaacaccctcctggctgttcgatcccctaaccccgcctcatgctggcgcagcccccgccggcctccccagcccggctccaggctgcgtagtcttcccagctgggtctcagcgtcagccgcgttcttcatccggggcctccggcgcctcccaggcccctctttatctcagaccttaaccttacaggcccagctctcaccacccatctctggttccagcttgcagtccaaaccccagattttcaccctgcctccagatcgtagccccaattcttag

SEQ ID NO: 3390 - DNA, 600 bp, Homo sapiens
gaggaggttagcatccagcgacagatcaaccatccctttgtacacagcttgggggacagctggcagggaaaacggcaccttttcattagccatctgaaactgacagactttggtctgtcccgccacgtgccccagggagctcaagcctacactatctgtggcactcttcagtacatggccccagaggtcctaagtggaggaccttacaaccatgctgctgattggtggtccctgggtgtcttgcttttctctctggcgactggaaagtttccagtggctgcagagagagatcatgtggccatgttggcaagtgtgacccacagtgactctgagatcccagcttctcttaaccagggcctctcactcctgctccatgagctcttatgccagaaccccctccatcgtctacgttatctgcatcacttccaggtccaccctttctttcggggtgtggccttcgacccagagctcctacagaagcagccagtgaactttgtcacggagacacaagctacccagcccagttcagcggagaccatgccctttgacgactttgactgtgatctggagtccttcttgctctaccctatccctgcttga

SEQ ID NO: 3391 - DNA, 600 bp, Homo sapiens
caaccacttctacgcgtgttttatattaggacgactcagtatccgagagctgacacacccaacaatccaactcctatcaccagctcctcaggttatcctaccttgcggatagagaagaacgacttgagaagtgtcactcttttggaggccaaagccaaggtgaaggatatagcaatatccagggacaggataactctaataaaagatgtactccaagaaggtactcttgggcatattttccatgggattttaatagataaaaaagatccaaataaagaaaaacaagcattggtcgaaacaaagatcaagcttctgaaattcagaaatcttcttcctattactcatgggtgtatacgagaaaagcccatgacgccctacatggacactgaccccttcgagatggccgcatacctgaaagatggttaccgaatagcccagccaatcaactgtcctgatgaaccatttgctgtgatggcctgttgctgggccttagatccgggggagaggcccaagtttcagcagctgctaaaaattctggacagagtacaaaacaacaacgacctaaagatttggaaaagtcaacaaaagcagctgaactga

SEQ ID NO: 3392 - DNA, 600 bp, Homo sapiens
cggatgaactcagccaactacagtccccaggagatgtggaactcgggctgtcagctggtggccttgaacttccagacgccaggctacgagatggacctcaatgccgggcgcttcctagtcaatgggcagtgtggctacgtcctaaaacctgcctgcctgcggcaacctgactcgacctttgaccccgagtacccaggacctcccagaaccactctcagcatccaggtgctgactgcacagcagctgcccaagctgaatgccgagaagccacactccattgtggaccccctggtgcgcattgagatccatggggtgcccgcagactgtgcccggcaggagactgactacgtgctcaacaatggcttcaacccccgctgggggcagaccctgcagttccagctgcgggctccggagctggcactggtccggtttgtggtggaagattatgacgccacctcccccaatgactttgtgggccagtttacactgcctcttagcagcctaaagcaagggtaccgccacatacacctgctttccaaggacggggcctcactgtcaccagccacgctcttcatccaaatccgcatccagcgctcctga

SEQ ID NO: 3393 - DNA, 600 bp, Homo sapiens; identical to SEQ ID NO: 3392

SEQ ID NO: 3394 - DNA, 600 bp, Homo sapiens
gccatccagctcagccagacccccgggcctgacagccccatcttcctgcccactgactccgaatgggactggctgctggccaagacgtgggtgcgcaactctgagttcctggtgcacgaaaacaacacgcactttctgtgcacgcatttgctgtgcgaggccttcgccatggccacgctgcgccagctgccgctctgccaccccatctacaagctcctactcccccacactcgatacacgctgcaggtgaacaccatcgcgagggccacgctgctcaaccccgagggcctcgtggaccaggtcacgtccatcgggaggcaaggcctcatctacctcatgagcacgggcctggcccacttcacctacaccaatttctgccttccggacagcctgcgggcccgcggcgtcctggctatccccaactaccactaccgagacgacggcctgaagatctgggcggccattgagagctttgtctcagaaatcgtgggctactattatcccagtgacgcatctgtgcagcaggattcggagctgcaggcctggactggcgagatttttgctcaggcgttcctgggccgggaaagctcagcttcctga

SEQ ID NO: 3395 - DNA, 600 bp, Homo sapiens; identical to SEQ ID NO: 3394

SEQ ID NO: 3396 - DNA, 600 bp, Homo sapiens
ggaagcggggaaggaatgaagcgtgtcctgacttctgtcagcttggggaaggaagtcagtgagatcctgtcggcctgctgggctttcgacctgcaggagagacccagcttcagcctgctgatggacatgctggagaaacttcccaagctgaaccggcggctctcccaccctggacacttctggaagtcagctgaagttagatcagaagacacagaaagttctgtggccatgaaagataccagcttggaagggttgtgtcttcagtggcaccctcagaaaaattgtcttaaagcaaagaggtacctggctccagacaatttttctgatgaaaacaaagtctctgccccgtccccaccctgccaccctggcaaagttacttcctttacagctgcccagtgtaccatagaccagaccccagtgattaatgtggttcagtacggctgtaccaatacaatgaggtttccaaagggaactggacaagacgacccagggccccctgcattgtacgacaggactcaggtgtctgcgggcatcactgactgccctgccgaggccctctgtgctggaggtgtcactgcagatggaaggattccttcttga

SEQ ID NO: 3397 - DNA, 600 bp, Homo sapiens
ttaatctgtggcgacctgctggatgcactggacaagcacctcattcagcagctgacgctggcaagtccaaggttttctattatgaaatgtaggttctatactagaaaggaaaatgcaatgatagtaggaaatgctaaagatacagctcatacaaaagcagaatggaatattctggaagaagtaaagcatcccttcatcgtggatttaatttatgcttttcagactggtggaaaactctacctcatccttgagtatctcagtgaagaaacaaaaggtactctttgccaagaagagaagactaagaaaaacttgaaagaagtgtggggcttccttcagctggagcctctttccaagttgtatggtgtgtggaattcttactgtgatgtgggagaggccagcctggggtcacttacggatgagtctgaaggcacagtcaatatacaggagtcagctgaagctggggaaatggcacagttgttgcaatcctcgtctctcatttgcttcttggtaaatcccagctcctttcaagctgaaactaagccctctctaggctccttgcccacagactgggccagtctgacaggtgcttcagtggtatga

SEQ ID NO: 3398 - DNA, 600 bp, Homo sapiens; identical to SEQ ID NO: 3397

SEQ ID NO: 3399 - DNA, 600 bp, Homo sapiens
cgaaaggtggagcccccatttaaacctctgttgcaatctgaagaggatgtaagtcagtttgattccaagtttacacgtcagacacctgtcgacagcccagatgactcaactctcagtgaaagtgcccatcaggtctttctgtgtgtgcctcacgaaatggctggaaagaagttaacaggtctaaaaatgaggttgaggacgtgggagactgtacacattggtggttttaggtgtgcatcgctgtgtagtgtgaaagaaaagttttcctttgaaccaaaaatccgatcacctcgaagatttattggcagcccacgaacacctgtcagaggcgcttcggccagcacagcaaatcctcagacacctgtggaatacccaatggaaacaagtggcacagagcagatggatgtgacaacgagtggggaagcattggcaccacttccaatacgacagccgaactctgggccatacaaaaaacaagcttttcccatgatctccaaacggccagagcacctgcgtatgaatctatgccacagcaatgcttttaatgaatttaaggcaaaaaaggtggagaggccgatgtgtgagcatcctacagggtga

SEQ ID NO: 3400 - DNA, 600 bp, Homo sapiens; identical to SEQ ID NO: 3399

SEQ ID NO: 3401 - DNA, 600 bp, Homo sapiens
gtctacaaggtggagacaataggggacgcctatatggtggcctcggggctgccccagcggaatgggcagcgacacgcggcagagatcgccaacatgtcactggacatcctcagtgccgtgggcactttccgcatgcgccatatgcctgaggttcccgtgcgcatccgcataggcctgcactcgggtccatgcgtggcaggcgtggtgggcctcaccatgccgcggtactgcctgtttggggacacggtcaacaccgcctcgcgcatggagtccaccgggctgcgtgagtgtgacggggacaagacggggaggtgggagggggacacgggagcttaccgcatccacgtgaacttgagcactgtggggattctccgtgctctggactcgggctaccaggtggagctgcgaggccgcacggagctgaagggcaagggcgccgaggacactttctggctagtgggcagacgcggcttcaacaagcccatccccaaaccgcctgacctgcaaccggggtccagcaaccacggcatcagcctgcaggagatcccacccgagcggcgacggaagctggagaaggcgcggccgggccagttctcttga

SEQ ID NO: 3402 - DNA, 589 bp, Homo sapiens
gaaggagactctaattttggattccttggtggaggaaaataaaacactctggtcttgccgccaacgatgcaagtgtgactgctggcgtcttcatgagctccagagaggcagtgtggcctccaatcggcacctcctccaggctcgtggcatcacctgcattgttaatgctaccattgagatccctaatttcaactggccccaatttgagtatgttaaagtgcctctggctgacatgccgcatgcccccattggactgtactttgacaccgtggctgacaagatccacagtgtgagcaggaagcacggggccaccttggtgcactgtgctgcaggggtgagccgctcagccacgctgtgtatcgcgtacctgatgaaattccacaacgtgtgcctgctggaggcgtacaactgggtgaaagcccggcgacctgtcatcaggcccaacgtaggcttctggaggcaactgatagactacgagcgccagctctttgggaagtcgacagttaaaatggtacagacaccttatggcatagttcccgacgtctatgagaaggagtcccgacacctgatgccttactgggggatttag

SEQ ID NO: 3403 - DNA, 589 bp, Homo sapiens; identical to SEQ ID NO: 3402

SEQ ID NO: 3404 - DNA, 570 bp, Homo sapiens
ctccagcgattcaagcgctccctctccctcaagaccatcctccgaagtaagagcttggagaacttcttccttcgctcgggctctgagctcaagtgccccaccgaggtgctgctgacgcccccaaccccactgccccctccctccccaccacccacagcctcggacaggggcctggctaccccatccccctccccatgcccagtcccacgccccctggcagcgctcaaaccagtgaggctgcacagcttccaggaacatgtcttcaagcgagctagcccttgtgagctgtgccaccagctcatcgtaggaaactccaaacagggcttgcgatgtaagatgtgcaaagtcagcgtccacctctggtgctctgaggagatctcccaccagcaatgcccaggcaagacgtccacctccttccgccgcaacttcagttcccctctcctggtgcatgagccgccaccagtctgtgccacaagcaaagagtccccacccactggctctcaacacatagtaggtgctcaatcagcagcctttggtgaatacatgagccagcggctggactctccttga

SEQ ID NO: 3405 - DNA, 288 bp, Homo sapiens
atgacagttgtggtttatcattctctattttcagatgatcacagtcgtgttaaactgcaaaatgctgagaatgattatattaatgccagtttagttgacatagaagaggcacaaaggagttacatcttaacacaggcaatgtcttcttttctcttcccataccctgtggcaaaaccagaggccctggacagctcttctgtagctccccctgcctcgcatatatcttcagagagtacaccaagccctggatggtgtctggtcgtcttcaaggacctgagcgggtgctga

SEQ ID NO: 3406 - DNA, 288 bp, Homo sapiens; identical to SEQ ID NO: 3405

SEQ ID NO: 3407 - DNA, 600 bp, Homo sapiens
agtgcaggcattgggcgctctggcaccttctctctggtagacacttgtcttgttttgatggaaaaaggagatgatattaacataaaacaagtgttactgaacatgagaaaataccgaatgggtcttattcagaccccagatcaactgagattctcatacatggctataatagaaggagcaaaatgtataaagggagattctagtatacagaaacgatggaaagaactttctaaggaagacttatctcctgcctttgatcattcaccaaacaaaataatgactgaaaaatacaatgggaacagaataggtctagaagaagaaaaactgacaggtgaccgatgtacaggactttcctctaaaatgcaagatacaatggaggagaacagtgagagtgctctacggaaacgtattcgagaggacagaaaggccaccacagctcagaaggtgcagcagatgaaacagaggctaaatgagaatgaacgaaaaagaaaaaggtggttatattggcaacctattctcactaagatggggtttatgtcagtcattttggttggcgcttttgttggctggacactgttttttcagcaaaatgccctataa

SEQ ID NO: 3408 - DNA, 600 bp, Homo sapiens; identical to SEQ ID NO: 3407

SEQ ID NO: 3409 - DNA, 600 bp, Homo sapiens
ggtgcctccaaagaccgagcacggttcacgcctctgctggccttcacaccgctgcagccacacagtgcagaagcctgctccctgctgcccacaagcatgaggcaggctgggttcttccactgcaggttcattgcagaagaggccgcggcttctggggccaagtgtgtgctcacccacagcccgacgtggatcatcgaccccatcgacggcacctgcaattttgtgcacagattcccgactgtggcggttagcattggatttgctgttcgacaagagcttgaattcggagtgatttaccactgcacagaggagcggctgtacacgggccggcggggtcggggcgccttctgcaatggccagcggctccgggtctccggggagacagcaacaccagatgcaggagaagatcccaaagttacaagagccaagttctttatccgggacctgtttttgaggatcagcacggccaccggtgacggcaaacattactgctacccgcacttcacctgcgccgtggacacagagaacatccgcagggtgttcaacgactgccgcgacatcatccagcggatgcacctcaagcagtatgagctcttgtga

SEQ ID NO: 3410 - DNA, 600 bp, Homo sapiens; identical to SEQ ID NO: 3409

SEQ ID NO: 3411 - DNA, 600 bp, Homo sapiens
aatggctctgttgcgccccaggaaaggagccacaatgtgatagaggtggctacagacgcacctcttcgaaagcctggaggctattttgctgccccggctcagccggatcctgatgatcagtttatcatacccccggagctggaagaggagccccttaccttgtccctcgggctgccccactgggttgaagcagatgtggacaactccaagctctcacaccgacgccttagttcctgcagctcacttccagagtggtcagaactggctgagcgtggtccacggaggcagcaatcgcttccagattctaaaatgggccccacagcaactctgtgccaggggcagccactgggccccacaagctctgatgcagggacacctcatttcctaacttctgtgtctgctgcaggagaaagggaagaaacaaagtgtttaagtttcttatcactgtattttcgtaaacacatgatagcaaactcctataccactgtcaagtatagccgagaagctgtgtttccgctttgtaagacagtagaagtgatgacagctggttcctgtgatgagcctgattttccatgggaaattgacatgcagaaatattaa

SEQ ID NO: 3412 - DNA, 600 bp, Homo sapiens; identical to SEQ ID NO: 3411

SEQ ID NO: 3413 - DNA, 151 bp, Homo sapiens
tcagggctgtccagaatccctccatgaattgatgaatctgtgttggaagaaggaccctgatgaaagaccaacatttgaatatattcagtccttcttggaagactacttcactgctacagagccacagtaccagccaggagaaaatttataa

SEQ ID NO: 3414 - DNA, 151 bp, Homo sapiens; identical to SEQ ID NO: 3413

SEQ ID NO: 3415 - DNA, 600 bp, Homo sapiens
gtggaatttgtctctgctgacctggaagaggacatcatcagcaggatattccgcatttacaatgccgccagaccccaagatggatatcggatggtgcagcaattccagttcctgggctggccgatgtacagggacacaccagtgtctaagcgctccttcttgaagctcattcgccaggtggacaagtggcaagaggagtacaatggcggggaaggccgcacggttgtgcactgcttgaacgggggaggccgcagtgggacgttctgcgccatcagcatcgtatgtgagatgctccggcaccagagaaccgtggatgtctttcacgctgtgaagacactgaggaacaacaagcccaacatggtcgacctcctgggcatcactcagaagaatttttccagcccgaaggatctgtccgttcagggtctagccaaaatcatagagcttgccttagtttcaaaagcaaccaggtcagaggtggaggctattctctttgaacctttggaggccgttgatgtggtgtttgaagtgcccacgctggccgccagcctgagttccttagacacaggcagcctgcgcagacgacaaggctcgggcccctga

SEQ ID NO: 3416 - DNA, 600 bp, Homo sapiens; identical to SEQ ID NO: 3415

SEQ ID NO: 3417 - DNA, 600 bp, Homo sapiens
aggagtcgtctcaactccatccgcaacagcttcctgggctcccctcgctttcaccggcgcaagatgcaggtccctaccgctgaggagatgtccagcttgacgccagagtcctccccggagctggcaaaacgctcctggttcgggaacttcatctccttggacaaagaagaacaaatattcctcgtgctaaaggacaaacctctcagcagcatcaaagcagacatcgtccatgcctttctgtcgatccccagcctgagtcacagtgtgctgtcacagaccagcttcagggccgagtacaaggccagtggcggcccctccgtcttccaaaagcccgtccgcttccaggtggacatcagctcctctgagggtccagagccctccccgcgacgggacggcagcggaggtggtggcatctactccgtcaccttcactctcatctcggacgagaagaacggggcccagacccggcctgctggtgccccaccccgaagcctgcagcccccacccggccgcccagacccagagctgagcagctctccccgccgaggcccccccaaggacaagaagctcctggccaccaacgggacccctctgccctga

SEQ ID NO: 3418 - DNA, 600 bp, Homo sapiens
attggctggtttccttgtaacagggtgaagccctatgtccatggccctcctcaggacctgtctgttcatctctggtacgcaggccccatggagcgggcaggggcagagagcatcctggccaaccgctcggacgggactttcttggtgcggcagagggtgaaggatgcagcagaatttgccatcagcattaaatataacgtcgaggtcaagcacattaaaatcatgacagcagaaggactgtaccggatcacagagaaaaaggctttccgggggcttacggagctggtggagttttaccagcagaactctctaaaggattgcttcaagtctctggacaccaccttgcagttccccttcaaggagcctgaaaagagaaccatcagcaggccagcagtgggaagcacaaagtattttggcacagccaaagcccgctatgacttctgcgcccgagaccgatcagagctgtcgctcaaggagggtgacatcatcaagatccttaacaagaagggacagcaaggctggtggcgaggggagatctatggccgggttggctggttccctgccaactacgtggaggaagattattctgaatactgctga

SEQ ID NO: 3419 - DNA, 323 bp, Homo sapiens
agggaactacattaaaagatttaatttatgatatgacaatatcaggctctggatcaggtctaccattgcttgttcagagaacaattgtgaaaactattgttgttacaggaacactggcaaagccacataaccccaacacacacatattcacaagagttgctggtggaaggcgtcgggttttccactctgccttccccaccgaggcgtctcaccccgctgagataccgcaacaggccgaactagtccctcatcttcatccggatctctggcaccaggggtttcctgagctgaccaagccagagattgcgggcagcaagacaaag

SEQ ID NO: 3420 - DNA, 323 bp, Homo sapiens; identical to SEQ ID NO: 3419

SEQ ID NO: 3421 - DNA, 600 bp, Homo sapiens
tttggcatgtgtaaggagaacgtcttccccgggacgacaacccgcaccttctgcgggaccccggactacatagccccggagatcattgcctaccagccctatgggaagtctgtcgattggtggtcctttggagttctgctgtatgagatgttggcaggacagcctcccttcgatggggaggacgaggaggagctgtttcaggccatcatggaacaaactgtcacctaccccaagtcgctttcccgggaagccgtggccatctgcaaggggttcctgaccaagcacccagggaagcgcctgggctcagggcctgatggggaacctaccatccgtgcacatggctttttccgctggattgactgggagcggctggaacgattggagatcccgcctcctttcagaccccgcccgtgtggccgcagcggcgagaactttgacaagttcttcacgcgggcggcgccagcgctgacccctccagaccgcctagtcctggccagcatcgaccaggccgatttccagggcttcacctacgtgaaccccgacttcgtgcacccggatgcccgcagccccaccagcccagtgcctgtgcccgtcatgtaa

SEQ ID NO: 3422 - DNA, 600 bp, Homo sapiens; identical to SEQ ID NO: 3421

SEQ ID NO: 3423 - DNA, 600 bp, Homo sapiens
gcgcccccgccgctccccgagggcctgcccattcagcccgccctggacgcctgggcgctgggcgtcctgctcttctgcctcctcacgggctacttcccctgggaccggcccctggccgaggccgaccccttctacgaggacttcctcatctggcaggcgtcgggccagccccgggaccgccctcagccctggttcggcctggccgccgcggccgacgcgcttctgcgggggctgctggaccctcacccccgaaggaggagcgctgtgatcgccatcagggagcacctggggcgcccctggaggcagcgggagggcgaggcggaggcagtgggagcggtggaagaggaggctgggcaggcgcctgctgtggccaccgaggtgttgcctggagcggggctgacagcaggtgtgctcctgtggagtgaccccaaggagccttcgaatccaggttcaagccatagagttggggcctctgacctggacaatccgggactgtgggggcgccagccttcatcaccttccacgacctctaagccgagagaggaggaggaggaggaaatggtttcctgcttgaggctgcaggacccagaatcagagtag

SEQ ID NO: 3424 - DNA, 600 bp, Homo sapiens
tacagggacctgaagttggacaatttgctcctggacaccgagggctacgtcaagatcgcagactttggcctctgcaaggaggggatgggctatggggaccggaccagcacattctgtgggaccccggagttcctggcccctgaggtgctgacggacacgtcgtacacgcgagctgtggactggtggggactgggtgtgctgctctacgagatgctggttggcgagtccccattcccaggggatgatgaggaggaggtcttcgacagcatcgtcaacgacgaggttcgctacccccgcttcctgtcggccgaagccatcggcatcatgagaaggctgcttcggaggaacccagagcggaggctgggatctagcgagagagatgcagaagatgtgaagaaacagcccttcttcaggactctgggctgggaagccctgttggcccggcgcctgccaccgccctttgtgcccacgctgtccggccgcaccgacgtcagcaacttcgacgaggagttcaccggggaggcccccacactgagcccgccccgcgacgcgcggcccctcacagccgcggagcaggcagccttcctggacttcgacttc

SEQ ID NO: 3425 - DNA, 600 bp, Homo sapiens; identical to SEQ ID NO: 3424

SEQ ID NO: 3426 - DNA, 600 bp, Homo sapiens
aatgagtatgttcatggaaatgtgacagctgaaaatatctttgtggatccagaggaccagagtcaggtgactttggcaggctatggcttcgccttccgctattgcccaagtggcaaacacgtggcctacgtggaaggcagcaggagccctcacgagggggaccttgagttcattagcatggacctgcacaagggatgcgggccctcccgccgcagcgacctccagagcctgggctactgcatgctgaagtggctctacgggtttctgccatggacaaattgccttcccaacactgaggacatcatgaagcaaaaacagaagtcttaccagtgctggtttaaacattcagcaccaaagccggtggacagcggaacatatgaggaagttctggggtttgttgataagccggggcccttcgtgggaccctgcggtcactggatcaggccctcagagaccctgcagaagtacctgaaggtggtgatggccctcacgtatgaggagaagccgccctacgccatgctgaggaacaacctagaagctttgctgcaggatctgcgtgtgtctccatatgaccccattggcctcccgatggtgccctag

SEQ ID NO: 3427 - DNA, 600 bp, Homo sapiens; identical to SEQ ID NO: 3426

SEQ ID NO: 3428 - DNA, 600 bp, Homo sapiens
cgaggcaaccacgagacagacaacatgaaccagatctacggtttcgagggtgaggtgaaggccaagtacacagcccagatgtacgagctctttagcgaggtgttcgagtggctcccgttggcccagtgcatcaacggcaaagtgctgatcatgcacggaggcctgttcagtgaagacggtgtcaccctggatgacatccggaaaattgagcggaatcgacaacccccagattcagggcccatgtgtgacctgctctggtcagatccacagccacagaacgggcgctcgatcagcaagcggggcgtgagctgtcagtttgggcctgacgtcaccaaggccttcttggaagagaacaacctggactatatcatccgcagccacgaagtcaaggccgagggctacgaggtggctcacggaggccgctgtgtcaccgtcttctctgcccccaactactgcgaccagatggggaacaaagcctcctacatccacctccagggctctgacctacggcctcagttccaccagttcacagcagtgcctcatcccaacgtcaagcccatggcctatgccaacacgctgctgcagctaggaatgatgtga

SEQ ID NO: 3429 - DNA, 600 bp, Homo sapiens; identical to SEQ ID NO: 3428

SEQ ID NO: 3430 - DNA, 600 bp, Homo sapiens
cccgagggagagcccggggccccagacagcagggccggcggagacacggcactcagcggagacggggacccccccaagcccgagaggaagggccccgagatgccacgactattcttggacttgggaccccctcaggggaacagcgagcagatcaaagccccggtgcccgtcgtggtgagcagcgccgacgcggacgcggcccgcccgctgcgggggctgctcaagtctccgcgcggggccgacgagccagaggacagcgagctggagaggaagcgcaagatggtctccttccacggggacgtgaccgtctacctcttcgaccaggagacgccaaccaacgagctgagcgtccaggccccccccgagggggacacggacccgtcaacgcctccagcgcccccgacacctccccaccccgccacccccggagatgggtttcccagcaacgacagcggctttggaggcagtttcgagtgggcggaggatttccccctcctcccccctccaggccccccgctgtgcttctcccgcttctccccaaatgaggcaggaatccccccgcccctccatagagagccgcctttctcggaactgaactga

SEQ ID NO: 3431 - DNA, 600 bp, Homo sapiens
ttcgtgtcagatgtggatatccagagcgagcgcttcagggccttgggcagtgcccgcttcacactgggcacggcagctctacactcacccgtctccgaaggggcccccgtaattcccccatcctctgggctcccacttcccacccctgatgcccgggtaggggcctccacctgcggcccgcccgaccacctgctgcctccgctgggcaccccgctgcccccagactgggtgacgctggagggggactttgtgctcatgttggccatctcgcccagccacctaggcgctgacctggtggcagctccgcatgcgcgcttcgacgacggcctggtgcacctgtgctgggtgcgtagcggcatctcgcgggctgcgctgctgcgccttttcttggccatggagcgtggtagccacttcagcctgggctgtccgcagctgggctacgccgcggcccgtgccttccgcctagagccgctcacaccacgcggcgtgctcacagtggacggggagcaggtggagtatgggccgctacaggcacagatgcaccctggcatcggtacactgctcactgggcctcctggctgcccggggcgggagccctga

SEQ ID NO: 3432 - DNA, 600 bp, Homo sapiens
gcgcagctgttggacacgtgtctgtgcaagggcagcctggacaacatgacctgcatcctggtctgcttccctggggcccctaggccttctgaggaggcgatcaggagggagctagcactggacgcagccctgggctgcagaatcgctgaactgtgtgcctctgctcagaagccccccagcctgaacacagttttcaggactctggcctcagaggacatcccagatttacctcctgggggagggctggactgcaaggccactgtcattgctgaagtttattctcagatctgccaggtctcagaagagtgcggagaggcgaaactgagtcagagcggggcgtgcgtgggccggaggctttacacaccaaagaagccggcgcctcctgcccaccccgggcgaatgcgggccccccactcccgcactcctcgccagtccccacctccaccccaccccacccccgaccctgcggctgtgagtcagcgaccgaccgcgcccccttggcccacttcctcctcaccttcccggggcgggcggggtgggcgccctccaccccctcgcctggaggcgcacgcggcccctttaaggcgcggggcattgtgg

SEQ ID NO: 3433 - DNA, 600 bp, Homo sapiens; identical to SEQ ID NO: 3432

SEQ ID NO: 3434 - DNA, 600 bp, Homo sapiens
ctgtgcggtgcattggagacgtccgttgtcctgcttcagtggtaccagcccatgaacaaattcctgcttgtccggcaggtgctgttcccactgccgacgcctctgtccgtgttcgcgctgctgaccgggccaggctctgagctgcccgctgtgtgcatcggcgtgagccccgggcggccggggaagtcggtgctcttccacacggtgcgctttggcgcgctctcttgctggctgggcgagatgagcaccgagcacaggggacccgtgcaggtgacccaggtagaggaagatatggtgatggtgttgatggatggctctgtgaagctggtgaccccggaggggtccccagtccggggacttcgcacacctgagatccccatgaccgaagcggtggaggccgtggctatggttggaggtcagcttcaggccttctggaagcatggagtgcaggtgtgggctctaggctcggatcagctgctacaggagctgagagaccctaccctcactttccgtctgcttggctcccccaggcctgtagtggtggagacacgcccagtggatgatcctactgctcccagcaacctctacatccaggaatga

SEQ ID NO: 3435 - DNA, 600 bp, Homo sapiens; identical to SEQ ID NO: 3434

SEQ ID NO: 3436 - DNA, 435 bp, Homo sapiens
atgggaatgtccacagtctcattacttcgacaaacacccgcaaggccccacccggtcaaaggatgggtaaccttttctcctttctcttcccagctctggggtgtcaccaagcaaggctaccgctgtcgggagtgcgggctgtgttgccacaaacactgcagagaccaggtgaaggtagaatgtaagaagaggccaggggccaagggcgatgcaggaccccccggagctcctgtcccatccacaccagctccccatgccagctgtggctccgaggaaaatcactcctacacgctatccctggagcctgagactgggtgccagcttcgccatgcctggacccagactgaatccccacacccttcctgggaaacagatacggtcccctgcccggtgatggacccaccatcaactgcatcctccaagctggattcctag

SEQ ID NO: 3437 - DNA, 600 bp, Homo sapiens
tcagccaccagcccttcctgtggccctcggctccccctgtgccccctgggccctcacccctacccgagtcccagcggcacctcggggaaccaagggtctcctgggtctccttcacatcttcttaggcagtctttgccattcccacctaaaccctacctgctgacctcccctcctcagagcttgccatggctccccagtgccctcaagcatggcaccttgggcagtggccgctcctcggacaaaggcccgtcctggtccagccgctcactgggtgcccgttgccggaactccatcgcctcctgtcccgaggagcagccccacgtgggcaactaccgcctgctgaggaccattgggaagggcaactttgccaaagtcaagctggctcggcacatcctcactggtcgggagaggtcaggattggccctgggtttgctttgtggcctcagagaaatgattggaatgaattatcctgccttggatggactctcccctgccctcacgctgtctacaccatacacgcaaaagacaccgggccccgatggtcttacaggcaaatcctaccagatgttcacattttatgccagttcttccagagactaa

SEQ ID NO: 3438 - DNA, 600 bp, Homo sapiens
gtttgcacagaacgcccgggggctgagcgcccgtcactgttgccaaatgggaaagaaaacagctcaggcaccccacgggtgccccctgcctccccctccagtcacagcctggcacccccatcaggggagcggagccgcctggcacgtggttccaccatccgcagcaccttccatggtggccaggtccgggaccggcgggcaggggggatccaagatcaggtcgcagacgaacctgagagaatcgggggacctgaggtcacaagttgccatctaccttgggatcaaacggaaaccgccccccggctgctccgattcccctggagtgtgaagctgaccagctcgcgccctcctgaggccctgatggcagctctgcgccaggccacagcagccgcccgctgccgctgccgccagccacagccgttcctgctggcctgcctgcacgggggtgcgggcgggcccgagcccctgtcccacttcgaagtggaggtctgccagctgccccggccaggcttgcggggagttctcttccgccgtgtggcgggcaccgccctggccttccgcaccctcgtcacccgcatctccaacgacctcgagctctga

SEQ ID NO: 3439 - DNA, 600 bp, Homo sapiens
gggcgccccgtcagcggacgggcagaaggcgaaagtccagctgccaagcccaggcctggccagctggttctcagacaggggtcagccacccctagccagtctcccgtcctgagtggcacttggggcctgcccccatcaccgccagcagctccatgcaaggtcacgcggctgtccttgcctgcggtcagcaccgtccctccccctgccctccagagaggaggggtgatgactttggcacgtcacgggatggatagccggcctgccatggccatctttgaactcctggactatattgtgaacgagccacctcctaagctgcccaacggtgtgttcacccccgacttccaggagtttgtcaataaatgcccagcctgcatcccgagtgctttcccataccacagccaccgtcagcgaccttcaaacccctcgacagctgattggcggattggagatgccacccccctagacagcccgttactttctgtgcctaaccacaccttcatcaagcggtccgaggtggaagaagtggattttgccggctggttgtgtaaaaccctgcggctgaaccagcccggcacacccacgcgcaccgccgtgtga

SEQ ID NO: 3440 - DNA, 600 bp, Homo sapiens
gtgggggctggcggggctgggtggcatcgcggggaccccgctcaggcttccctccttcctaggcgatccggcggcggaacgtgcgtggtgaggacagcggccgcaagcccgagcgcgcggcgcctgaagaccacgcgtctgaaggagtacaccatcaagtcgcactccagcttgccgcccaacaacagctacgccgacttcgagcgcttctccaaggtgctggaggaggcggcggccgccgaggagggcctgcgcgagctgcagcgcagccggcggctctgccacgaggacgtggaggcgctggccgccatctacgaggagaaggaggcctggtaccgcgaggagagcgacagcctgggccaggacctgcggaggctacggcaggagctgctcaagaccgaggcgctcaagcggcaggcgcaggaggaggccaagggcgcgctgctggggaccagcggcctcaagcgccgcttcagccgcctggagaaccgctacgaggcgctggccaagcaagtagcctccgagatgcgcttcgtgcaggacctcgtgcgcgccctggagcaggagaagctgcagggcgtggagtgcgggctgcgctag

SEQ ID NO: 3441 - DNA, 600 bp, Homo sapiens; identical to SEQ ID NO: 3440

SEQ ID NO: 3442 - DNA, 600 bp, Homo sapiens
aggctgaaggggctgggggaaggaagcaaacagtggtcatcaaaggagttcgcggaggcagaggatggaggcagcagcgtgcccccttccccctactcgacccccaccaaccccctggtggacctggagctggagagcttcaagaaggacccccgccagtcgctcacgcccacccacgtcacggctgcatgcgctgtgagccgcgggcaccggcggacgccatcggatggggcgctggggcagcgggggccgcccgagcccgcgggccatggccctggccctcgtgaccttctggacttcccccgcctgcccgacccccaggccctgttcccagcccgccgccggccccctgagttcccaggccgccccaccaccctgacctttgccccgagacctcggccggctgccagtcgcccccgcttggacccctggaaactggtctccttcggccggacactcaccatctcgcctcccagcaggccagacactccggagagccctgggccccccagcgtgcagcccacactgctggacatggacatggaggggcagaaccaagacagcacagtgcccctgtgcggggcccacggctcccactaa

SEQ ID NO: 3443 - DNA, 600 bp, Homo sapiens
ctggacaaagatggccacatcaagatcactgactttggcctctgcaaagagggcatcagtgacggggccaccatgaaaaccttctgtgggaccccggagtacctggcgcctgaggtgctggaggacaatgactatggccgggccgtggactggtgggggctgggtgtggtcatgtacgagatgatgtgcggccgcctgcccttctacaaccaggaccacgagcgcctcttcgagctcatcctcatggaagagatccgcttcccgcgcacgctcagccccgaggccaagtccctgcttgctgggctgcttaagaaggaccccaagcagaggcttggtggggggcccagcgatgccaaggaggtcatggagcacaggttcttcctcagcatcaactggcaggacgtggtccagaagaagctcctgccacccttcaaacctcaggtcacgtccgaggtcgacacaaggtacttcgatgatgaatttaccgcccagtccatcacaatcacaccccctgaccgctatgacagcctgggcttactggagctggaccagcggacccacttcccccagttctcctactcggccagcatccgcgagtga

SEQ ID NO: 3444 - DNA, 600 bp, Homo sapiens; identical to SEQ ID NO: 3443

SEQ ID NO: 3445 - DNA, 600 bp, Homo sapiens
ttccgccgcacggccgacgaggccaccaacacgggcccggcaggcagcagtgcctccacctcgcccgcgcccctcgacacctgcccctcttccagcaccgccagctccatctccagttctggaggctccagtggctcctccagtgacaaccggacctaccgctacagcaaccgatattgtgggggccctgggccccctatcacagactgtgagatgaacagcccccaggtcccaccctcccagccgctgcggccctgggcagggggtgatgtgccccacaagacacatcaagcccctgcctctgcctcgtcactgcctgggaccggggcccagttacccccccagccccgataccttggtcgtcccccatcaccaacctcaccaccacccccggagctgatggatgtgagcctggtgggcggccctgctgactgctccccacctcacccagcgcctgccccccagcacccggctgcctcagccctccggactcggatgactggaggtcgtccacccctcccgcctcctgatgaccctgccactctggggcctcacctgggcctccgtggtgtaccccagagcacagcagccagctcgtga

SEQ ID NO: 3446 - DNA, 600 bp, Homo sapiens
ttgcccactcccatggtcctgcagaggaacagctgtgccaaagacctcacgtccttcgcggctgaggccattgccatgaaccggcagctggcccagcacgacgaggacctggctgaggaggaggccgcggggcagggccagcccgtcctggtccgagctacctcacgctgcctgcagctgtctccaccctcccagtccaagctggcgcagcggcggcaaagggccagtctgtcctcggccccagtggtcctgcaggcagaggggctggacaggcactgtcagccaatgtggggggtcctgaagacacccccttggggcacccgagtgccccttctcagggctcagtctgaccgtagccacggcagtgtttttggtctgccaccttcaggaaaacggctgcggcctcggcctcccttcgggcacccaggaatgcgggggtctgctcagtccccccaccctccatgctccaacccccgggggctgcggagcctgctgccccctccccgcgggtgggacagtcacttcctcctccctccccacccctgtcgcatccacgtgcgacctggaggactggtcagaaccgttactgtgaatgagtga

SEQ ID NO: 3447 - DNA, 600 bp, Homo sapiens
ctctctgacctgctgaaagggatgcttgagtacgaaccggccaagaggttctccatccggcagatccggcagcacagctggttccggaagaaacatcctccggctgaagcaccagtgcccatcccaccgagcccagacaccaaggaccggtggcgcagcatgactgtggtgccgtacttggaggacctgcacggcgcggacgaggacgaggacctcttcgacatcgaggatgacatcatctacactcaggacttcacggtgcccggatgtcccacgggagcagggtgcctgcctgtctgcaacaaggacagcttctgccctctggtggccaatcccacgtccccaaagcctccagcccacctgcaggctgcctccgccctgcgggccgctgggacatggctgaaaggacaggtcccagaagaggaggccagtcacaatggacagcgccggggcctccccaaggccgtgtgtatgaacggcacagaggcggcgcagctgagcaccaaatccagggcggagggccgggcccccaaccctgcccgcaaggcctgctccgccagcagcaagatccgccggctgtcggcctgcaagcagcagtga

SEQ ID NO: 3448 - DNA, 600 bp, Homo sapiens; identical to SEQ ID NO: 3447

SEQ ID NO: 3449 - DNA, 600 bp, Homo sapiens
aagggcaacctggtgaactttctgcggacccggggtcgagccctcgtgaacaccgctcagctcctgcagttttctctgcacgtggccgagggcatggagtacctggagagcaagaagcttgtgcaccgcgacctggccgcccgcaacatcctggtctcagaggacctggtggccaaggtcagcgactttggcctggccaaagccgagcggaaggggctagactcaagccggctgcccgtcaagtggacggcgcccgaggctctcaaacacgggaagttcaccagcaagtcggatgtctggagttttggggtgctgctctgggaggtcttctcatatggacgggctccgtaccctaaaatgtcactgaaagaggtgtcggaggccgtggagaaggggtaccgcatggaaccccccgagggctgtccaggccccgtgcacgtcctcatgagcagctgctgggaggcagagcccgcccgccggccacccttccgcaaactggccgagaagctggcccgggagctacgcagtgcaggtgccccagcctccgtctcagggcaggacgccgacggctccacctcgccccgaagccaggagccctga

SEQ ID NO: 3450 - DNA, 600 bp, Homo sapiens; identical to SEQ ID NO: 3449

SEQ ID NO: 3451 - DNA, 600 bp, Homo sapiens
tctgccaacaacctgggcattgtgtttgggccgacactgctgcggccgccggacggcccgcgggcagccagcgccatccctgtcacctgcctgctggactctgggcatcaggcccagcttgtggagttcctcatccatcccacggccacacctaccgagattccaactccacagagtgaccagagagaggacgtggctgaagacaccaaagatgggggaggggaagtgtccagccaaggcccagaggactcactcctggggacacagtctcgtggccacttcagccgccagccagtgaagtatccccggggcggtgtgaggcctgtaacccaccagctgtccagtctggccctggtggcttccaagctgtgcgaggagacccccatcacatcagtgcccagagggagtttgcgggggcgggggcccagccctgcagctgcctcccctgagggcagccccctgcgccgcaccccgctgcccaagcattttgagattacccaggagacagcccggctactctcgaaattggacagcgaggctgtgcccagggccacctgctgcccggacgtccagcctgaggaagccgaggaccatctctga

SEQ ID NO: 3452 - DNA, 522 bp, Homo sapiens
tatgtgaggcagctgctcctgacccagatgatcccacctgacttcagtctctttgatgtggtccttaagatgaggaagcagcggcctgcggccgtgcagacagaggagcagtacaggttcctgtaccacacggtggctcagatgttctgctccacactccagaatgccagcccccactaccagaacatcaaagagaattgtgccccactctacgacgatgccctcttcctccggactccccaggcacttctcgccataccccgcccaccaggaggggtcctcagcgcggaggaggcgccgctctacagcaaggtgacgccgcgcgcccagcgacccggggcgcacgcggaggacgcgagggggacgctgcctggccgcgttcctgctgaccaaagtcctgccggatctggcgcctacgaggacgtggcgggtggagctcagaccggtgggctaggtttcaacctgcgcattgggaggccgaagggtccccgggacccgcctgctgagtggacccgggtgtaa

SEQ ID NO: 3453 - DNA, 600 bp, Homo sapiens
atcaatcaaccttttgtgtcacgagatccaaacaccctcaggtggaaaggacagtgctattggggcctttcttacatggggaccaacatgcattcactacagctcaccatctctagaagaaacggcagtgaaacacacactggaaacaccggctctgaggcagcattctcccccagtttttcagccgtaattagtacaagtgaaaaggagactatcaaagctgcattgtcacgtgtgtgtggagatcgcatatttggggcagctggggctggttataagagcctatgtgttgtccaaggcctcgttgacatttacatcttttcagaagataccacattcaaatgggactcttgtgctgctcatgccatactgagggccatgggtgggggaatagtagacttgaaagaatgcttagaaagaaatccagaaacagggcttgatttgccacagttggtgtaccacgtggaaaatgagggtgctgctggggtggatcggtgggccaacaagggaggactcattgcatacagatccaggaagcggctggagacattcctgagcctcctggtccaaaacctggcacctgcagagacgcatacctag

SEQ ID NO: 3454 - DNA, 600 bp, Homo sapiens
gaaattttcagcctgtgtttacctgagttggctgaaatggtttctgaaaatgatgttatcagactcattaaacaaatacttgaaggagtttattatctacatcagaataacattgtacaccttgatttaaaggtaacgaatattggtataatagcatatatgttgttaactcacacatcaccatttgtgggagaagataatcaagaaacatacctcaatatttctcaagttaatgtagattattcggaagaaactttttcatcagtttcacagctggccacagactttattcagagccttttagtaaaaaatccagagaaaagaccaacagcagagatatgcctttctcattcttggctacagcagtgggactttgaaaacttgtttcaccctgaagaaacttccagttcctctcaaactcaggatcattctgtaaggtcctctgaagacaagacttctaaatcctcctgtaatggaacctgtggtgatagagaagacaaagagaatatcccagaggatagcagcatggtttccaaaagatttcgtttcgatgactcattacccaatccccatgaacttgtttcagatttgctctgttag

SEQ ID NO: 3455 - DNA, 600 bp, Homo sapiens
gctacctgcttgaaatgagacaaaagggatctgacttctgggttgaagctggtcacaccaaacagctaactttcacagtagagcgtcttgttgagaaaactgaatatgaattccgtgtgaaggccaagaatgatgctggctatagtgaacccagagaagccttctcttctgtcatcattaaggagcctcaaatcgagcccactgctgacctcactggaattaccaatcagcttataacttgcaaagcaggaagcccatttaccattgacgtaccaatcagtggtcgtcctgcccccaaagtaacatggaaactggaagaaatgagacttaaagagacagatcgagtgagcattacaacaacaaaagacagaaccacactgactgtaaaggacagcatgagaggtgactctggaagatacttcttgaccctggaaaatacagctggtgttaaaacatttagcgtcacagttgtggtcattggaaggccaggtccagtaaccggccccattgaggtctcatctgtctcagctgaatcgtgtgtcctgtcatggggagaacctaaagatggaggaggcactgaaattactaattacatagttg

SEQ ID NO: 3456 - DNA, 438 bp, Homo sapiens
atgtcgtctctcggtgcctcctttgtgcaaattaaatttgatgacttgcagttttttgaaaactgcggtggaggaagttttgggagtgtttatcgagccaaatggatatcacaggacaaggaggtggctgtaaagaagctcctcaaaatagagaaagaggttgtttcccataatagaactgcagataccactgaaagagtgcctgaagagcctcgacagagaaggaaagaagcagagggtgagaaagaaaggaagattctaaatgacaatcttttgaatagtgcaagttcaatccctaaaacaaaaagcaagatcttttttcccctaaataatgtgctctccggcttcacctctcatcctgaggaacatgaaagagaacgtaaaagaggtgacccaaatcacagagtgcctttgataggagaaattcagctgttttga

SEQ ID NO: 3457 - DNA, 438 bp, Homo sapiens; identical to SEQ ID NO: 3456

SEQ ID NO: 3458 - DNA, 600 bp, Homo sapiens
atcccagcagcggattcaccatctcaaaacctgacaagacatttcaaagaaagtattaaattcattcacgagtgccggctccgcggtgagagctgccttgtacactgcctggccggggtctccaggagcgtgacactggtgatcgcatacatcatgaccgtcactgactttggctgggaggatgccctgcacaccgtgcgtgctgggagatcctgtgccaaccccaacgtgggcttccagagacagctccaggagtttgagaagcatgaggtccatcagagctctgatttcccactgctgtttgtttccctggttatgtgtggcaccatctctgtggtgaagtcacaggtgcaagcccacgtggatgcagatgtgcacatgtgtgtgacgtttcgggtttgtttccatcctctccagtatcggcagtggctgaaggaagaatatggagagagccctttgcaggatgcagaagaagccaaaaacattctgggtaaatataaggagcaagggcgcacagagccccagcccggcgccaggcggtggagcagttttccggcactggctccgctgacctacgataattatacgacggagacctaa

SEQ ID NO: 3459 - DNA, 600 bp, Homo sapiens; identical to SEQ ID NO: 3458

SEQ ID NO: 3460 - DNA, 324 bp, Homo sapiens
atgaggcaaggacaagctcctgaagggcctcagaagcaggtgagcgaaagaactcaggactttaccccaaaagccgtgatgtgcaatgaagcatctcaattgctggaggaagcactaggatgttcaggcaggcccaggctcagtcctagttcaggatttggaggcacagaaagaaagaaaaccaaaagagacgtcaataattttgaccaagactttacccgggaagagccggtactcacccttgtggacgaagcaattgtaaagcagatcaaccaggaggaattcaaaggtttctcctactttggtgaagacctgatgccctga

SEQ ID NO: 3461 - DNA, 324 bp, Homo sapiens; identical to SEQ ID NO: 3460

SEQ ID NO: 3462 - DNA, 600 bp, Homo sapiens
gactgggtgctcctggagcagaagaagatcaagccacccttcaaaccacgcattgtaagttggtccccgtgcacgttcagcaccatgggtcgggcccagaggccactaagagacacagggaagctgaggcacaccccacagaggccactgagagacacggggaagctgagcttcatccccacagaggccactgagagacacagggaagctgaggcacaccccacagaggccactgagagacacggggaagctgaggcacaccccaaagaggccactgagagacatggggaagctgaggcgtaccccacagaggccacgggaaaggccactgagagacatggggaagctgaggcacaccccacggaggccactgagagacacagggaagctgaggtgcaccccacagaggccacgggaaagagctggggcaggagcaaggctgagttctgcagcccctcacgaggacatccccctggactgtgtccaccacatccaagcggcttaccatccaagaggctacaagagccctccaagagccaggactctgatccagggctggagggcatgggaaaagtccagaaacctgtttttggtggttga

SEQ ID NO: 3463 - DNA, 600 bp, Homo sapiens
aagtcagcacccacctccccttgtgaccaggaaataaaagaacttgagaacaacattcggaaagccttgtcatttgacaaccgaggagaggagcaccgggcagcatcgtctcctgatggccagctgatgagccccggtgagaatggcgaagtccggcaaggccaggccaagcgcctgggcctggatgagttcaacttcatcaaggtgttgggcaaaggcagctttggcaaggtcatgttggcagaactcaagggcaaagatgaagtatatgctgtgaaggtcttaaagaaggacgtcatccttcaggatgatgacgtggactgcacaatgacagagaagaggattttggctctggcacggaaacacccgtaccttacccaactctactgctgcttccagaccaagacagggtctcctttgctctggctcagcaaaatcagaatgacccttgatgtcagggctttcaagcagagcacattcccagcttccatcgtccaggtgtccccatacaccacaggcctgcccatagctcatgacaccacacttcaggatttctttgatacctctagagaaacatcagaatttttgaagctggcctga

SEQ ID NO: 3464 - DNA, 600 bp, Homo sapiens
aacgtggacagcctcatcacccggctgctggaggtacgaggatgtcgtccaggaaagattgtgcagatgactgaagcagaagttcgaggcttatgtatcaagtctcgggagatctttctcagccagcctattcttttggaattggaagcaccgctgaaaatttgtggagatattcatggacagtatacagatttactgagattatttgaatatggaggtttcccaccagaagccaactatcttttcttaggagattatgtggacagaggaaagcagtctttggaaaccatttgtttgctattggcttataaaatcaaatatccagagaacttctttctcttaagaggaaaccatgagtgtgctagcatcaatcgcatttatggattctatgatgaatgcaaacgaagatttaatattaaattgtggaagaccttcactgattgttttaactgtctgcctatagcagccattgtggatgagaagatcttctgttgtcatggaggattgtcaccagacctgcaatctatggagcagattcggagaattatgagacctactgatgtccctgatacagtgctgctcgagcggcctttcctgtga

SEQ ID NO: 3465 - DNA, 600 bp, Homo sapiens; identical to SEQ ID NO: 3464

SEQ ID NO: 3466 - DNA, 600 bp, Homo sapiens
ctgacacagtttgatcaactgtatcggaaaaaacctggaatgacaatgtcctgtgccaaattacctcagaatatttccaaaaatagatacagagatatttcgccttatgatgccacacgggtcattttaaaaggtaatgaagactacatcaatgcgaactatataaatatggaaattccttcttccagcattataaatcagtacattgcttgtcaagggccattaccacacacttgtacagatttttggcagatgacttgggaacaaggctcctctatggttgtaatgttgaccacacaagttgaacgtggcagaaaaaatgaaagtcgtccactcactcagatccagtacatagcctggcctgaccatggagtccctgatgattcgagtgactttctagattttgtttgtcatgtacgaaacaagagggctggcaaggaagaacccgttgttgtccattgcagtgctggaatcggaagaactggggttcttattactatggaaacagccatgtgtctcattgaatgcaatcagccagtttatccactagatattgtaagaacaatgagagatcagcgagccatgatgatccaaacacct

SEQ ID NO: 3467 - DNA, 600 bp, Homo sapiens
aggggcagctggcaaggggagaatgttgccgtgaagatcttctcctcccgtgatgagaagtcatggttcagggaaacggaattgtacaacactgtgatgctgaggcatgaaaatatcttaggtttcattgcttcagacatgacatcaagacactccagtacccagctgtggttaattacacattatcatgaaatgggatcgttgtacgactatcttcagcttactactctggatacagttagctgccttcgaatagtgctgtccatagctagtggtcttgcacatttgcacatagagatatttgggacccaagggaaaccagccattgcccatcgagatttaaagagcaaaaatattctggttaagaagaatggacagtgttgcatagcagatttggttttttcctgtacatttgggaactcagttgcatcctacaatttgccactgccccagttgcaccaaggagtgggtgtagtagaaattcagtatccactgggtgccttggaacgcaagtttatggtcacccttgcctgttctggaagtgttatcaccaacacagtgcttgattccaaccagacacgaattgtttgccacctctag

SEQ ID NO: 3468 - DNA, 600 bp, Homo sapiens; identical to SEQ ID NO: 3467

SEQ ID NO: 3469 - DNA, 492 bp, Homo sapiens
atgttgatgactcttcaaggattagaatatttacatcaacattggatcctacatagggatctgaaaccaagcaacttgttgctagatgaaaatggagttctaaaactggcagattttggcctggccaaatcatttgggagccccagtagagcttatacatatcaggttgcaaccaggtggtatcaggcccctgagttactatttggagctaggatgtatggtgtaggtgtggacattgcagcaggagacgacttactagatctcatacaaggcttattcttatttaatccatgtgttcgaattacggccacacaggcactgaaaatgaagtatttcagtaatcggccagggccaacacctggatgtcagctgccaagacccaactgtccagtggaaaccttaaaggagcaatcaaatcctgctttggcgacaaaaaggaaaagaacacaggccttggaacaaggaggattgcccaagaaactaattttttaa

SEQ ID NO: 3470 - DNA, 492 bp, Homo sapiens; identical to SEQ ID NO: 3469

SEQ ID NO: 3471 - DNA, 423 bp, Homo sapiens
ctgacattcgtttttgaatacatgcacacagacctggcccagtatatgtctcagcatccaggagggcttcatcctcataatgtcagagtgagcagtgagggccagtcttcaagcaacagcaatgcaagatggcagccaccatgggctcaggcaatttatgaaagccaaatatacagccttaaaatagaatgtggacctaaatacccagaagaactcccctttgtaagatttgtaacaaaaattaatatgagtagagttaatagttctaatggaatggtgaacccaagagccatatcagcgctagcaaaatggcagaattcatatatcatcaaagttatccttcaagagcttcagcgcctaatgatgtctaaagaaaatgtgaaacaccctcagccatctgaaggacagtgttacagcaattga

SEQ ID NO: 3472 - DNA, 600 bp, Homo sapiens
gactctcgctgtgtggtatctgaggctggcaaagctttagacatgtcctatgatcacaaaccagaggatgaagtagaactagcacgcatcaagaatgctggtggcaaggtcaccatggatgggcgagtcaacgggggcctcaacctctccagagccattggggaccacttctataagagaaacaagaacctgccacctgaggaacagatgatttcagcccttcctgacatcaaggtgctgactctcactgacgaccatgaattcatggtcattgcctgtgatggcatctggaatgtgatgagcagccaggaagttgtagatttcattcaatcaaagatcagccagcgtgatgaaaatggggagcttcggttattgtcatccattgtggaagagctgctggatcagtgcctggcaccagacacttctggggatggtacagggtgtgacaacatgacctgcatcatcatttgcttcaagccccgaaacacagcagagctccagccagagagtggcaagcgaaaactagaggaggtgctctctactgagggggctgaagaaaatggcaacagcgacaagaagaagaaggccaagcgagactag

SEQ ID NO: 3473 - DNA, 600 bp, Homo sapiens; identical to SEQ ID NO: 3472

SEQ ID NO: 3474 - DNA, 600 bp, Homo sapiens
atccggtggactgcgccagaagcaattgcctatcgtaaattcacatcagcaagtgatgtatggagctatggaatcgttatgtgggaagtgatgtcgtacggggagaggccctattgggatatgtccaatcaagatgtgattaaagccattgaggaaggctatcggttaccccctccaatggactgccccattgcgctccaccagctgatgctagactgctggcagaaggagaggagcgacaggcctaaatttgggcagattgtcaacatgttggacaaactcatccgcaaccccaacagcttgaagaggacagggacggagagctccagacctaacactgccttgttggatccaagctcccctgaattctctgctgtggtatcagtgggcgattggctccaggccattaaaatggaccggtataaggataacttcacagctgctggttataccacactagaggctgtggtgcacgtgaaccaggaggacctggcaagaattggtatcacagccatcacgcaccagaataagattttgagcagtgtccaggcaatgcgaacccaaatgcagcagatgcacggcagaatggttcccgtctga

SEQ ID NO: 3475 - DNA, 600 bp, Homo sapiens; identical to SEQ ID NO: 3474

SEQ ID NO: 3476 - DNA, 600 bp, Homo sapiens
aaggacaaaggcaacttcctgaccgaggatcaaatcctttggctgctgctggggatctgcagaggccttgagcttatcatgccaagggttatgcccacagccttcctgtccagagatgctcataggtcacttctacttctctacagagacttgaagcccaccaatatattgcttggagatgaggggcagccagttttaatggacttgggttccatgaatcaagcatgcatccatgactgggcagcccagcggtgcaccatctcctaccgagccccagagctcttctctgtgcagagtcactgtgtcatcgatgagcggactgatgtctggcttaagtccttagctgcggtgctatatgccatgatgtttggggaaggcccttatgacatggtgttccaaaagggtgacagtgtggcccttgcgtgcagaaccaactcagcatcccacaaagccccaggtgagcattcttcagcattgcggcagctcctgaactcgatgatgaccgtggacccgcatcagcgtcctcacattcctctcctcctcagtcagctggaggcgcttcagcccccagctcctggccaacatactacccaaatctga

SEQ ID NO: 3477 - DNA, 600 bp, Homo sapiens; identical to SEQ ID NO: 3476

SEQ ID NO: 3478 - DNA, 600 bp, Homo sapiens
ctgctacaaggcctggactacctccacggccaccacgtgctccacctagacatcaagccagacaacctgctgctggcccctgacaatgccctcaagattgtggactttggcagtgcccagccctacaacccccaggcccttaggccccttggccaccgcacgggcacgctggagttcatggctccggagatggtgaagggagaacccatcggctctgccacggacatctggggagcgggtgtgctcacttacattatgctcagtggacgctccccgttctatgagccagacccccaggaaacggaggctcggattgtggggggccgctttgatgccttccagctgtaccccaatacatcccagagcgccaccctcttcttgcgaaaggttctctctgtacatccctggagccggccctccctgcaggactgcctggcccacccatggttgcaggacgcctacctgatgaagctgcgccgccagacgctcaccttcaccaccaaccggctcaaggagttcctgggcgagcagcggcggcgccgggctgaggctgccacccgccacaaggtgctgctgcgctcctaccctggcggcccctag

SEQ ID NO: 3479 - DNA, 600 bp, Homo sapiens; identical to SEQ ID NO: 3478

SEQ ID NO: 3480 - DNA, 600 bp, Homo sapiens
ctgctggttaaccggcactacgccaagatcagcgactttggcctctccaaagcactgggtgccgacgacagctactacactgtaagcctctgcccctgtgatgcccgactggatgggctgggtgggcccgctcagcagggaagtggccgctcaagtggtacgcacccgaatgcatcaacttccgcaagttctccagccgcagcgatgtctggagctatggggtcaccatgtgggaggccttgtcctacggccagaagccctacaaggcaggcgcgggcagaggcaggtgggcggtgtggtggggagggggatgaggaggaggacactggtcactcacaggtgtctctgccccggcttgagcagaagatgaaagggccggaggtcatggccttcatcgagcagggcaagcggatggagtgcccaccagagtgtccacccgaactgtacgcactcatgagtgactgctggatctacaagtgggaggatcgccccgacttcctgaccgtggagcagcgcatgaagtcctgttactacagcctggccagcaaggtggaagggcccccaggcagcacacagaaggctgaggctgcctgtgcctga

SEQ ID NO: 3481 - DNA, 600 bp, Homo sapiens; identical to SEQ ID NO: 3480

SEQ ID NO: 3482 - DNA, 600 bp, Homo sapiens
gatgtgacagctgggaaaatccctggtagagccattatgttgtggaatccaaaaggaattctcaggggctctgtacatcgtaggagccattcacaagcagaatccaacaatggccgtacacagacttcaagcaactctcctgctgtcacagagaaaaatgggtctcattcgtgtgacatacagacaagggcaagagaagagcatcccaggcaggagaaacaagagtgggccatagccagaggcaggatatgcagagccattcttggaaggaatgtttccctgggcgacacaaccaagtcatgcctttctggatctgtgtctgctgacattgacacagatgatctctttctttatgctttccttacaggatttcaggcagaagaagggagatgctgggtattctcagcagccagctactcaggagccagccttcaccttgcccctcatccactcacactgggatccggatttaagaagaaggaattagataacccacagttcaatgaactgacttcagcgaagcggtcgagccctggaggcaatctgtttgagactttagttatgcttccaagacgccaatggagccctagaaatatgtga

SEQ ID NO: 3483 - DNA, 288 bp, Homo sapiens
ctagaacagctgtttccattacaaccactgctaccagtagtgggcactcaggtgcacatgatacaaggacatagcacagacagtgaaactcacctttctgtgaagaacgcacaaacgtcacaagacatgcaaaactcaaagatgctccccgagcatcctggtaacctactaggtgctgaccttccctacgggtgtacagctgcaccttgtccgcctgagcttgcatttgaaattgactttcgagcccaggctccctttcacaaggccctttcttcctatgccaattag

SEQ ID NO: 3484 - DNA, 288 bp, Homo sapiens; identical to SEQ ID NO: 3483

SEQ ID NO: 3485 - DNA, 600 bp, Homo sapiens
cataaatacctatgtggagcacttcagactagcattgttctattagaatgggttgaaccaatgcagaaatttatgttaattaagcacatagattttcctataccatgtccacttagaatgtttgaaatgctggtagttcctgaacaggagtaccctttagtttgtgttggtgtcagtagaggtagagacttcaaccaagtggttcgatttgagacggtcaatccaaattctacctcttcatggtttacagaatcaggttgtataaaaatagtaaatctccaaggaagattaaaatctagcaggaaattgtcatcagaactcacctttgatttccagattgaatcaatagaatgtcattcatccaacaaacaaatgattataataagtcagtttcgagggatatctgatcaagatgttaaaatggaatccgctttcaaagacatagccagggtcaaaaagcaagatcaacaacagaatctcaaagcagtatacaggtctgaagctaacaggcctgctgggctccagttacaaaagtatcccacaggagatggagaaccacagccaagttcattgcttgtggtacctgataatcaggcatga

SEQ ID NO: 3486 - DNA, 600 bp, Homo sapiens; identical to SEQ ID NO: 3485

SEQ ID NO: 3487 - DNA, 600 bp, Homo sapiens
cagcagctgccctacgagtttttcagcgaagagaacgcgcccaagtggcggggactactggtgcctgcgctgaaaaaggacggcgcacacggagaggcccccctcatacggctggctctcggtgttgacatccaccgggtgtgtgggaatgccgcagggagccggggggagtttatccggataatccaacccctgagaggacaacaacagttggaggagcctcagttttcagcggaggtcaaagcaggccacttttccgtcttcttggtcttagcccggagctgctgtcagcctaccgttttaggtgtccagtacgctggttttagtggcttgagaatgccctggccgaagccttttcaggttgacctgtacccatctaccagtcctcaagtagtttctcaaactggagtctctagatattctcaggagtctgagaattctctgagatataaacagttttgtggttctctgtgtagatgcaaacaccatacatctggtgtctactggagggtggagttgaaaatgatcattgtgaaacaatgccagaatctttctgaaacttttgcaagcagcaaatttgaacagctggtttgtaactga

SEQ ID NO: 3488 - DNA, 600 bp, Homo sapiens
agaaaagatacaatgaaggtgtacaattttggggttgtgttttgcaaaatagcagctgtaggtggttttgccagagaatggtctttacctaacacagcccctcttacaaaagtctccaagtgtttaccactttctgttggaatcttaggaactagaccaaaggcgctgggaagggacataggggtttctggaccaagtaatatattcttagtagatacaaaacaagtaaagattggagactttggacttgtaacatctctgaaaaatgatggaaagcgaacaaggagtaagggaactttgcgatacatgagcccagaacagatttcttcgcaagactatggaaaggaagtggacctctacgctttggggctaattcttgctgaacttcttcatgtatgtgacactgcttttgaaacatcaaagtttttcacagacctacgggatggcatcatctcagatatatttgataaaaaagaaaaaactcttctacagaaattactctcaaagaaacctgaggatcgacctaacacatctgaaatactaaggaccttgactgtgtggaagaaaagcccagagaaaaatgaacgacacacatgttag

SEQ ID NO: 3489 - DNA, 600 bp, Homo sapiens; identical to SEQ ID NO: 3488

SEQ ID NO: 3490 - DNA, 600 bp, Homo sapiens
atggcctttaagtcatttggagaattggtacataagccattactggtggatctcactgttgaggaaggccagaggttgaaagtgatctatggatcctgtgctggattccatgctgttgatgtggattcaggatcagtctatgacatttatctaccaacacatatccagtgtagcatcaaaccccatgcaatcatcatcctccccaatacagatggaatggagcttctggtgtgctatgaagatgagggggtttatgtaaacacatatggaaggatcaccaaggatgtagttctacagtggggagagatgcctacatcagtagcatatattcgatccaatcagacaatgggctggggagagaaggccatagagatccgatctgtggaaactggtcacttggatggtgtgttcatgcacaaaagggctcaaagactaaaattcttgtgtgaacgcaatgacaaggtgttctttgcctctgttcggtctggtggcagcagtcagctccagaattccttgtctctgaatgactctgtcttgtgggtgtctgacagtggcgacgatgaacatgccgttggttttattggcagtgggcacaaggag

SEQ ID NO: 3491 - DNA, 600 bp, Homo sapiens; identical to SEQ ID NO: 3490

SEQ ID NO: 3492 - DNA, 600 bp, Homo sapiens
gttgattcacaaaaggctgcaacaaagcaagtcaacaaggcacacaataggttaatcgaaaaaaaagtccacagtgagagaagcgctgagtcctgtgcaacatggaaagtgcagaaagaggagaaactgattggattgatgaacaatgaagcagctcagcaggcacggtcaaaagggcaagtgcctctccagtttctgaggccagagtggagggttgctgttgctctgatgtttgctcagtgcaaggtggagaaggaaagcacaaggagaagacagaaatatcaagagtctcaagaacctttgaatgaagtaaacagtttcccacaaaaaatcagctatacacaattcccaaactcattttatgagcctcatcaagattttaccagtccagatatattcaagaagtcaagatctccatcttggtataaatacacttccacagtcagcacggggatcacagacttagaaagttcaactggactttggcctacaatttcccagtttactcttagtgaagagacaaacgcagatgtttattattatcgcatcatcatacctgtccttttgatgttagtatttcttgctttattttttctctga

SEQ ID NO: 3493 - DNA, 600 bp, Homo sapiens; identical to SEQ ID NO: 3492

SEQ ID NO: 3494 - DNA, 600 bp, Homo sapiens
gaggctgtggatgtctgtgagagccatgcccagtgtcgggcctttgtggtcaccaaccagaccacctggacagggttgcagctcaccactgccatccccagcccacacaccccacatcttgcctctggtgttgggcttgttgattgtgggattgtgggtggaggggagaggcagagcctccacaaagcctcacaccatgacaatgcagccaaatcctgccatgctcaccaccctcagaccatccttaaccctcgaaggaggacctcagcttccatcaccctcgggcctccttccctagctgaactcactccatgcaacatgcatagcccaccccacgcaatccagtactggactttacacaatcctctattaccctccaacagtcatatggcctgtggggctctgagggccggaggaaccgcatccaccaaggaggcacaaggcggggccagaagtgatgagaacctgaggggagggggctgggccaggaagtttgcgagggctgcacagtccagagggacccaaggacccagtaataaccaggagagaggcccgcagggctcaggaaccacaggactctggggaaaaagaccaaagtga

SEQ ID NO: 3495 - DNA, 600 bp, Homo sapiens; identical to SEQ ID NO: 3494

SEQ ID NO: 3496 - DNA, 600 bp, Homo sapiens
gagctcctgaagcacaagttcatcacacgctacaccaagaagacctccttcctcacggagctcatcgaccgctataagcgctggaagtcagaggggcatggcgaggagtccagctctgaggactctgacattgatggcgaggcggaggacggggagcagggccccatctggacgttcccccctaccatccggccgagtccacacagcaagcttcacaaggggacggccctgcacagttcacagaagcctgcggagcccgtcaagaggcagccgaggtcccagtgcctgtccacgctggtccggcccgtcttcggagaggcgagagccctgaaggcctccggcatcactgtggccgagcaaaggagcaggctccctgaaggcctgtcctggggtccagggtcaggcgtggtggtcttttcacagctcaaagagaagcacaagcagagcggcgggagcgtgggtgcgctggaggagctggagaacgccttcagcctggccgaggagtcctgccccggcatctcagacaagctgatggtgcacctggtggagcgagtgcagaggttttcacacaacagaaaccacctgacatccacccgctga

SEQ ID NO: 3497 - DNA, 600 bp, Homo sapiens; identical to SEQ ID NO: 3496

SEQ ID NO: 3498 - DNA, 600 bp, Homo sapiens
agctgagactgattgtggtttgaatgttcataagcagtgttccaagatggtcccaaatgactgtaagccagacttgaagcatgtcaaaaaggtgtacagctgtgaccttacgacgctcgtgaaagcacataccactaagcggccaatggtggtagacatgtgcatcagggagattgagtctagaggtcttaattctgaaggactataccgagtatcaggatttagtgacctaattgaagatgtcaagatggctttcgacagagatggtgagaaggcagatatttctgtgaacatgtatgaagatatcaacattatcactggtgcacttaaactgtacttcagggatttgccaattccactcattacatatgatgcctaccctaagtttatagaatctgccaaaattatggatccggatgagcaattggaaacccttcatgaagcactgaaactactgccacctgctcactgcgaaaccctccgagtgaccctccacgaaaaggagaatcttatgaatgcagagaaccttggaatcgtctttggacccacccttatgagatctccagaactagacgccatggctgcattgaatgatatacg

SEQ ID NO: 3499 - DNA, 600 bp, Homo sapiens; identical to SEQ ID NO: 3498

SEQ ID NO: 3500 - DNA, 600 bp, Homo sapiens
gagaaagaagtgaagatttctgcattccggggtgtatgtgtggaggactttgcaggggatatgcatgatggctccccactcaaccccagcaccctgctggctgaagtctgcgtggagcagtgcaccctcatggactccaagatgaagcccctgtggatcatgtacagcaatgaggaggcaggcagtggcgtcgttgaggtgctactccacccagacaccatcgccaacatccaactcaacaaccgcaacatggatggaggcaacgaagagttcaccctctcctgtgctggctactgtgtggccacgtacgtgctgggcatcggtgatcggcacagcgacaacatcatgatccgagcgaggcctaacaccatcctgcggcgccacgggcttctcttcctccacctctttgccctgatgcaggcagcaggcctgcctgagctcagctgctccaaagacatccggtatctcaaggactccctggcaccggggaaaacagaggaggcgctgaagcacttccgagtgaagtttaacgaagcacttccgactggaaaccgagtgaactggctggcccacaacgtgtccgaagataaccggcagtag

SEQ ID NO: 3501 - DNA, 600 bp, Homo sapiens
agtgcggtacccgagtccagccctgcacggccacacctcaatggagcagaagagagaggaatttgaattcttacttgatgacaacagcgacatcatggtggcccctgttattccacagcctcaaaatttaaccgctgcgcaccagcccttccaggtcatcctgcggtacacctcgaccgacgcccccgccatctggtggctggacccagagctgacctatggctgcgccaagcccttcgtcttcacccagggccactccgtgtgcaaccgctccttcttcccgtgcttcgacacacctgccgtgaagtgcacctactctgccgtcgtcaaggcgccatcgggggtgcaggtgctgatgagtgccacccggagtgcatacatggaggaagaaggcgtcttccacttccacatggagcaccccgtgcccgcctacctcgtggccctggtggccggagacctcaagccggcagacatcgggcccaggagccgcgtgtgggccgagccatgcctcctgcccacggccaccagcaagctgtcgggcgcagtggagcagtggctgagtgcagctgagcggctgtatgggccctacatgtggggcag

SEQ ID NO: 3502 - DNA, 600 bp, Homo sapiens
catcgagctttctccactggctgcctctctggggaacaaataaccgaaaagatactcagcaccctggttgatgtctgccaactacatgtgtccttagtcaactgtaccactgtcctccggcaaacagcagaagcccagggcctgaagttcttaagctgtcattatggaaagcagaaggatatccgacatgaagccagtgacttcccatgtagagtggccaagcttcctaagaacaaaaaccgaaataggtacagagacgtcagtccctttgaccatagtcggattaaactacatcaagaagataatgactatatcaacgctagtttgataaaaatggaagaagcccaaaggagttacattcttacccagggccctttgcctaacacatgcggtcacttttgggagatggtgtgggagcagaaaagcaggggtgtcgtcatgctcaacagagtgatggagaaaggttcgtgtggagttgtgtgtggagttatggagacctgcttttatcttgaaaagcaagttcttagtgcatcttcatggtgtctgattttttggctggtgagagtgtggctacctctgcggagctgtgggagcggctga

SEQ ID NO: 3503 - DNA, 600 bp, Homo sapiens; identical to SEQ ID NO: 3502

SEQ ID NO: 3504 - DNA, 246 bp, Homo sapiens
gcctccccagccaaaggggagccgtcactgcccgagaaggacgaggaccatgcactgagttactggaagcccttcctggtcaacatgtgcgtggctacggtcctcacggccggcgcttacctctgctacaggacgcgctggcgagatgctcgtgtgcagagagcactggccgctagcccgatggtaggattcagttctgtggtgcatctgagccagtctcagaagaaacagatcaaaggtttttaa

SEQ ID NO: 3505 - DNA, 600 bp, Homo sapiens
ggctggagctgagtatgacagcaccaagcagaagacagagtttgtgggtcagtctgtcttcccagtcatcctcctcatcctgctggggcactgcaagcctctccccaccagtcatcccatcctctcccacggtgacctgaagccttttgtcgttgccttcacagtggacaatggactcaaccctgtatggccagccaagcccttccacttccagatcagtaaccctgaatttgcctttctgcgcttcgtggtgtatgaggaagacatgtttagtgaccagaatttcctggctcaggctactttcccagtaaaaggcctgaagacaggatacagagcagtgcctttgaagaacaactacagtgaggacctggagttggcctccctgctgatcaagattgacattttccctgccaaggagaatggtgacctcagtcccttcagtggtacgtccctgcgggagcggggctcagatgcctcaggccagctgtttcatggccgagcccgggaaggctcctttgaatcccgctaccagcagccgtttgaggacttccgcatctcccaggagcatctcgcagaccattttgacagtcgagaacgaag

SEQ ID NO: 3506 - DNA, 600 bp, Homo sapiens; identical to SEQ ID NO: 3505

SEQ ID NO: 3507 - DNA, 1400 bp, Homo sapiens
ggcctgatcgaacatttgaccccttctctgaaactcctgttgatggtgttattgcagccacttgctcagtgcaggttatatcaggtcaattcttatcagataagaaaattggcacctacgtagaggtggatatgtatgggttgcccactgacaccatacgtaaggaattccgaactcgcatggttatgaataatggactcaatccagtttacaatgaagagtcatttgtatttcggaaggtgatcctgccggacctggctgtcttgagaatagctgtgtatgatgataacaacaagctgattggccagaggatcctcccgcttgatggcctccaagccggatatcgacacatttcccttcgaaatgagggaaataaaccattatcactaccaacaattttctgcaatattgttcttaaaacatatgtgcctgatggatttggagatatcgtggatgctttatcagatccaaagaaatttctctcaattacagaaaagagagcagaccaaatgagagctatgggcattgaaactagtgacatagccgacgtgcccagtgacacttccaaaaatgacaagaaaggaaaggccaacaccgccaaagcaaatgtgacccctcagagtagctctgagctcagaccaaccaccacggctgccctggcctctggtgtggaagccaagaaagaattctggggtcatcctgagaaggtcatgggaaatgagtcaaaggagtatttgaagaaaattatagtcttggcagaagaattcattgaaagtgggcatgctaagggcaaggcttacttgaagcatttaaagaaacagcagaaggagctaaattctttaaagaagaaacatgcaaaggaacacagtaccatgcagaagttacactgcacgcaagttgacaaaattgtggcacagtatgacaaagagaagtcgactcatgagaaaatcctagagaaggcaatgaagaagaaggggggaagtaattgtctcgaaatgaaaaaagaaacagaaatcaaaattcagacgctgacatcagatcacaaatctaaggtcaaagagattgtagcacagcacacaaaggaatggtcagaaatgatcaatacccacagtgctgaggagcaagaaatccgagacctgcacctcagccagcagtgtgagctgctgaaaaagctactcatcaatgcccacgagcagcaaacccagcagctgaaactgtcccatgacagggaaagcaaggaaatgcgagcacaccaggctaagatttctatggaaaatagcaaagccatcagccaagataaatctatcaagaataaagcagaacgggaaaggtgtcagtccgttctggatgggccagttctgaatagcagcaacagtcaggagggcggtcttcttcagtag

SEQ ID NO: 3508 - DNA, 1400 bp, Homo sapiens; identical to SEQ ID NO: 3507

SEQ ID NO: 3509 - DNA, 600 bp, Homo sapiens
acgagcacaaggaccatctcggcccactgccctgtgataaaatgtggcccagtgaacatctccgcctctgtccagtcagatgcaggctcttccatccttgaaaaggacctagagaagtgtgcccagtactggccatctgatggactggtgtcctatggagatattacagtggaactgaagaaggaggaggaatgtgagagctacaccgtccgagacctcctggtcaccaacaccagggagaataagagccggcagatccggcagttccacttccatggctggcctgaagtgggcatccccagtgacggaaagggcatgatcagcatcatcgccgccgtgcagaagcagcagcagcagtcagggaaccaccccatcaccgtgcactgcagcgccggggcaggaaggacggggaccttctgtgccctgagcaccgtcctggagcgtgtgaaagcagaggggattttggatgtcttccagactgtcaagagcctgcggctacagaggccacacatggtccagacactggaacagtatgagttctgctacaaggtggtgcaggagtatattgatgcattctcagattatgccaacttcaagtaa

SEQ ID NO: 3510 - DNA, 600 bp, Homo sapiens; identical to SEQ ID NO: 3509

SEQ ID NO: 3511 - DNA, 600 bp, Homo sapiens
attgtggatgaggactaccatctgaccgaggtggacaccatggtgtttgtcaggcagatctgtgacgggatcctcttcatgcacaagatgagggttttgcacctggacctcaagccagagaacatcctgtgtgtcaacaccaccgggcatttggtgaagatcattgactttggcctggcacggaggtataaccccaacgagaagctgaaggtgaactttgggaccccagagttcctgtcacctgaggtggtgaattatgaccaaatctccgataagacagacatgtggagtatgggggtgatcacctacatgctgctgagcggcctctcccccttcctgggagatgatgacacagagaccctaaacaacgttctatctggcaactggtactttgatgaagagacctttgaggccgtatcagacgaggccaaagactttgtctccaacctcatcgtcaaggaccagagggcccggatgaacgctgcccagtgtctcgcccatccctggctcaacaacctggcggagaaagccaaacgctgtaaccgacgccttaagtcccagatcttgcttaagaaatacctcatgaagaggcgctggaag

SEQ ID NO: 3512 - DNA, 600 bp, Homo sapiens; identical to SEQ ID NO: 3511

SEQ ID NO: 3513 - DNA, 224 bp, Homo sapiens
aagttcagcatcgcggatgaagacgcacggcagaacccctacccagtgaaggccatggaggtggtcaacagcggctctgaggtctggtacagcaatgggccgggcctccttgtcatcgactgtgcctccctggagatctgcaggcggctggagccctacatggccccctccatggttacgtcagtcgtgtgcagctctgagggcagaggggaggaggtcgtctg

SEQ ID NO: 3514 - DNA, 224 bp, Homo sapiens; identical to SEQ ID NO: 3513

SEQ ID NO: 3515 - DNA, 600 bp, Homo sapiens
ttttgtcttgcacaaatcatggatcctcattattcccataaggatcatctctctgaaggactggtaactaaatggtacagatctccacatcttttacattcttctaatagttatagtaaagccattgacatgtggactgcaggccacatctttgctgaaatgctgactggtaaaaccctttttgcagtgcatgattggcctatacataacaactttggtattgatgaagttctgcttgacctgagagctctgtctgatatcactgatgaagaagtaaggaagtgtgaaggagttgaggaggacgacatttacactagttacttagacaagttatttaacaggaaagaagatactgaaatactagaaactgagctagtagaggatgggaagcttggggagagaggaaatgaaggatttctgaacaacagtttggagttcctctttagcaagcacctcgagtccgtgggcgtcctgcagcttcgcagtccagttgggtcactacttaagtcaatacaggccacattaccaccttctgctatggaatcttcccctcaaattcctcataaaacctgcagcagcattttaaaacatgtgaactaa

SEQ ID NO: 3516 - DNA, 600 bp, Homo sapiens
atctggagcctgggcgtgatcctgtacatcatggtctgcggctccatgccctatgacgactccgacatcaggaagatgctgcgtatccagaaggagcaccgtgtggacttcccgcgctccaagaacctgacctgcgagtgcaaggacctcatctaccgcatgctgcagcccgacgtcagccagcggctccacatcgatgagatcctcagccactcgtggctgcagccccccaagcccaaagccacgtcttctgcctccttcaagagggagggggagggcaagtaccgcgctgagtgcaaactggacaccaagacaggcttgaggcccgaccaccggcccgaccacaagcttggagccaaaacccagcaccggctgctggtggtgcccgagaacgagaacaggatggaggacaggctggccgagacctccagggccaaagaccatcacatctccggagctgagccccctctgacctacccccactccctcacaatccctcgctcagcatcctcctcttcctctatttcctggagtcatgtgagatttctgtcctcagccctcaagttccctgccctgtcctccaggggcagccccagctga

SEQ ID NO: 3517 - DNA, 600 bp, Homo sapiens
gtggcatatgcagcccccgagctgctgcagggcatcccctaccagcccatggtgtatgacatctggagcctgggcatgatcctctacatcatggtctgcagctccatgccttacgactccaacatcaggaagatgctgcgtatccagaaggagcaccgcgtggacttcccacactccaagaacctgacagacgagtgcaaggacctcatctactgcatgctgcagcccgacgtcagccagcggctgcacatccatgacaccctcagccaatgctgggtgcagcccaaggcacagggactgccctctatggtcttcaacaaggagggggaaagctcccagggaactgaactcttgtggacccctgaacctggctctgccaagaggtctgccaccaagctggagcctggggaacagacacagcccgagggacagcctgagacaaaacctgaggggttggcaatgcaaatgtccaggcagtcggacatcctaggcttccccagcaagccgtcgaccagggagaaagaggaagggccccccagcagcctccagagatgcgcacctagtgagccgtttgtggcccagtgtgccagcggcgaatga

SEQ ID NO: 3518 - DNA, 600 bp, Homo sapiens
agactagctagagacaatgaattaagggaaaatgacaaagaacagctcaaagcaatttctacacgagatcctctctctgaaatcactgcgcaggagaaagattttctatggaccacagattggcctccaatcaaacctgaacaggctatggaacttctggactgtaattacccagatcctatggttcgaagttttgctgttcagtgcttggaaaaatatttaacagataacaaactttctcagtatttaattcagctagtacaggtcctaaaatatgaacaatatttggataacttgcttgtgagatttttactgaagaaagcattgactaatcaaaggattgggcactttttcttttggcatttaaaatctgagatgcacaataaaacacttagccagaggtttggcctgcttttggagtcctattgtcgtgcatgtgggatgtatttgaagcacctgaataggcaagtcgaggcaatggaaaagctcattaacttaactgacattgtcaaacaggagaagaaggatgaaacacaaaagttgtgtgactctagtctgtgtttgagactcttttcactgcagtggggcagagttgtttag

SEQ ID NO: 3519 - DNA, 600 bp, Homo sapiens; identical to SEQ ID NO: 3518

SEQ ID NO: 3520 - DNA, 600 bp, Homo sapiens
agcgtggagatgaagcagggccgtactttgctgcactgtgctgctggtgtgagccgctcagctgccctgtgcctcgcctacctcatgaagtaccacgccatgtccctgctggacgcccacacgtggaccaagtcatgccggcccatcatccgacccaacagcggcttttgggagcagctcatccactatgagttccaattgtttggcaagaacactgtgcacatggtcagttccccagtgggaatgatccctgacatctatgagaaggaagtccgtttgatgattccactaaagaagttgaagtacctggccttcctccacaagtggatgaacagcaacccttcccgaggcacctaccacttctgggcccccaccacttccgggtccccagccgcatcttctggcggaccccgaggcatgctgccccgcgagaccaaggaagccaggccgcccaagaccgcctcaaggtgtttaacggcatcccaccaccctatgacgaaaaagcagctaatgaggctacagaaacaggccgaaaagaacgtggagaaggaaactgacaaatactggggtgtcctcaagacccatggactcctgctgtga

SEQ ID NO: 3521 - DNA, 600 bp, Homo sapiens; identical to SEQ ID NO: 3520

SEQ ID NO: 3522 - DNA, 600 bp, Homo sapiens
acctcaacttctgccgctccctgcggtttgacgacaagcccgactactcttacctacgtcagctcttccgcaacctcttccaccggcagggcttctcctatgactacgtctttgactggaacatgctgaaattcgtgagtcacctggaggccaaggcgggcttgggggactggatggggaaggccctgactcagagggccagagtgagctggtggcgggaggggctcccgacagacgggagcagggcatgggtggtgctggcggcgccccctgctgccctgattgctgcctacaccgtcctgctgctcctgttctgcacatcccaggtggctacctgcaccatggcccctcgggccagcctggacccagtcatggtgcttgctttcttcttggtcatgggcccctggggtgcagcccggaatcccgaggatgtggaccgggagcggcgagaacacgaacgcgaggagaggatggggcagctacgggggtccgcgacccgagccctgccccctggcccacccacgggggccactgccaaccggctccgcagtgccgccgagcccgtggcttccacgccagcctcccgcatccagccggctg

SEQ ID NO: 3523 - DNA, 600 bp, Homo sapiens
tcccgggaccagctgggccgccagacagacttcggcatgtacgactacttcacacgccagtacggggatgagtccactctggccttccagcaggcccgctacaacttcatccgaagcatggccgcctacagcctcctgctgttcctgctgcagatcaaggacagacacaacggcaacattatgctggacaagaagggtcatatcatccacatcgactttggcttcatgtttgaaagctcgccgggcggcaatctcggctgggaacccgacatcaagctgacggatgagatggtgatgatcatggggggcaagatggaggccacacccttcaagtggttcatggagatgtgtgtccgaggctacctggctgtgcggccctacatggacgcggtcgtctccctggtcactctcatgttggacacgggcctgccctgttttcgcggccagacaatcaagctcttgaagcacaggtttagccccaacatgactgagcgcgaggctgcaaatttcatcatgaaggtcatccagagctgcttcctcagcaacaggagccggacctacgacatgatccagtactatcagaatgacatcccctactga

SEQ ID NO: 3524 - DNA, 600 bp, Homo sapiens; identical to SEQ ID NO: 3523

SEQ ID NO: 3525 - DNA, 600 bp, Homo sapiens
caaagcaagcagcagctggaggaggagcagaagaaagcactgtatggtttggaagctgcggaggacgtggaggagtggcaagtcgtctgtgggaagtttctggccatcaatgccacaaacatgtcctgtgcttgtcgccggagccccaggggcctctccccggctgcccacttgggagacgggtcttctgacctcatcctcatccggaaatgctccaggttcaattttctgagatttctcatcaggcacaccaaccagcaggaccagtttgacttcacttttgttgaagtttatcgcgtcaagaaattccagtttacgtcgaagcacatggaggatgaggacagcgacctcaaggagggggggaagaagcgctttgggcacatttgcagcagccacccctcctgctgctgcaccgtctccaacagctcctggaactgcgacggggaggtcctgcacagccctgccatcgaggtcagggcggtggtgatggcaagaggctgtcgaaaggtcccaggaacaccggccaccccaggcagccgtgcacagggactttcctctgtcaactcatttgacaagtttgggaagtgggattatttttaa

SEQ ID NO: 3526 - DNA, 600 bp, Homo sapiens; identical to SEQ ID NO: 3525

SEQ ID NO: 3527 - DNA, 600 bp, Homo sapiens
aaacagatccaggacctgcccccaactggcctccctgagatgaacctgctggagatgtacagcctgaaggatgagatgggcaacctcaggaagttactagagtctaccccatcgccagtcgtcttctgccacaatgacatccaggaagggaacatcttgctgctctcagagccagaaaatgctgacagcctcatgctggtggacttcgagtacagcagttataactataggggctttgacattgggaaccatttttgtgagtgggtttatgattatactcacgaggaatggcctttctacaaagcaaggcccacagactaccccactcaagaacagcagttgcattttattcgtcattacctggcagaggcaaagaaaggtgagaccctctcccaagaggagcagagaaaactggaagaagatttgctggtagaagtcagtcggtatgctctggcatcccatttcttctggggtctgtggtccatcctccaggcatccatgtccaccatagaatttggttacttggactatgcccagtctcggttccagttctacttccagcagaaggggcagctgaccagtgtccactcctcatcctga

SEQ ID NO: 3528 - DNA, 422 bp, Homo sapiens
gagctgtgcaaaatgggcttgccctggtgaggcctcccgggcaccatggccagagggcggctgccaacgggttctgtgtgttcaacaacgtggccatagcagctgcacatgccaagcagaaacacgggctacacaggatcctcgtcgtggactgggatgtgcaccatggccaggggatccagtatctctttgaggatgaccccagcgtcctttacttctcctggcaccgctatgagcatgggcgcttctggcctttcctgcgagagtcagatgcagacgcagtggggcggggacagggcctcggcttcactgtcaacctgccctggaaccaggggcaaatgcaggccacgccagagtgcttcgcccacctcacacagctgctgcaggtgctggccggcggccgggtctgtgccgtgctggag

SEQ ID NO: 3529 - DNA, 600 bp, Homo sapiens
caaacagtggatatctggtccgtgggctgcatcatggctgagctgctccagggcaaggccctcttcccgggaagcgactgtatccttggcccaggagagcgggctctgggcagcgccccaaagttttgggtctgggggcccaggaggggtctgtggctggcccgtgggtgtttcctgagtgacacagacattgaccagctgaagcgcatcatggaagtggtgggcacacccagccctgaggttctggcaaaaatctcctcagaacacgcccggacatatatccagtccctgccccccatgccccagaaggacctgagcagcatcttccgtggagccaaccccctggccatagacctccttggaaggatgctggtgctggacagtgaccagagggtcagtgcagctgaggcactggcccacgcctacttcagccagtaccacgaccccgaggatgagccagaggccgagccatatgatgagagcgttgaggccaaggagcgcacgctggaggagtggaaggagctcacttaccaggaagtcctcagcttcaagcccccagagccaccgaagccacctggcagcctggagattgagcagtga

SEQ ID NO: 3530 - DNA, 600 bp, Homo sapiens; identical to SEQ ID NO: 3529

SEQ ID NO: 3531 - DNA, 600 bp, Homo sapiens
gactataagctaagaaaacttaaactttcaaagattggacaagggaatatggagagaatggtctggcaataccacttgtggacctggctgtaccacggagtgccctgcgaccccaaaggcatgctgcacttcctggacgaagtgcaccataagcaggagagcatcatggatgcagggctggtcgtggtgccctgcagtgctggcattggccagacagggacgttcattgtgattgatattcttattgacatcatcagagagaaaggtgttgactgcgaaattgacgttcccaaaaccatccagatggtgcggtctcagaggtcagagatggtccagacagaagcacagtaccgatttatctatacggtggtccagcatcatattgaaacactacagcgcaggattgaggaagagcagaaaagcaagaggaaagggcacgaatatacaaatattaagtattctctagtggaccagacgagtggggatcagagccccctcctgccttatactccaatgccaccctgtgcagaaatgagagaagagagtgccagagtctatgaaaacgtgggcctgatgcaacagcagaaacatttaagatga

SEQ ID NO: 3532 - DNA, 504 bp, Homo sapiens
atgcagccagaggagggcacaggctggctgctggagctgctgtccgaggtgcagctgcaacagtacttcctgcggctccgagatgacctcaacgtcacccgcctgtcccactttgagtacgtcaagaatgaggacctggagaagatcggcatgggtcggcctggccagcggcggctgtgggaggctgtgaagaggaggaaggccttgatgaagggcagccgactccctggtgagggtggagacagacagcaccaaatggtcaggccagagaaggggccagggctaaaaatggacaaggagagcaccttccggaagacctcgcccgcccctgggggcccagcaggggaggggcccctgcagagcctcacctgcctcattggggagaaggacctgcgcctcctggagaagctgggtgatggttcctttggcgtggtgcgcaggggcgagtgggacgcgccctcagggaagacggtgagtgtggctgtgaagtgccttaagcccgat

SEQ ID NO: 3533 - DNA, 504 bp, Homo sapiens; identical to SEQ ID NO: 3532

SEQ ID NO: 3534 - DNA, 591 bp, Homo sapiens
atgcactcgctcgaccaccgaaacctcatccgcctctacggggtggtgctcacgccgcccatgaagatggtgacagagctggcacctctgggatcgttgttggaccggctacgtaagcaccagggccacttcctcctggggactctgagccgctacgctgtgcaggtggctgagggcatgggctacctggagtccaagcgctttattcaccgtgacctggctgcccgcaatctgctgttggctacccgcgacctggtcaagatcggggactttgggctgatgcgagcactacctcagaatgacgaccattacgtcatgcaggaacatcgcaaggtgcccttcgcctggtgtgcccccgagagcctgaagacacgcaccttctcccatgccagcgacacctggatgttcggggtgacactgtgggaaatgttcacctacggccaggagccctggatcggcctcaacggcagtcagccccggaggtaccgtggggcccgggcctgccagtcaccacctcctcctccgccggcgcctccgggtcctgagcccctcgccgggtccctctccctcctggggctccttcccgttcag

SEQ ID NO: 3535 - DNA, 591 bp, Homo sapiens; identical to SEQ ID NO: 3534

SEQ ID NO: 3536 - DNA, 600 bp, Homo sapiens
ttgcctagcctgggcctaaaaatgcccatcaagcatggtttttgcaagggaaaatccaagtcttccttcctgtgctcatctccggagctgatagcactctcgagttctgagaccaccaaacatgcaacgaacacagtttatgaaactacctgcactcccatctctaaaaccaaaccagatgatgacctttctagtaaggccaagacagcggccttagaaagcaacctgcctggatcccctaatacttctcgtggctggttaccaaaaagtcctaccaagggagaagactgggaaacactgaagagctgcagccctgcctcttcccctgatttgaccctggaggatgtaatagctgatcccactctctgtttcaattctggggagagcagccttgtggaaattgatggagaatcagaaaatctttctctaacaacctgtgaatataggagagagggcacaagtcaacttgcttctcctttaaaactcaagtacaatcaggggttgtacctccataaaacagtagcacaaaagctatccccttctgctgtctactccaagaaaccaacgctgagaaaactggttccagagtgggatagttag

SEQ ID NO: 3537 - DNA, 600 bp, Homo sapiens; identical to SEQ ID NO: 3536

SEQ ID NO: 3538 - DNA, 600 bp, Homo sapiens
cctcccctggaggacaacctgttcctcccgccccagggtgggggcaagccgcccagctccgcacagaccgcagagatcttccaggcgctacagcaggagtgcatgaggcaactgcaggctccggccggctccccggccccctctcccagcccggggggtgacgacaagccccaggtgcctcctcgggtacccatcccccctcggcccacgcgcccacacgtccagctgtctccagcccccccgggcgaggaggagaccagccagtggcctggacctgcttcccctccccgggtgcctccgcgggagcccctgtcccctcaaggctcgaggacacccagccccctggtaccacctggcagctccccgctgccaccccggctctcaagctcacctgggaagaccatgcccaccacccagagctttgcctcagaccccaagtacgccaccccccaggtgatccaggcccctggcccgcgggctggtccctgcatccttgcccatctgtcctgggattgtgcaagaaggtcagcagcacccactattacttgcttgcccgagcgaccatcctacctggagctgctaccagcgcttcctgcgtga

SEQ ID NO: 3539 - DNA, 600 bp, Homo sapiens
aaggtggaaagagtacagtcccaggaactgagcaaagaaagggtcctcaagaccatcggccggggtagcttcgctaaggtgaagctggcctggcatattctgactgagacccagatagccatgaaggtcatccacaaagctcagcagagctcctccagcctccagagactataccaaatatctactgtgcagtattgccaccagaagaaaattgtccacagggacctgaagccagagaacttccttctggataccaattacaacataaaaacagcagactctggctttggcagcaggttcactgttagccagaatctgggcacattttgtgggagtcccccttatgctgcctcagaaatcttccagggacaaaattatgaccacccttctccctgccccagtggatttgtggagcctgggagaccttctctacaccatggtgacaaggtcttgccatttgtcagactgacctttgtggaactgcaagacgagatatgttacgggaattacaaaatcccattcttcatttcctcagaactagaaagcctcatgaacaaactgcttaccctcaaccccaggaagaggaacacaataggctag

SEQ ID NO: 3540 - DNA, 600 bp, Homo sapiens
atccctgtgagatggacagctccagaggccatcgcctaccgcaagttcacttcagccagcgacgtttggagctatgggatcgtcatgtgggaagtcatgtcatttggagagagaccctattgggatatgtccaaccaagatgtcatcaatgccatcgagcaggactaccggctgcccccacccatggactgtccagctgctctacaccagctcatgctggactgttggcagaaggaccggaacagccggccccggtttgcggagattgtcaacaccctagataagatgatccggaacccggcaagtctcaagactgtggcaaccatcaccgccgtgccttcccagcccctgctcgaccgctccatcccagacttcacggcctttaccaccgtggatgactggctcagcgccatcaaaatggtccagtacagggacagcttcctcactgctggcttcacctccctccagctggtcacccagatgacatcagaagacctcctgagaataggcatcaccttggcaggccatcagaagaagatcctgaacagcattcattctatgagggtccagataagtcagtcaccaacggcaatggcatga

SEQ ID NO: 3541 - DNA, 585 bp, Homo sapiens
atgttcttcgacatcgccgtcgatggtgagcccttgaggtgtgtctcctttgagccttttgcagacaagtttccaaagacagcagaaaactttcatgctctgagcattggagagaaaggatttggttataagggttcctgctttcagataattattccagggtttatgtgtcagggtggtgacttcacacgccataatggcactggtagcaagtccatctacagggagaaatttgatgatgagaacttcatcctaatgcatacaggtcctggcatcttgtccatggcaaaggctggatccaacacaaacagttcccagtttttcatctgcactgccaagactgagtggttggatggcaagcatatggtctttggcaagcttcaggcgctgcttcagatttggcctaaactgcccccccgggaggccctagagcttctggatttcaactatccagaccagtacgttcgagaatatgctgtaggctgcctgcgacagatgaggtatcttctgcagcacaaggaggctgtggctgtctctacaaaaatacggaaagggaacaagcagccaagtaaggtgattgtgtag

SEQ ID NO: 3542 - DNA, 534 bp, Homo sapiens
atgaacccaaactacacagaatttaaattccctcaaattaaggcacatccttggactaaggttattataagaattaaaatgcaaaacttaaaattcctagagggaactcagactcctttccctaccactgtgatagtggacagcaacttgagaaatgctcttagggtcttccgaccccgaactccaccggaggcaattgcactgtgtagccgtctgctggagtatacaccaactgcccgactaacaccactggaagcttgtgcacattcattttttgatgaattacgggacccaaatgtcaaactaccaaatgggcgagacacacctgcactcttcaacttcaccactcaagaactgtcaagtaatccacctctggctaccatccttattcctcctcatgctcggattcaagcagctgcttcaacccccacaaatgccacagcagcgtcaggtactactaatattattcctggtctttgggccagttttacagtgtacattgggaaagctgtgttcatattctgtctagtgtag

SEQ ID NO: 3543 - DNA, 534 bp, Homo sapiens; identical to SEQ ID NO: 3542

SEQ ID NO: 3544 - DNA, 486 bp, Homo sapiens
atgtgtctgcaggtagaatgcacaggagacaaggacggcagcaaggtgacaacagtggtggcaactcctgggcagggtccagacaggccacaagaagtcagctatacagacactaaagtgattggaaatggatcatttggtgtggtatatcaagccaaactttgtgattcaggagaactggtcgccatcaagaaagtattgcaggacaagagatttaagaatcgagagctccagatcatgagaaagctagatcactgtaacatagtccgattgcgttatttcttctactccagtggtgagaagaaattaatctccccaccgctcatagacagttttgctaatggaatggaaaaattccgaaacacttgccccagcaatactcagcccaagaatttgtcaggaggtgaccagtcttcatttgaaagaactgcaaggaaaccagtgcctttaggtgagattcaggttttctctagagcaaaacggtaa

SEQ ID NO: 3545 - DNA, 486 bp, Homo sapiens; identical to SEQ ID NO: 3544

SEQ ID NO: 3546 - DNA, 600 bp, Homo sapiens
gcactagcagacatgtttgacttcctgtccaaagagctggtgagactgcaggaggagaggaggatccatgcctttgtcatgctggctgagcgccagcggcgggtacgagaggctgaagagagtggtcggcgccaggtggaaaaacagcgcctgcgggaggaggacgagatatttaaggaggcaagtaggggcagctgggtggttaaagttcaccatagtactataagctcctacctagaagacataatactgaataccgaagcgaatactgcagaagaacaagccagggcagaaatagagaagatggctgagaaaatcaatgacattgcttatgaaatggaaagccgccgaacctatcttcagtcagaggagattgttgctgagttggtttatagttttctgatcccagaggtgcaaaaatactttgtcaaagaaaaagtgaggaacgcacagcggaaacatattcttgcagcccatcagatcatccacagttacacggaaagcatggttcaaaagaaattaactgagggagagcaagatgaggcctcaaatgctgccatgttacttgagaaagaaactcaaaatgagaacaacagctaa

SEQ ID NO: 3547 - DNA, 600 bp, Homo sapiens; identical to SEQ ID NO: 3546

SEQ ID NO: 3548 - DNA, 600 bp, Homo sapiens
acttttaaaattcagctgcccgaggagggccagaagtcaggacagaagaccaccattcctgccagtgcacctgccggcctgcagaggaagccagccatttccagtgaagtcccccagcatgactccatggcctctccctccagccagagcaccagcagcaactgcaacagctgtgggtgggaggcaggcaagaggccaatgcttccatgtgcccagcacacccagcccagtggcattcagcagaggatggaggtgtccaagttgctgccggggtcagtgaacatgattctagtcaagacggcatctggcaaccctgcggccttcaaaggcctcctatccaaagctacggatgagctgaaggacagcatgacacctcctggagaccagagggcccctctgccccacctggtccagggcaccatctcttcctccgagagagagatgagtatcatgaagactctctatcacccaaatatcattcagttccaccaggtgactgacaaggtggaaaccatgtatgtggtgatggagtacgccagaggaggagagctacagcaccagatatgccaccaaggccacatcgaggaagaggaggcctga

SEQ ID NO: 3549 - DNA, 600 bp, Homo sapiens
gggctgacggaccgggtcgagaccagggcatccccgcggagcgctgctggactgggggaggggggcggtgacgggcgtccggcgccctgccctgccggcgcccaccgcctggggccaacgaagcgtgatcagccgtggaacacccgcctagcgaccccctctggccccgaccccacccgggacccgcgcatccaaaccccctactcgggcctcggtgcccggtcgcccagccggctgtctggggccaccgccccgcccccgccccacccgccgctctgtggtgatgggccagacgcgggggcgccctggccgctcggacgccgcgcagcggggaagagggggcagggcagccgcgcggtgcactgtgcgcgaccccagcagccggcagggcggaggcagtgcccgcccggcagagtgccgccgcccgaggtctctcagtgtacttgttcctattgccttttccttttggctaacttcttctgggctacactatctaacatctggctgttgagtgacattgtgaggaagattgatcagtctgaatttgaaggttttgagtatatcaatcctcttttgatgtctgcagaagaatgtgtctga

SEQ ID NO: 3550 - DNA, 600 bp, Homo sapiens; identical to SEQ ID NO: 3549

SEQ ID NO: 3551 - DNA, 537 bp, Homo sapiens
atgtccccgtgcctcgcccctcacggctgtgcctgggcctgggctggacagtgcctgcccaggtacgtctcccacgctcgcgagccgctggagggcgacggcccgaggcgggacactggaggtggagttattttggaaaaacaaattcgcataccacgttctctgtctgtaaaagctgcaagtgttctgaagagttttcttaataaggaccctaaggaacgattgggttgtcatcctcaaacaggatttgctgatattcagggacacccgttcttccgaaatgttgattgggatatgatggagcaaaaacaggtggtacctccctttaaaccaaatatttctggggaatttggtttggacaactttgattctcagtttactaatgaacctgtccagctcactccagatgacgatcatctttccatcaggccaaagaatccttctcttcctccagagccccgaaccacaaattcttctgaacaacactcattgcctcttctaaaagctactgagctcatttcacttactgttttgtaa

SEQ ID NO: 3552 - DNA, 600 bp, Homo sapiens
gcgtttgagggggcagcttccgaggtggcagtcctttccagggctgagctggaaagggaggagtgtcaggagaggaacagcgagtcttacgagcagcatatccatctagaacaccaccagaggcagcaagtggcctaccagaaatactcagaatttttccacgagaaggtggacccggccattgatgaaggcaagctggtggtgcaggacatcgagcaaagtgtatggatccacagtcacgtgggctccaaggagcacagccacatgctgcagaaggtccaggagcacatcaagagggtttcggatatggtggaggacctctacaggcggaaggcctgggctggcgagccatgttctttggtttctgaagcggaggaggcgatgactcggctggtcaacattctgatcctgtcagtcagggatgcacgagactggttgatgaaaacagagacccgcttaaagaaggaaggtaacactttgggtcctgtggttcttattactgctggctcccggggggaatctgaagtggggcagcccagtgatgtcaatagtggactctcactgtctaggagcatcacctccagtgactcaaattactag

SEQ ID NO: 3553 - DNA, 600 bp, Homo sapiens; identical to SEQ ID NO: 3552

SEQ ID NO: 3554 - DNA, 600 bp, Homo sapiens
cgaagacgcacacaaaggtattttatggaagccaaccggaacaccgtcacatgtcaccatgagctggctgttctatctcacgagacctttgagaaggcaagtttgagtagcagcagcagtggagcagccagcctgaaaagtgaactttcagaaagcgcagacctgccccctgaaggcttccaggcctcctatggtaaagacgaagacagggcctgtgacgaaatcctgtcagatgataacttcaacctggaaaatgctgagaaagatacatattcagaggtagatgatgaattggacatttcggataactccagcagctccagttcaagccctctgaaagaatctacattcaacattttaaagagaagttttagtgcttcaggaggagaaagacaatcccaaacaagggacttcactggaggaacaggatcaagaccaagaccagctttgctgcctcttgacctgcttctgaaagtgccaccccacatgctcagggcccacattaaggaaatagaggctgagttagtgacagggtggcagtcccatagccttcctgctgtgattcttcgaaatctcaaagatcatggtagtacttactag

SEQ ID NO: 3555 - DNA, 600 bp, Homo sapiens
ctgagggcactgtcagaagtacagaaaatgacgccaagagaaaggatgcggctgaggaagctccaggcggctgatgagaaagccaggaagctgaaaaagattgtggaagaaaaatatgaagaaaatagcaaacgaatgcaagaattgagatctcggaactttcagcagctgagtgttgatgtactccatgaaaaaacacatttaaaaggaatggaagaaaaggaggagcaacctgagggaagactttcttgttcaccccaggacgaggatgaagagaggtggcaaggcagggaagaggcaagtttaatcatattcacaagcacaaaagaatctgatgaaccaactttagagaacctgcctgagtctcagcctattccttccatggacctccacgaacttgaatcaattgtagaggatgccacatctgaccttggataccatgggaagtatgtgaagtcgccagcatttataactcaccagagaaggacactgaagtgcaaagaggtaaaagatgaaggagatattgttgtactggacccagccccatctgcaattttttttcagaggtttctcttctatgctgtgacagctttccactaa

SEQ ID NO: 3556 - DNA, 600 bp, Homo sapiens
atcctaatggaaaaggtaagttattcctatcctgtggactggtttgccatgggatgcagcatttatgaaatggttgctggacgaacaccattcaaagattacaaggaaaaggtcagtaaagaggatctgaagcaaagaactctgcaagacgaggtcaaattccagcatgataacttcacagaggaagcaaaagatatttgcaggctcttcttggctaagaaaccagagcaacgcttaggaagcagtgtgggcctgacccttgatatacgctatggtaaagaaaatggaacaccagattcagctgcggacctcgtcagacacgatgagaagccctctgacattgatgagaactgggagattgtggatagactgtgcctgacagtggaggagaagataatcaccaggacagagggtaacactgatgacttgctcattggtggaaatgcctcctctgaaggccccaagcaacacgacgacacgaaatcaatgaaaggcgaacttgaagaagagagatcagaaagagtaaaaccttttatgggcagagaagaggcatctcagagcctcggtctgctctctgattttcttcattgtgcaaaataa

SEQ ID NO: 3557 - DNA, 600 bp, Homo sapiens; identical to SEQ ID NO: 3556

SEQ ID NO: 3558 - DNA, 600 bp, Homo sapiens
tgtaagaaactggacaagaagcggctgaagaagaaaggtggcgagaagatggctctcttggaaaaggaaatcttggagaaggtcagcagccctttcattgtctctctggcctatgcctttgagagcaagacccatctctgccttgtcatgagcctgatgaatgggggagacctcaagttccacatctacaacgtgggcacgcgtggcctggacatgagccgggtgatcttttactcggcccagatagcctgtgggatgctgcacctccatgaactcggcatcgtctatcgggacatgaagcctgagaatgtgcttctggatgacctcggcaactgcaggttatctgacctggggctggccgtggagatgaagggtggcaagcccatcacccagagggccatgtgtgcccacgttgtagatgtggaacttgaggcaggggtgaaggagcgggttctagttagtaaggatgaagaacagctggatattgagcaggaccaagaggtgaatttagtcctgaaaattatttggaatgaatctaaggccttcctgcacgctgtctcatgctctttccactacaccagggggtctacagtgctgtaa

SEQ ID NO: 3559 - DNA, 600 bp, Homo sapiens; identical to SEQ ID NO: 3558

SEQ ID NO: 3560 - DNA, 450 bp, Homo sapiens
atgcaactacaacctgatgcgtctgctgaggagaggactgggcagcttgttgaaggctcgtcaaaagtagcgcttagttatcacaaggcctgcactcaacctcaaaagcctgactttggtttctgtgcccagatcacccctgagcagagcaaacgcagtaccatggtcggaacgccatactggatggcaccagaggtggttacacggaaagcttatggccctaaagtcgacatatggtctctgggtatcatggctattgagatggtagaaggagagcctccatacctcaatgaaaatcccttgaggaagaggctcgcctccagtggccttcactgtggcaaaaaggcagcctggatgaggaagatgagaattccaccccagctgctcagaagacactatgaatctaccgagattgaccttcacgtgtatcagagcctgtacatgaagtga

SEQ ID NO: 3561 - DNA, 450 bp, Homo sapiens; identical to SEQ ID NO: 3560

SEQ ID NO: 3562 - DNA, 336 bp, Homo sapiens
atgggacaaaaggactttttggatagcaagaacaaaaagggaacaaggacacagaatgcgggagtgtacagaacatcttctgggaatggtgagctggaggctgtagctgatgcctggggagaggaccccgcagggatctttgaattggtggaacttgttggaaatggaacatacgggcaagtttataagcctcatctacggcccatcctgattcccactgtgtccatctatggtagcacattgcggggcattcgtgcacactgcacacggtgtctgtttatccgtgctgtgcccttcctcaccccctgttggctagcaaccatactatatccttaa

SEQ ID NO: 3563 - DNA, 600 bp, Homo sapiens
agtgccaaatccaggctagcaggatcaagggagggggtcatagaccccaggatgaagaacaagctgtggtactttgaatttggcacctcggagacttttgcagcgacctgcaagaaactccacgaccacattgagttggagtgtgatggggttggggtggacctgagcaacatcttcctggaaggcattgccattctcaacattcccagcatgtacggaggcaccaatctctggggagaaaacaagaagaaccgggctgtgatccgggaaagcaggaagggtgtcactgaccccaaagaactgaaattctgcgttcaagacctcagtgaccagctccttgaagtggtggggctagaaggagccatggagatggggcagatctacaccggcctgaagagtgcaggcaggaggctggcccagtgcgcctctgtcaccatcaggacaaacaagctgctgccaatgcaagtggatggagaaccctggatgcagccatgttgcacgattaaaattactcacaagaaccaagcgcccatgatgatggggcctccccagaagagcagcttcttctcgttgagaaggaagagccgttcaaaagactaa

SEQ ID NO: 3564 - DNA, 600 bp, Homo sapiens
cggctatgaaaagagtgatggttcctggggacagcgtggtaggcagcagtgttgcagcaacctgtgacaggatcaagcaccccaacattgtagccctggatgacatctatgagagtgggggccacctctacctcatcatgcagctggtgtcgggtggggagctctttgaccgtattgtggaaaaaggcttctacacggagcgggacgccagccgcctcatcttccaggtgctggatgctgtgaaatacctgcatgacctgggcattgtacaccgggatctcaagccagagaatctgctgtactacagcctggatgaagactccaaaatcatgatctccgactttggcctctccaagatggaggacccgggcagtgtgctctccaccgcctgtggaactccgggatacgtggcccctgaagtcctggcccagaagccctacagcaaggctgtggattgctggtccataggtgtcatcgcctacatcttgctctgcggttaccctcccttctatgacgagaatgatgccaaactctttgaacagattttgaaggccgagtacgagtttgactctccttactgggacgacatctctgactctg

SEQ ID NO: 3565 - DNA, 600 bp, Homo sapiens; identical to SEQ ID NO: 3564

SEQ ID NO: 3566 - DNA, 1400 bp, Homo sapiens
gctttgtagtgctggatgatgactacattggggatgaattcatcggccagtacacaattccctttgaatgtttacagacgggctaccgccatgtccccctgcagtccttaactggagaggtccttgcacatgcttctttatttgtccacgtggctattactaaccgaagaggaggaggaaagcctcataaaaggggcctttctgtgagaaaagggaagaaatccagggaatatgcatctttgagaacactgtggattaaaaccgtggatgaggtattcaagaatgcccagccccctatacgggatgccacagatctgagagaaaacatgcagaatgcggtggtgtcattcaaggagctgtgtggcctctcctctgtggccaatctcatgcagtgcatgttggcggtgtctccccgctttctggggcccgataacacacccctagtggtcctaaatctcagcgagcagtaccccacaatggagctgcagggaattgtgccggaggttctgaagaagatcgtaacaacttatgacatgcaacttaaggacttctcagactttgtaacttcattagaaacagctacaacagaagatgcagtagccacatctgtgttgagcaggacaggcaaagaaagcagtttagagatgattcagtccctcaaggcgttgattgaaaatgcagatgctgtatatgaaaagatcgtacattgtcagaaggcaggaacatgctatgctgatgttagtactgggaagaggaagcgtggcaggagaggaatgctgagaagtgaagacctccaaccaagcgtatgtgaagtgcctggtaagttgccttgtgattcccttggttgcgtatctttcgtccttgccctggcgctcgcatgtcacagggagacagtgaaaagtcaagccatggaattccatgaacacttgcacagcataggcaccaaggaaggtttgaaggaaagaaaactacaaaaagcagtggagagctttacctggaatattaccatcttaaagaaacatctctttggatccagcaaaaaccaagggcaggagctgtgcttagagggctctcctttccgctcctgcacagaacccttcatccccctctggcagcttctttgcaccctttggggtggaggtcagggtggagggaaggcggtcttcctgctgtggggagacaagctgatttgcagctcatgttccatgcccatcaaacgtggacaagcagatcttttgaaatatgctaagaatgagacattggagaacctgaaacaaatccattttgctgctgtttcatgtggactgaataaaccaggcaccgaaaatgctgatgtccagaagccacgccggagcttggaagtcatacccgaaaaagcaaacgatgaaactggagaatga

SEQ ID NO: 3567 - DNA, 1400 bp, Homo sapiens; identical to SEQ ID NO: 3566

SEQ ID NO: 3568 - DNA, 600 bp, Homo sapiens
gtggtcacagaacccatagggaatggaggagaggctggagggaagctggggggggccttctcggaggtgatcctggcagaagataagaggacgcagaagctggtggccatcaaatgcattgccaaggaggccctggagggcaaggaaggcagcatggagaatgagattgctgtcctgcacaatgatccttccgagtaccaaacctcactgtctcctgggagccttgaaaaaactggagtcagaagaccaggctacaaggtgtttttggccttgggtgtcagctttagagaaacatttctctcttgcactccccaggctgatgagatcgagaagattttgtgccacaagttcatgcgcttcatgatgatgcgagcagagaacttctttatccttcgaaggaagcctgtggaggggtatgatatcagctttctgatcaccaacttccacacagagcagatgtacaaacacaagttggtggactttgtgatccacttcatggaggagattgacaaggagatcagtgagatgaagctgtcagtcaatgcccgtgcccgcattgtggctgaagagttccttaagaatcatgtttctcaggcttaa

SEQ ID NO: 3569 - DNA, 600 bp, Homo sapiens; identical to SEQ ID NO: 3568

SEQ ID NO: 3570 - DNA, 495 bp, Homo sapiens
atgtctgcgtggaaagggcccaagaacctggagccctttcggttcaagaagagccagcgcctggaaggaggcggccccggccgcccgcagagctccgcctcccaggccgcgctctgtgtctttgtccaggctgggaggggccgatggccgttaaaagccccgcccgccgccgctcaccgccgcctggccccacccccgtatccatggagacccgacgccgccggactgcctgtcagctgcagctcggtagcctggggcccgccccgttcgcccggacggcgagaagtgaaggcagaagaccaccattcctgctcagaactcttcctgggctgggggtaccagtgccctgccatggacatatggggccttggcgtcatactctaccatatggtggccggggccctacccttctattcagggaacacgatggacctcaagaatcaaattttcacaggaagctaccacgcctcaccattttttttcccttcaacttga

SEQ ID NO: 3571 - DNA, 600 bp, Homo sapiens
aatgtgctgctggaccgggatggccacatcaagattgccgactttgggatgtgcaaagagaacatattcggggagagccgggccagcaccttctgcggcacccctgactatatcgcccctgagatcctacagggcctgaagtacacattctctgtggactggtggtctttcggggtccttctgtacgagatgctcattggccagtcccccttccatggtgatgatgaggatgaactcttcgagtccatccgtgtggacacgccacattatccccgctggatcaccaaggagtccaaggacatcctggagaagctctttgaaagggaaccaaccaagaggctgggagtgaccggaaacatcaaaatccaccccttcttcaagaccataaactggactctgctggaaaagcggaggttggagccacctttcaggcccaaagtgaagtcacccagagactacagtaactttgaccaggagttcctgaacgagaaggcgcgcctctcctacagcgacaagaacctcatcgactccatggaccagtctgcattcgctggcttctcctttgtgaaccccaaattcgagcacctcctggaagattga

SEQ ID NO: 3572 - DNA, 600 bp, Homo sapiens; identical to SEQ ID NO: 3571

SEQ ID NO: 3573 - DNA, 600 bp, Homo sapiens
aaaacatgcccttcagtgaggaaagcgtctctgagtgtagcagggccaggaaaaccccaggaagaagaccagcccttgcctgcccgacggctctcctctgactgcagcgtcactcaggaaaggaaacagattcattgtctgtctgaggatgagttaagttcttctacaagttcaactgataagtcagatggggattacggggaagggaaaggtcagacaaatgaaattaatgccttggtacaattgatgactcagaccctgaaactggattctaaagagagctgtgaagatgtcccggtagcaaacccagtgtcagaattcaaacttcatcggaaatatcgggacacactgatacttcatgggaaggttgcagaagaggcagaggaaatccattttaaagagctaccttcagctattatgccaggttctgaaaagatcaggagactagttgaagtcttgagaactgatgtaattcgtggcctgggagttcagcttttagagcaggtgtatgatcttttggaggaggaggatgaatttgatagagagaccacacagtacatcagcaaccatccttgttgccccactaaggaatcactttag

SEQ ID NO: 3574 - DNA, 600 bp, Homo sapiens; identical to SEQ ID NO: 3573

SEQ ID NO: 3575 - DNA, 600 bp, Homo sapiens
gagcacttctgcagttgcctgagggaaggcatgaggatgagagctgctgagtactccactcctgaaatctatcagatcatgctggactgcaggcacaaagacccaaaagaaaggccaagatttgcagaacttgtggaaaaactagaaaatagtgggtttacatactcaactcctgccttctctgaggacttcttcaaggaaggtatttcagctcccaagtttagttcaggaagctctgatgatgtcagatacgtaaatgctttcaagttcatgagcctggaaagaatcaaaacctttgaagaacttttgccaaatgccacctccatgtttgatgactaccagggggacagcagcgctctgctggcctctcccatgctgaagcgcttcaccaggactgacagcaaacccaaggcctcgctcaagattgacttgagactaactagcaaaagtaagaagtcggggctttctgatgtcagcaggcccagtttctgccattccaacagtgggcacatcagcaaaggcaagggcaggttcacctacgacaacgccgagctggaaaggaagacggcgtgctgctccccgcccctctgggagttgtag

SEQ ID NO: 3576 - DNA, 600 bp, Homo sapiens; identical to SEQ ID NO: 3575

SEQ ID NO: 3577 - DNA, 600 bp, Homo sapiens
gtcatgctgccagacaaccagagcttggcagaagatgagtttgtgtactggccaagtcgagaagaatccatgaactgtgaggcctttaccgtcacccttatcagcaaagacagactgtgcctctctaatgaagaacaaattatcatccatgactttatccttgaagctacacaggatgactatgtcttagaagttcggcactttcagtgtcccaaatggcctaacccagatgcccccataagtagtacctttgaacttatcaacgtcatcaaggaagaggccttaacaagggatggtcccaccattgttcatgatgagtatggagcagtttcagcaggaatgttatgtgcccttaccaccctgtcccagcaactggagaatgaaaatgctgtggatgttttccaggttgcaaaaatgatcaatcttatgaggcctggagtattcacagacattgaacaataccagttcatctataaagcaatgcttagcttggtcagcactaaagaaaatggaaatggtcccatgacagtagacaaaaatggtgctgttcttattgcagatgaatcagaccctgctgagagcatggagtccctagtgtga

SEQ ID NO: 3578 - DNA, 600 bp, Homo sapiens; identical to SEQ ID NO: 3577

SEQ ID NO: 3579 - DNA, 600 bp, Homo sapiens
ggcacgagacggtacatggctcctgaggtgctcgagggagccatcaacttccagagagatgccttcctgcgcattgacatgtatgccatggggttggtgctgtgggagcttgtgtctcgctgcaaggctgcagacggacccgtggatgagtacatgctgccctttgaggaagagattggccagcacccttcgttggaggagctgcaggaggtggtggtgcacaagaagatgaggcccaccattaaagatcactggttgaaacacccgaggttcaatgaacctttcctagggctgtggagtgaggccagtaagctcagaaagatgactgccatgaaggcaggcatgctgattcctgaagtttcccccaggcctctgctggtggacctgctgctgtggttggggctgggcctggcccagctttgtgtgaccatcgaggattgctgggaccatgatgcagaggctcgcttgtccgcgggctgtgtggaggagcgggtgtccctgattcggaggtcggtcaatggcactacctcggactgtctcgtttccctggtgacctctgtcaccaatgtggacctgccccctaaagagtcaagcatctaa

SEQ ID NO: 3580 - DNA, 600 bp, Homo sapiens; identical to SEQ ID NO: 3579

SEQ ID NO: 3581 - DNA, 600 bp, Homo sapiens
cgtgcccttcgactgctccaagaatcagagaattggcagggcagggctttggctcaccaggaggcctccactgctgaccgaaccacacctcccctcaggaaacggctttgtccgcacaacgtggggcacctgagcagaatctacccggctggatggagaacagactcctccaactacagccccgtggagatgtggaatggggggctgccagatctggccctgaatttccagacacctgggccagagatggacgtgtaccagggccgcttccaggacaacggggcctgtgggtacgtgctgaagcccgccttcctgcgagaccccaacggcacctttaacccccgcgccctggctcaggggcctggtttcaacccatggtgggacacggagtttgcgtttgaggtagttgtgcctgaccttgccctcatccgcttcttggtggaagattatgatgcctcctccaagaatgacttcattggccagagtaccatccccttgaacagcctcaagcaaggataccgccatgtccacctcatgtctaagaacggggaccagcatcratcagccaccctctttgtgaagatctccctccaggactag

SEQ ID NO: 3582 - DNA, 600 bp, Homo sapiens; identical to SEQ ID NO: 3581

SEQ ID NO: 3583 - DNA, 600 bp, Homo sapiens
agttgtttaccagccacagctgggtttagctacggtaaagtgtgcacacatgctgaaaacatgcacaaagttcaatttgaaccactttctagcaaatgtggtatttgtaaatctgtgagaatacaaaagtgggagatagatccatctgagttggcttttataaaggagattggaagcggtcagtttggagtggtccatttaggtgaatggcggtcacatatccaggtagctatcaaggccatcaatgaaggctccatgtctgaagaggatttcattgaagaggccaaagtgatgatgtacgcggcaaggaattgtttggtcagttcaacatgcatagtaaaaatttcagactttggaatgacaaggtacgttttggatgatgagtatgtcagttcttttggagccaagttcccaatcaagtggtcccctcctgaagtttttcttttcaataagtacagcagtaaatctgatgtctggtcatttgccatgaagaggggtgtctttccgctgaccctactgtcaatgacccctaaacctgaaggccgccctacatttgccgagctgctgcgggctgtcacagagattgcggaaacctggtga

SEQ ID NO: 3584 - DNA, 600 bp, Homo sapiens; identical to SEQ ID NO: 3583

SEQ ID NO: 3585 - DNA, 357 bp, Homo sapiens
tctgacggtgtcatgtttggacatgaacctcatgaaggaggtgaagaagtcgttcctactgacattgtattggaactgcttcctgcccatggcatcctccttttcttttcattcttacccctcttgctgcatgatcctgcgtgctgctgctgctgctcccagcatgccaacccggagactgaagtgtcagaagttgcaagttcatcagcatctgcacaaaggtggacatgttcagtggaggatcccatcaaagactgtggagacacaggtgatggcaactccctggaagccacagcagctgggagcccagtgaacatctcccaggctggcaaagcaaaaagtgaaggcactgcttag

SEQ ID NO: 3586 - DNA, 600 bp, Homo sapiens
attgccacacaaggctgcctacaaaacacagtgaacgacttttggcggatggttttccaaaactccagactgattgtcatgacaatgaaagaagcggagagaggaaagagtaaatgtgtcaaatactggcctgatgagtatgctctaaaagaatatggcgtcatgcgtgttaggaacaaggtgcaccataagcaggagagcatcatggatgcagggccggtcttggtgcactgcagtgctggaattggccggacagggacgttcattgtgattgatattcttattgacatcatcagagagaagatggtgtggtctacgaggtcagggatggtccagacagaagcacggtaccgatttatctatatggcggtccagcattatattgaaacactacagcgcaggattgaacaaaagcagaaaagcaagaggaaagggcatgaatatataaatattaagtatcctctagcggaccagacgagtggaaatcagagccccctcccgccttgtactccaaagccaccctgtgcagaaatgagaggagacagtgctagagtctatgaaaacgtgggcctgatccaacagcagaaaactttcagatga

SEQ ID NO: 3587 - DNA, 600 bp, Homo sapiens; identical to SEQ ID NO: 3586

SEQ ID NO: 3588 - DNA, 600 bp, Homo sapiens
cgacagatgaccgcacagcactatgtgacagaatttaacaagagactctatgaacaaaacattcccacccagatattctacatcccatccacaatactactgattttagaggacaagacaataaagggatgtatcagtgtggagccttacatactgggagaatttgtaaaattgtcaaataacacgaaagtggtgaaaacagaatacaaagccacagaatatggcttggcctatggccatttttcttatgagttttctaatcatagagatgttgtggtcgatttacaaggttgggtaaccggtaatggaaaaggactcatctacctcacagatccccagattcactccgttgatcagaaagttttcactaccaattttggaaagagaggaattttttacttctttaataaccagcatgtggaatgtaatgaaatctgccatcgtctttctttgactagaccttcaatggagaaaccatatgccaagagaaggccagactttgtcatcaataacttaaaaattagattgagatacagctccagacgcgttaagcgcattggtcctttggcatttgtcaactgctttacctccttgtgctaa

SEQ ID NO: 3589 - DNA, 600 bp, Homo sapiens
agcagcttaagatggtgccttcgtgaaggcttttgttctttctccagctgcatttccaaagatgagtttgtatcatggaggagatccctgtgcctggggaagcagtcccggcccccacccctccggaatctcccaccccccaccctcctcccgctgccccgggtggtgagcgggcaggaacctggcgccgccaccgagactgagcctcctgcagacgggcgaagccgcctgctgcagcccaggaagccagccctctgctcggcctcgccggcctccctgctgcaggcctccctctcttcaccgcctgcgcctgagttcgcgggtcctccgcaggccgcctgggaaccggagcctggcgtgccggagcctggcctggtgctctgggctctgccttctggttcctggaggcatcaaaggctgcatccgttctgccaacagctgttcggagagactcgttccagatcatcccgtcattttcagtttgttggacattttacagcttcaccaggagaatgtgcaactttattccagcattcgatgcatttttatagaaacactttggaaacactttggatgaaccaaggccttttccttatttaa

SEQ ID NO: 3590 - DNA, 600 bp, Homo sapiens; identical to SEQ ID NO: 3589

SEQ ID NO: 3591 - DNA, 272 bp, Homo sapiens
aattccagccagagatgaagagacacagtctagaggtcctgatgggagctctggctcagaatggctcagagtccattattcaccacccaccagcatccggatccccagatcccctctctgagtccataaccaggctcaggaggcagcagggacagggcagccagctcttggacaccgacagccgagggggaggccaggcccaaagcaagctccaggacgggtgcaacaacaacctcctcacccacacctgcacccgtggctgcagcagctga

SEQ ID NO: 3592 - DNA, 600 bp, Homo sapiens
gcacagcagcagacagctgagggtgcaagccccgagaaatgcgagccatggctcttcatggctgaaggaattggtcacctaacactgacacggtctggaagaattattttgaaggtggcacgaatggatactcctgaaacaggtatggaagtgaatctctgcaaggctgaaaagcttggaaattcacaaggttacaacgtgaatgtgaattgcaaggctgaaaagcttggaaattcacaagacacagtgctgagggaacccctgcatgtcgccttcatctgcaaggaaataggagccctggttccaccattgcgctcaacagaaggaaacagagtaggagagactgctaagtcaggaaatggggtatgcagggtctggaagttggaagctggccgcatcccccaaatgagcaggtccaagacacttattcatacatcaggaaaaccagggtccagagatgcccggcccagttttgacccagcccagaatgaacacgctccttacttgcttcccaaactctcatcaacatctgacaacaacaacagcaagaggagggcccagaggatctgctgcatgctgcgggcgtcgccaagttcttaa

SEQ ID NO: 3593 - DNA, 600 bp, Homo sapiens; identical to SEQ ID NO: 3592

SEQ ID NO: 3594 - DNA, 600 bp, Homo sapiens
attcagggacattctccattcaaaaaatacaaagagaaagtcaaatgggaggaggtcgatcaaagaatcaagaatgataccgaggagtattctgagaagttttcagaggatgccaaatctatctgcaggatgttactcaccaagaatccaagcaagcggctgggctgcaggggcgagggagcggctggggtgaagcagcaccccgtgttcaaggacatcaacttcaggaggctggaggcaaacatgctggagccccctttctgtcctgatcctcatgccgtttactgtaaggacgtcctggatatcgagcagttctcggcggtgaaagggatctacctggacaccgcagatgaagacttctatgctcggtttgctaccgggtgtgtctccatcccctggcagaatgagatgatcgaatctgggtgtttcaaagacatcaacaaaagtgaaagtgaggaagctttgccattagatctagacaagaacatacataccccggtttccagaccaaacagaggcttcttctatagactcttcagaagagggggctgcctgaccatggtccccagtgagaaggaagtggaacccaagcaatgctga

SEQ ID NO: 3595 - DNA, 600 bp, Homo sapiens; identical to SEQ ID NO: 3594

SEQ ID NO: 3596 - DNA, 600 bp, Homo sapiens
cttcaggacctgtgttcaggaacagaggaagctcgcctccctttgaaatggatggccccagaaacaatttttgacagagtgtacacaatccagagtgacgtctggtcttttggtgttttgctgtgggaaatattttccttaggtgcttctccatatcctggggtaaagattgatgaagaattttgtaggcgattgaaagaaggaactagaatgagggcccctgattatactacaccagaaatgtaccagaccatgctggactgctggcacggggagcccagtcagagacccacgttttcagagttggtggaacatttgggaaatctcttgcaagctaatgctcagcaggatggcaaagactacattgttcttccgatatcagagactttgagcatggaagaggattctggactctctctgcctacctcacctgtttcctgtatggaggaggaggaagtatgtgaccccaaattccattatgacaacacagcaggaatcagtcagtatctgcagaacagtaagcgaaagagccggcctgtgagtgtaaaaacatttgaagatatcccgttagaagaaccagaagtaaaagtaatcccagat

SEQ ID NO: 3597 - DNA, 600 bp, Homo sapiens; identical to SEQ ID NO: 3596

SEQ ID NO: 3598 - DNA, 600 bp, Homo sapiens
ggggcattcgtcagagctgtggaaagaggaccctcaggcaggtacatcgagtacatgtgtgacatggtggcggaggagcccatcacaccccacagcaagcccatcctggtgagggccgtggtcatgacacccgtgccgctgttcagcaagcagaggagcggctgcaggcccttctgcgaggtctacgtgggggacgagcgtgtggccagcacctcccaggagtacgacaagatgcgggactttaagattgaagatggcaaagcggtgattcccctgggcgtcacggtgcaaggagacgtgctcatcgtcatctatcacgcccggtccactctgggcggccggctgcaggccaagatggcatccatgaagatgttccagattcagttccacacggggtttgtgcctcggaacgccaccactgtgaaatttgccaagtacgttggtaccgcttgtgctcggtggggagggacaggtgccctgtgccgcagcacctgcatgtgggccggtcgtgggagccccagggggagtggcgggctgtgtgactgctgcttggtggctctgggcctgttcctgggccatcctggagctgcgcgtgtgtag

SEQ ID NO: 3599 - DNA, 600 bp, Homo sapiens; identical to SEQ ID NO: 3598

SEQ ID NO: 3600 - DNA, 600 bp, Homo sapiens
aactactgtggcattggcatcgacgcggagctgagcctggacttccaccaggcacgggaagaggagcctggcaagttcacaagcaggctgcacaacaagggtgtgtacgtgcgggtggggctgcagaagatcagtcactctcggagcctgcacaagcagatccggctgcaggtggagcggcaggaggtggagctgcccagtattgaaggcctcatcttcatcaacatccccagctggggctcgggggccgacctgtggggctccgacagcgacaccaggtttgagaagccacgcatggacgacgggctgctggaggttgtgggcgtgacgggcgtcgtgcacatgggccaggtccagggtgggctgcgctccggaatccggattgcccagggttcctacttccgagtcacgctcctcaaggccaccccggtgcaggtggacggggagccctgggtccaggccccggggcacatgatcatctcagctgctggccctaaggtgcacatgctgaggaaggccaagcagaagccgaggagggccgggaccaccagggatgcccgggcggatgctgcgcctgcccctgagagcgatcctaggtag

SEQ ID NO: 3601 - DNA, 600 bp, Homo sapiens; identical to SEQ ID NO: 3600

SEQ ID NO: 3602 - DNA, 555 bp, Homo sapiens
atgaagaaattgcaacccacagtaagaaactatgtggagaatcggcccaagtatgcgggactcaccttccccaaactcttcccagattccctcttcccagcggactccgagcacaataaactcaaagccagccaagccagggacttgttgtcaaagatgctagtgattgacccagcaaaaagaatatcagtggacgacgccttacagcatccctacatcaacgtctggtatgacccagccgaagtggaggcggtaaatctgaagtgggaacttagagataattatagagtggttttgtcctgcagttcagcaaacatcagcattcagagtagcaacttttcaactttgagcagctataggaccagcaaccatgatgaagtgaatggaatagagctagatgggatcagaagaaagagagaagggaatcagaagcctgtggtcaaagtagaacaggttccagagcttgatctgggcattccagagagacagctgatgcagatatgtaggccaagcagtcaagaccagctgggtagtcaggagagacatgtggtctaa

SEQ ID NO: 3603 - DNA, 555 bp, Homo sapiens; identical to SEQ ID NO: 3602

SEQ ID NO: 3604 - DNA, 600 bp, Homo sapiens
agcttcattaagataccagttgggaaagaagagttcgtttacattgcctgccaaggaccactgcctacaactgttggagacttctggcagatgatttgggagcaaaaatccacagtgatagccatgatgactcaagaagtagaaggagaaaaaatcaaatgccagcgctattggcccaacatcctaggcaaaacaacaatggtcagcaacagacttcgactggctcttgtgagaatgcagcagctgaagggctttgtggtgagggcaatgacccttgaagatattcagaccagagaggtgcgccatatttctcatctgaatttcactgcctggccagaccatgatacaccttctcaaccagatgatctgcttacttttatctcctacatgagacacatccacagatcaggcccaatcattacgcactgcagtgctggcattggacgttcagggaccctgatttgcatagatgtggttctgggattaatcagtcaggatcttgatgatcaatatattttctgctatcaagtcatcctttatgtcctgacacgtcttcaagcagaagaagagcaaaaacagcagcctcagcttctgaagtga

SEQ ID NO: 3605 - DNA, 600 bp, Homo sapiens
ctccccgtaccccggcatccctgtggaggagctcttcaagctgctgaaggagggccaccgcatggacaagcccgccaactgcacacacgacctgtacatgatcatgcgggagtgctggcatgccgcgccctgcccagaggcccaccttcaagcagctggctggaggacctggaccgtgtcttaccgtgacgtccaccgactgctgaggtgtggggcgggccttctggggcacagcctgggcacagaggtggctgtgcgaagaggggctcggtggcacagcgctcaccccgcctcccgccagcaggagtacctggacctgtcggcgcctttcgagcagtactccccgggtggccaggacacccccagctccagctcctcaggggacgactccgtgtgcccacgacctgctgccccggcccacccagcagtgggggctcgcggacgtgaagggccactggtccccaacaatgtgaggggtcctagcagccaccctgctgctggtgcagaggtaccctgggtgtccccgctgctgtgcaacggtctcctgactggtgctgcagcaccgaggggcctttgttctggggggacccagtgcagaat

SEQ ID NO: 3606 - DNA, 600 bp, Homo sapiens; identical to SEQ ID NO: 3605

SEQ ID NO: 3607 - DNA, 600 bp, Homo sapiens
cacctgcatccaatcagcatcacctgcacccaatcagcagcacctgcacccagtcaaccagcaccacctgcacccaatcagcatcacctgcacacagccagcatcacctgcacccaatcagccaacatcacctgcacccaatcagccaacatcgcctgcacccagtcatctagcatcacctgcacccagtcatccagcatcacctgcacccaatcggccagcatcacttgcatccagtcagccagcatcacctgcacccaatcagcatcacctgcacccaatcagctaacacctgcacccaatcagccagcatcacctgcacccaatcagccagcatcacctgcacccaatcagcatcacctgcacccaatcagccaacatcacctgcacccattacatcatgctgatgacagcttcctggtcctcaccacagatggaattaacttcatggtgaatagtcaagagatttgtgactttgtcaatcagtgccatgatcccaacgaagcagcccatgcggtgactgaacaggtgacccagagcttctgcctgaaaagtcccaaggagaaggaaggaaaggacagtccaggcattgtgttttag

SEQ ID NO: 3608 - DNA, 600 bp, Homo sapiens
aggcatgaaaacattttgggtttcattgctgcagatatcaaagggacagggtcctggacccagttgtacctaatcacagactatcatgaaaatggttccctttatgattatctgaagtccaccaccctagacgctaaatcaatgctgaagttagcctactcttctgtcagtggcttatgtcatttacacacagaaatctttagtactcaaggcaaaccagcaattgcccatcgagatctgaaaagtaaaaacattctggtgaagaaaaatggaacttgctgtattgctgacctgggcctggctgttaaatttattagaactcacaggcatactgacagtaaatctcagctgaggaaaaaaggttattttgttggcattggtcattttaagctagttgggccacaactgtcacgacattctgcagagattcccaacctgggattccagaagatctctggacaggtcccttcagtaggcaagcgtctgagtagacagcaggctgatgaagagctgctaataattggtgggcttgctgtgccagtacacttgcggagtacctgttggtttgtcctgctgatgccccccaaccatgctaaatag

SEQ ID NO: 3609 - DNA, 600 bp, Homo sapiens; identical to SEQ ID NO: 3608

SEQ ID NO: 3610 - DNA, 600 bp, Homo sapiens
atcaacctgttttgttggactcctaaaagtgctacttacagacagcatgctcaacctccaaagccatcttctgacagcagtggaggcagaagttcggcaccttatttctctgctgagtgtccagatcctccaaagacagatctgtcaagagaatccatcccattaaatgacctgaagtcagaagtatcaccacggatttcagcagaggacctgattgacttgtgtgagctcacagtgacaggccacttcaaaacacccagcaagaaaacaaagtccagtaaaccaaagctcctggtggttgacatccggaatagtgaagactttattcgtggtcacatttcaggaagcatcaacattccattcagtgctgccttcactgcagaaggggagcttacccagggcccttacactgctatgctccagaacttcaaagggaaggtcattgtcatcgtggggcatgtggcaaaacacacagctgagttgttaaccagtcgggagctctggcaagctataggagagaatggggacagaatatttctcctgctgtgcccttccctccagaattatgtcaggttggcttgtccctctgttgaagggtaa

SEQ ID NO: 3611 - DNA, 600 bp, Homo sapiens; identical to SEQ ID NO: 3610

SEQ ID NO: 3612 - DNA, 600 bp, Homo sapiens
tcagacatggttagcagagctgctgagatgctgaaagcccactgcctgtatgagatggtgctagatggcatccagtatctgcatgcactgggcatcacaaaccaagacctcaagcctcacaatctgctctaccaccatccaggcactgactccaagatcatcatcactgacttcaatctgtgcctgcaagaacagcaacaactacaacggcctgatgaagaccacctatggcacaccagcataccgtgccccagaggttttggcctgcaagtactacaccattcagtgcacgtgtgggtcccaggcatcatcgtctacatcctgctgagtagcactatgccctttggggacaacaatcatgcctcagagacaagtatagttactcgaatgagccctggctacccagatttcactgactgcctgctgacagcggaccctggagctcatatgactacactgcaggccctgagacacttgtgggtggtaaacacggcagcctcttcatccacgaagaatctgcaccagttcatctcccaaaacctcctcaaatgtgcctcctcacactgccagagcaccaaatatgcccagtccacgtgttaa

SEQ ID NO: 3613 - DNA, 600 bp, Homo sapiens
tctcatcaactctgtgcaattgtccaaaacgctgatgactgttcagcttctcagatctccaccctcctcagagcaaatccttggcgaaaaagtggttccaagtgtctgcctcacatctctgggcttctctgccgtccaggagagtgcatttgaagcagataatggaaaacccattgctgaaggagctgaattgcagagaaactgtgcactgcaggaacctactgagaagagcaccctgagaatgaaatgcccattcttccttcacagttcctctactgccctctattggctaccagagcagttacagagaaagaggctttggaaagtccttgataatcgttctcagcacagaaggagaccagctcttaatatcaaccttgccctattgagaaaggaatttacccttaagagaattttggatggtcgtttatcctttgacctgttttcatctgggttagaaaagccattactttacagcctgaacaaggcttttcttgttagatggaaggccgctttggagattgttcagtctcgggtactcaattggttgactgcagcagctgccagagttgaacagaaagctgacgattgtgaagccag

SEQ ID NO: 3614 - DNA, 600 bp, Homo sapiens
gacctgcttcacttctccagccaagtagcccagggcatggccttcctcgcttccaagaattgcatccaccgggacgtggcagcgcgtaacgtgctgttgaccaatggtcatgtggccaagattggggacttcgggctggctagggacatcatgaatgactccaactacattgtcaagggcaatgcccgcctgcctgtgaagtggatggccccagagagcatctttgactgtgtctacacggttcagagcgacgtctggtcctatggcatcctcctctgggagatcttctcacttgggctgaatccctaccctggcatcctggtgaacagcaagttctataaactggtgaaggatggataccaaatggcccagcctgcatttgccccaaagaatatatacagcatcatgcaggcctgctgggccttggagcccacccacagacccaccttccagcagatctgctccttccttcaggagcaggcccaagaggacaggagagagcggctggaggaggagagctctagtgagcacctgacctgctgcgagcaaggggatatcgcccagcccttgctgcagcccaacaactatcagttctgctga

SEQ ID NO: 3615 - DNA, 600 bp, Homo sapiens
gaaggccttgaggagatcaatgcattcctcacagatcaccataaggaggtagtgttcttggacttcaaccacttttatgggatgcagaaatatcaccatgaaaaactggtccaaatgctgaaagacatctatggaaataaaatgtgcccagcgatttttgcccaggaagttagtttaaagtacctgtgggagaaggactatcaagtgctggtcttctaccatagtccagtggctctggaagtgccctttctctggcctgggcagatgatgccagcaccctgggccaacaccacagaccccgagaaactgatccagtttcttcaagcatccatcactgagagaagaaagaagggatcgttttttatatctcaggtggtgctgacccccaaagctagcactgtggtcaaaggggtggcaagtggcctcagagaaacaatcacagaaagagctcttcctgccatgatgcagtgggtccgcacgcagaagccaggagagagtggcatcaatattgtcactgccgattttgtagaacttggtgactttatcagcactgtcataaagctcaactatgtctttgatgaaggagaagccaacacttga

SEQ ID NO: 3616 - DNA, 600 bp, Homo sapiens; identical to SEQ ID NO: 3615

SEQ ID NO: 3617 - DNA, 600 bp, Homo sapiens
gatatcagggaacatgaatggtttaaacaggaccttccaaaatatctctttcctgaggatccatcatatagttcaaccatgattgatgatgaagccttaaaagaaaaatccaaacaccaaggtgtaaggaaagcaaaatggcatttaggaattagaagtcaaagtcgaccaaatgatattatggcagaagtatgtagagcaatcaaacaattggattatgaatggaaggttgtaaacccatattatttgcgtgtacgaaggaagaatcctgtgacaagcacttactccaaaatgagtctacagttataccaagtggatagtagaacttatctactggatttccgtagtattgatgatgaaattacagaagccaaatcagggactgctactccacagagatcgggatcagttagcaactatcgatcttgccaaaggagtgattcagatgctgaggctcaaggaaaatcctcagaagtttctcttacctcatctgtgacctcacttgactcttctcctgttgacctaactccaagacctggaagtcacacaatagaattttttgagatgtgtgcaaatctaattaaaattcttgcacaataa

SEQ ID NO: 3618 - DNA, 600 bp, Homo sapiens; identical to SEQ ID NO: 3617

SEQ ID NO: 3619 - DNA, 600 bp, Homo sapiens
tctgagcgagacaaaataaaaacaagtcaagccagagatctgttatcaaaaatgttagtgattgatcctgacaagcggatctctgtagacgaagctctgcgtcacccatacatcactgtttggtatgaccccgccgaagcagaagccagtggctacatatgggtagcaagttctccatttgggggctcccagttacagaaaggccaagtgttgtctgagacctgggtcgcttgctcttttgctgctggagccccagctcagagtacctcgggaatgaacttccgctttggtgctaccagtctccattttgcaaatgctgctccaccacctcaaatttatgatgcccagttggaagaaagagaacatgcaattgaagaatggaaagagctaatttacaaagaagtcatggattgggaagaaagaagcaagaatggtgttgtaaaagatcagccttcagatgcagcagtaagtagcaacgccactccttctcagtcttcatcgatcaatgacatttcatccatgtccactgagcagacgctggcctcagacacagacagcagtcttgatgcctcgacgggaccccttgaaggctgtcgatga

SEQ ID NO: 3620 - DNA, 600 bp, Homo sapiens; identical to SEQ ID NO: 3619

SEQ ID NO: 3621 - DNA, 480 bp, Homo sapiens
atgatgcatgtcttcattctgcagacacttcccaagtgtctgctcgcgccaggcgtgcttctgagtgctgagagctcacacagagtcagcactggggagggaagagaggatttgaagcctagcaacattgttgtgaaatcagactgcaccctgaagatccttgactttggcctggcccggacagcgtgcactaacttcatgatgaccccttacgtggtgacacggtactaccgggcgcccgaagtcatcctgggtatgggctacaaagagaacgtggacatctggtctgtcgggtgcatcatggcagaaatggtcctccataaagtcctgttcccgggaagagactgtatccttcacaggggacccgttgatatctggtcagtgggttgcatcatgggagagctggtgaaaggttgtgtgatattccaaggcactgaccgtatccttccccgcgaccttggccccgccatgctttcttaa

SEQ ID NO: 3622 - DNA, 480 bp, Homo sapiens; identical to SEQ ID NO: 3621

SEQ ID NO: 3623 - DNA, 486 bp, Homo sapiens
atggtggctgcatggcaggtcttaaggaagctgcaagaagagtgtctgcaaatcatgtggaggagatgccagacaacaataattgctgcatttgatacagttcttgggataaatgttgcagtcaagaaactaagccgtccttttcagaaccaaactcatgcaaagagagcttatcgtgaacttgtcctcttaaaatgtgtcaatcataaaaatataattagtttgttaaatgtgtttacaccacaaaaaactctagaagaatttcaagatgtgtatttggttatggaattaatggatgctaacttatgtcaggttattcacatggagctggatcatgaaagaatgtcctaccttctttaccagatgctttgtggtattaaacatctgcattcagctggtataattcatagagctagaccagctgctgtggacacagccaggtactgcgctctcagtcagatactgcgcaagaatacattgttttaa

SEQ ID NO: 3624 - DNA, 486 bp, Homo sapiens; identical to SEQ ID NO: 3623

SEQ ID NO: 3625 - DNA, 402 bp, Homo sapiens
atgagcgacagtaaatgtgacagtcagttttatagtgtgcaagtggcagactcaaccttcactgtcctaaaacgttaccagcagctgaaaccaattggctctggggcccaagggattgtttggcgccatcattgcagtgccttgccattcattggcaggatgaggccagtcagtgtcattgtcactccatggattaaccaggaagggatgctgtgtgaggggttgggctggccatctcttccttggtgtctcacttcaactgtgtgtccagcccagaacgtcagaatcgttagtctgaccctgaacgttagtctcttgcatggtaagacggtcagccgccgcagcatcacgggccagctcaagctgtacaaatttgtagaaacgctctggcaaagagtttga

SEQ ID NO: 3626 - DNA, 402 bp, Homo sapiens; identical to SEQ ID NO: 3625

SEQ ID NO: 3627 - DNA, 600 bp, Homo sapiens
aggcctggattgaaatgtccctggtttctattgatctggaagggactcctcctctaggattgctgaaacagggcaccccgcaggcgacagctccgcaggcagctcctgtgaagggaggagaggagccatctccaccctcctggaaagtgaacagtctgaggagccgcgagtactgggactacgaggctcacgtcccgagctggggtaatcaagatgattaccaactggttcgaaaacttggtcggggaaaatatagtgaagtatttgaggccattaatatcaccaacaatgagagagtggttgtaaaaatcctgaagccagtgaagaaaaagaagataaaacgagaggttaagattctggagaaccttcgtggtggaacaaatatcattaagctgattgacactgtaaaggaccccgtgcaactctaccagatcctgacagactttgatatccggttttatatgtatgaactacttaaagctctggattactgccacagcaagggaatcatgcacagggatgtgaaacctcacaatgtcatgatagatcaccaacagaaaaaggggcattctctggttggaggacagagtgggtcacacg

SEQ ID NO: 3628 - DNA, 600 bp, Homo sapiens; identical to SEQ ID NO: 3627

SEQ ID NO: 3629 - DNA, 600 bp, Homo sapiens
atgaagcctgacaatattttacttgacgaacatgggcacgtgcacatcacagatttcaacattgctgcgatgctgcccagggagacacagattaccaccatggctggcaccaagccttacatggcacctgagatgttcagctccagaaaaggagcaggctattcctttgctgttgactggtggtccctgggagtgacggcatatgaactgctgagaggccggagaccgtatcatattcgctccagtacttccagcaaggaaattgtacacacgtttgagacgactgttgtaacttacccttctgcctggtcacaggaaatggtgtcacttcttaaaaagaaaggcaggctgaattgtgatcctacctttgaacttgaggaaatgattttggagtccaaacctctacataagaaaaaaaagcgtctggcaaagaaggagaaggatatgaggaaatgcgattcttctcagtgcttcccttgcctgtatggagcatctgcaaagtctgagcaggttttgaagtccaagagcatcccagctataaggctcttgcactgtgacagagctgcccacctccagtacaccctcagtgacctcgagtag

SEQ ID NO: 3630 - DNA, 600 bp, Homo sapiens
actgtgagggcatcacaccagtggcttggcacttgtgtggtattgttggaatgtcttgtgatgaaccactaggcttgcaagtctaccggcaaaggcctacgaatagcagaatctcggaaagaaaggagaggctatccaaatttgaatctattcgtcattcaattgctggaataattaggtctccaaaatctgcactgggctcttcagcaaacatgtatcgattcgagggcactgggttttcaaacattcctcaacttatagatcatcactatacaacaaaacaggtcatcactaagaaatcaggtgtagttctgctgaatcctattcctaaggacaagaaatggattctcagtcatgaagatgtcatattgggagaattactgggcaagggaaattttggtgaagtatataagggcacattaaaggataaaacttctgttgctgttaaaacatgtaaagaagatcttcctcaggaattgaaaataaaatttttacaagaagccaaaattctcaagcaatatgatcatcccaatattgtcaaacttataggagtttgcacacaaagacagcctgtctacatcattatggaactggtttcag

SEQ ID NO: 3631 - DNA, 600 bp, Homo sapiens; identical to SEQ ID NO: 3630

SEQ ID NO: 3632 - DNA, 491 bp, Homo sapiens
gagggaagaagatgagtggagtgtgcatccagtattctggttttttggaggtctgtctgaaggactggtatctgtgttgcctactcaccactgctgaggagccaatggcctttggatcactgggggcactgagaaccaaggagagcagagtgacttgctgtggcaatgccacagaacctgcggtagtacagcagacagcaaatggagtgagagattacaagctcttaaaaaagacaactgcaaacttctctagaactgttatcataactgctattggttatattctcaaaaatcacctgccaaggaaaaatgcaaaaggaggtgatttcctcacctttctgagaaggaagaaggatgaactaaaactcaaacagttagtgaaattttcattagacgctgctgctggtatgttgtatctcgagagtaaaaactgtatacacagaaagaatgaaacggtgaaggctaaaactgctacatccacagatggctga

SEQ ID NO: 3633 - DNA, 491 bp, Homo sapiens; identical to SEQ ID NO: 3632

SEQ ID NO: 3634 - DNA, 600 bp, Homo sapiens
cccgtgaaccacctcatagagggctcccagaagtgtgtggctgagctgggtccccaggccgtgggggccgtgaaggcccctgaaggccctgctgctgaggacctgtggctgagcccgctgaccatggaagatcttgtctgctacagcttccaggtggccagagggatggagttcctggcttcccgaaagtgcatccacagagacctggctgctcggaacattctgctgtcggaaagcgacgtggtgaagatctgtgactttggccttgcccgggacatctacaaagaccccgactacgtccgcaagggcagtgcccggctgcccctgaagtggatggcccctgaaagcatcttcgacaaggtgtacaccacgcagagtgacgtgtggtcctttggggtgcttctctgggagatcttctctctggccccagagggagctcagtgcccagtcagcagacgtgcctactccaagagctccaagagctccatgtgggaactcaggccccgctgcgagcatgatgaagtctccaggccagggcttactgctctgcaagccctcctcagcttagctgtcaactggaccacaccagaaaccagctga

SEQ ID NO: 3635 - DNA, 600 bp, Homo sapiens
acaccattagacttagctttacgtgaaggacactccaagctggtggaagacgtcacaaattttcagggcagatggtccccaagcttctcccgagtgcagctcagtgaagaagcctccttgcattacattcactcatcggaaacgctgaccctgaccctgaaccacacagccgagcatttgttggaggcagatattaaactcttccggaaatacttttgggatagagcctttcttgtcaaggcctttgagccagaagccaggccagaggaaagaacagctatgccctccagcggtgcagaaactgaagaagcacggttaaaaattgtgttaaaaaagcaatttttggtaattcgattgggggcccatcccgatgcaaatgttctggttaagccgacactggaccttcctcttcagactgcacttctttggagcccaagggaatttgcctttactattctccccctgtgggtgacactcgctactggctgtgttgacggagccactctttaccctgctgcccaagaagtgtacatcctgaccactactgtttccaggaaaccctttattcagaaagaggacacccggtgtgcccggggctga

SEQ ID NO: 3636 - DNA, 420 bp, Homo sapiens
atgactgcagtgtatatgaatggaggtggcctggtgaacccccactatgcccggtgggatcggcgcgacagtgtagaaagtggctgtcagaccgagagtagcaaggagggtgaggagggacagccccgccagctgacgcccttcgagaaactgacacaggacatgtcccaggatgagaaggtggtgagggagatcacgctggggaaacggataggcttctaccgaattcgaggggaaatcggaagtggaaacttctcccaagtgaagcttgggattcactccctaaccaaaggaataggagaaagagcaaatttgggagggaaaaagttgagtgaaaacactgatatccagaaggagctgtctactgggcatgctccagtcatggacaagggcatgaggtcagaccaggatttgcattga

SEQ ID NO: 3637 - DNA, 420 bp, Homo sapiens; identical to SEQ ID NO: 3636

SEQ ID NO: 3638 - DNA, 600 bp, Homo sapiens
ttcttaataggacgaccaggaaacaaaacccagcaagttattcacattatagattttggtttggcaaaggaatatattgatccggagacaaagaaacacataccatacagagaacacaagagccttacaggaacagctagatatatgagcataaacacacatttaggaaaagaacaaagtagaagagacgatttagaagctttaggtcatatgttcatgtattttctgagaggcagtcttccttggcaaggcttaaaggctgacacattaaaggagaggtatcagaaaattggagatacaaaacgggctacaccaatagaagtgttatgtgaaaattttccagaagaaatggcaacatatcttcgttatgtaagaaggctagatttttttgaaaaaccagactatgactacttaagaaagctttttactgacttgtttgatcgaaaaggatatatgtttgattatgaatatgactggattggtaaacagttggttgttctggccaacaatatgcttgaggctccccatactccaatatgcttggcactttgtggcaagattttcatgactttgtttgaaaaagaaagaaaagagtactga

SEQ ID NO: 3639 - DNA, 600 bp, Homo sapiens; identical to SEQ ID NO: 3638

SEQ ID NO: 3640 - DNA, 600 bp, Homo sapiens
cagaagccaccgacggaggcagacaagcccaatggcatgaaacggtccccctcagccactgggcagagttctttccgatccacggccctcccggaaaagtctctgagctgctcctccagcttccctgaaaccagggccggagttagagaggcctctgcagccagcagcgacacctcttctgccaaggccgccgggggcatgctggagcttccagcccccagcaacagggaccataggaaggctcagcctgccggggagggccgaacccacatgacaaagagtgactccctgccctccttccgggtctccaccctgcctctggagtcacaccaccccgacccaaacaccatgggcggggccagccaccgggacagggctctctcggtgactgccaccgtaggggaaaccaaagggaaggaccctgccccagcccagcctcccccagctaggaaacagaacgtgggcagagacgtgaccaagccatccccagccccaaacactgaccgccccatctctctttctaatgagaaggactttgtggtacggcagaggcgggggaaagagagtttgcgtagcagccctcacaaaaaggccttgtaa

SEQ ID NO: 3641 - DNA, 600 bp, Homo sapiens; identical to SEQ ID NO: 3640

SEQ ID NO: 3642 - DNA, 600 bp, Homo sapiens
gacttggtcagaaaattaattgttttggatccaaagaaacggctgactacatttcaagctctccagcatccgtgggtcacaggtaaagcagccaattttgtacacatggataccgctcaaaagaagctccaagaattcaatgcccggcgtaagcttaaggcagcggtgaaggctgtggtggcctcttcgcgcctgggaagtgccagcagcagccatggcagcatccaggagagccacaaggctagccgagacccttctccaatccaagatggcaacgaggacatgaaagctattccagaaggagagaaaattcaaggcgatggggcccaagccgcagttaagggggcacaggctgagctgatgaaggtgcaagccttagagaaagttaaaggtgcagatataaatgctgaagaggcccccaaaatggtgcccaaggcagtggaggatgggataaaggtggctgacctggaactagaggagggcctagcagaggagaagctgaagactgtggaggaggcagcagctcccagagaagggcaaggaagctctgctgtgggttttgaagttccacagcaagatgtgatcctgccagagtactaa

SEQ ID NO: 3643 - DNA, 600 bp, Homo sapiens; identical to SEQ ID NO: 3642

SEQ ID NO: 3644 - DNA, 600 bp, Homo sapiens
ggggctaagaagagggacacctttaaaggcttgtttacaaattgatcctgctgacaggatatcatctagtgatcttttgcatcatgagtattttactagagatggatttattgaaaaattcatgccagaactgaaagctaaattactgcaggaagcaaaagtcaattcattaataaagccaaaagagagttctaaagaaaatgaactcaggaaagatgaaagaaaaacagtttataccaatacactgctaagtagttcagttttgggaaaggaaatagaaaaagagaaaaagcccaaggagatcaaagtcagagttattaaagtcaaaggaggaagaggagatatctcagaaccaaaaaagaaagagtatgaaggtggacttggtcaacaggatgcaaatgaaaatgttcatcctatgtctccagatacaaaacttgtaaccattgaaccaccaaaccctatcaatcccagcactaactgtaatggcttgaaagaaaatccacattgcggaggttctgtgacaatgccacccatcaatctaactaacagtaatttgatggctgcaaatctcagttcaaatctctttcaccccagtgtgag

SEQ ID NO: 3645 - DNA, 600 bp, Homo sapiens; identical to SEQ ID NO: 3644

SEQ ID NO: 3646 - DNA, 600 bp, Homo sapiens
atcaccattcttcgagggaatcatgagagcagacagatcacacaagtttatggtttctatgatgaatgtttaagaaaatatggaaatgcaaatgtttggaaatattttacagatctttttgactatcttcctctcactgccttggtggatgggcagatcttctgtctacatggtggtctctcgccatctatagatacactggatcatatcagagcacttgatcgcctacaagaagttccccatgagggtccaatgtgtgacttgctgtggtcagatccagatgaccgtggtggttggggtatatctcctcgaggagctggttacacctttgggcaagatatttctgagacatttaatcatgccaatggcctcacgttggtgtctagagctcaccagctagtgatggagggatataactggtgccatgaccggaatgtagtaacgattttcagtgctccaaactattgttatcgttgtggtaaccaagctgcaatcatggaacttgacgatactctaaaatactctttcttgcagtttgacccagcacctcgtagaggcgagccacatgttactcgtcgtaccccagactacttcctgtaa

SEQ ID NO: 3647 - DNA, 600 bp, Homo sapiens
ttcatctctgtggaaggtacctttacctgcgagggactaagagtacctttgcctgctcaggccatgaaagagaatgatgtcttcagagaaagcagacaaccattaaccaaagtcacagctaaggattcaaagatctcgaactccatgatctgggggacgtatttgaaggtacttcatatattcttggcaattgcttatactcaatgctttcagcagctacaaaccctggagactaagaactcttattatgtgatgatggagctatgcctcagtggcaacctcatgaacaggatctgggatcaaaagaaactaagtgaaagggaagtgaagatgatcttcaggcagatgttgtccgcaatggagcatgtgcactggcatggaatggagcagttaagtactcagggtggaagtcctgcctatgcggcccctgaactgcttgctcatcagaaatatggccccaaagtggatgtctggttcatactccagcctttgaacttcattgcaaacaccatggaatttggcctttcagaaattgccagtgtcctggtgaataacaagccttctcctatcacggatttgtacagctatattaaaaattag

SEQ ID NO: 3648 - DNA, 600 bp, Homo sapiens
ttgtttaatattacagtggatttttattttaaaggcattgttcacagtgatcttaaaccagctaactttctgatagttgatggaatgctaaagctaattgattttgggattgcaaaccaaatgcaaccagatacaacaagtgttgttaaagattctcaggttggcacagttaattatatgccaccagaagcaatcaaagatatgtcttcctccagagagaatgggaaatctaagtcaaagataagccccaaaagtgatgtttggtccttaggatgtattttgtactatatgacttacgggaaaacaccatttcagcagataattaatcagatttctaaattacatgccataattgatcctaatcatgaaattgaatttcccgatattccagagaaagatcttcaagatgtgttaaagtgttgtttaaaaagggacccaaaacagaggatatccattcctgagctcctggctcatccatatgttcaaattcaaactcatccagttaaccaaatggccaagggaaccactgaagaaatgaaatatgttctgggccaacttgttggtctgaattctcctaactccattttgaaagctgctaaa

SEQ ID NO: 3649 - DNA, 600 bp, Homo sapiens
atggagagaggaaagagtaaatgtgtcaaatactggtctgaagaggatgctctacaagaatatggggtcatgtgtgttaggaacatcaaaggaaaccacggagtgcccagtgaccccgggggcatgctggacttcctggaggaggtgcaccataagcaggagagcatcatggatgcagggctggtcgtggtccactgcagtgctggaattggccatacagggaggttcattgtgattaatagtcttattgacatcatcagagagaaaggtattaactgcaacattgaccttctcaaaaccatccacacagtgcagtctcagaggtcagggatggcccagacagaagcacagtaccgatttatctatatggcagtccagcattatattgaaacactacagcacaagattgaagaagagcagaaaagcaagaggaaagggcacgaatataaaaatattaagtattctctagcagaccagacaagtggagcccagagccccctcccgccttgcactgcagcgccaccctgtgcagaaatgagagaagacaatgctggagtctgtgaaaacgtggacctgatacaacagaaaagtttcacatga

SEQ ID NO: 3650 - DNA, 600 bp, Homo sapiens
gtcatgtgggaagttatgtcttatggagaaagaccttattgggacatgtcaaatcaagatgaaatgtcatcatatcctgcacttcacgcactccttaataacatgcttaatattcatggaaattttgggaaaaaagttataaaagcaatagaagaaggttatcgtttaccagcacccatggactgcccagctggccttcaccagctaatgttggattgttggcaaaaggagcgtgctgaaaggccaaaatttgaacagatagttggaattctagacaaaatgattcgaaacccaaatagtctgaaaactcccctgggaacttgtagtaggccaataagccctcttctggatcaaaacactcctgatttcactaccttttgttcagttggagaatggctacaagctattaagatggaaagatataaagataatttcacggcagctggctacaattcccttgaatcagtagccaggatgactattgaggatgtgatgagtttagggatcacactggttggtcatcaaaagaaaatcatgagcagcattcagactatgagagcacaaatgctacatttacatggaactggcattcaagtgtga

SEQ ID NO: 3651 - DNA, 600 bp, Homo sapiens
ggtaatgcagtgcaccagccctcagggctcaccagccaacctcaagtactgtatcagaacaatggattatatagctcacatggctttggaacaagaccactggatccaggaacagcaggtcccagagtttggtacaggccaattccaagtcatatgcctagtctgcataatatcccagtgcctgagaccaactatctaggaaatacacccaccatgccattcagctccttgccaccaacagatgaatctataaaatataccatatacaatagtactggcattcagattggagcctacaattatatggagattggtgggacgagttcatcactactagacagcacaaatacgaacttcaaagaagagccagctgctaagtaccaagctatctttgataataccactagtctgacggataaacacctggacccaatcagggaaaatctgggaaagcactggaaaaactgtgcccgtaaactgggcttcacacagtctcagattgatgaaattgaccatgactatgagcgagatggactgaaagaaaaggtttaccagatgctccaaaagtgggtgatgagggaaggcataaagggagccacg

SEQ ID NO: 3652 - DNA, 600 bp, Homo sapiens; identical to SEQ ID NO: 3651

SEQ ID NO: 3653 - DNA, 600 bp, Homo sapiens
tcaaacatttttgaactagttgctgatatcaggacaagacatttcaaagaaagtattaaattcattcacgagtgccggctccgcggtgagagctgccttgtacactgcctggccggggtctccaggagcgtgacactggtgatcgcatacatcatgaccgtcactgactttggctgggaggatgccctgcacaccgtgcgtgctgggagatcctgtgccaaccccaacgtgggcttccagagacagctccaggagtttgagaagcatgaggtccatcagagctctgatttcccactgctgtttgtttccctggttatgtgtggcaccatctctgtggtgaagtcacaggtgcaagcccacgtggatgcagacgtgcacatgtgtgtgacgtttcgggtttgtttccatcctctccagtatcggcagtggctgaaggaagaatatggagagagccctttgcaggatgcagaagaagccaaaaacattctgggtaaatataaggagcaagggcgcacagagccccagcccggcgccaggcggtggagcagttttccggcactggctccgctgacctacgataattatacgacggagacctaa

SEQ ID NO: 3654 - DNA, 522 bp, Homo sapiens
tgcgggacgatcgagtacatggcgcccgaggtggtgaaccggcgaggacacacgcagagtgccgactggtggtccttcggcgtgctcatgtttgagatgctcacggggtccctgccgttccaggggaaggacaggaaggagaccatggctctcatcctcaaagccaagctggggatgccgcagttcctcagtggggaggcacagagtttgctgcgagctctcttcaaacggaacccctgcaaccggctggtaaagcaattcctccttgtcaccgagcacctctgcatgccgagcgtggctaccaggagagcaggtgacacagtgagctcccgtggcactggtgacgtcagagcaggtgacacgacccccccgttcatcaccgtgcgtctggggagtgcctgctcagatgcacgggctctgcctgtggacatggacgtcatgctgtttctgtgcgcttacccagaattcttgttcacaaagtgtttttctgctagtgacttgcacagtcctgcattctcttag

SEQ ID NO: 3655 - DNA, 522 bp, Homo sapiens; identical to SEQ ID NO: 3654

SEQ ID NO: 3656 - DNA, 600 bp, Homo sapiens
attctgatttgggagattttaactcttggtcatcagccttatccagctcattccaaccttgatgtgttaaactatgtgcaaacaggagggagactggagccaccaagaaattgtcctgatgatctgtggaatttaatgacccagtgctgggctcaagaacccgaccaaagacctacttttcatagaattcaggaccaacttcagttattcagaaattttttcttaaatagcatttataagtccagagatgaagcaaacaacagtggagtcataaatgaaagctttgaaggtgaagatggcgatgtgatttgtttgaattcagatgacattatgccagttgctttaatggaaacgaagaaccgagaagggttaaactatatggtacttgctacagaatgtggccaaggtgaagaaaagtctgagggtcctctaggctcccaggaatctgaatcttgtggtctgaggaaagaagagaaggaaccacatgcagacaaagatttctgccaagaaaaacaagtggcttactgcccttctggcaagcctgaaggcctgaactatgcctgtctcactcacagtggatatggagatgggtctgattaa

SEQ ID NO: 3657 - DNA, 600 bp, Homo sapiens
tcccgtgggagcagtgtggagagcttgcccccaacctctgagggcaagaggatgagtgctgacatgtctgaaatagaagctaggatcgccgcaaccacagcctattccaagcctaaacggggccaccgtaaaactgcttcatttggcaacattctggatgtccctgagatcgtcatatcaggtatcatagaccacctgagttggtctaatagctgtggaaccggaataatgatccctggcaacggacagccaagacgtagatccatccaagacttgactgtaactggaacagaacctggtcagcctctagcaccgtgcccaaactccaaagaatctatggcagtgtttgaacagcattgtaaaatggcacaagaatatatgaaagttcaaacagaaattgcattgttattacagagaaagcaagaactagttgcagaactggaccaggatgaaaaggaccagcaaaatacatctcgcctggtacaggaacataaaaagcttttagatgaaaacaaaagcctttctacttactaccagcaatgcaaaaaacaactagaggtcatcagaagtcagcagcagaaacgacaaggcacttcatga

SEQ ID NO: 3658 - DNA, 600 bp, Homo sapiens; identical to SEQ ID NO: 3657

SEQ ID NO: 3659 - DNA, 600 bp, Homo sapiens
ctcagcaccaagcagaaggtggccctatgcacccaggtagccctgggcatggagcacctgtccaacaaccgctttgtgcataaggacttggctgcgcgtaactgcctggtcagtgcccagagacaagtgaaggtgtctgccctgggcctcagcaaggatgtgtacaacagtgagtactaccacttccgccaggcctgggtgccgctgcgctggatgtcccccgaggccatcctggagggtgacttctctaccaagtctgatgtctgggccttcggtgtgctgatgtgggaagtgtttacacatggagagatgccccatggtgggcaggcagatgatgaagtactggcagcccacttcagctcctatgcatggaccccgtcctaccagccagacattgccccagaggcatccttgggtggctgcttgtataaactgcaagatttgcaggctgggaaggctagacttcctcagcccgagggctgcccttccaaactctatcggctgatgcagcgctgctgggccctcagccccaaggaccggccctccttcagtgagattgccagcgccctgggagacagcaccgtggacagcaagccgtga

SEQ ID NO: 3660 - DNA, 600 bp, Homo sapiens; identical to SEQ ID NO: 3659

SEQ ID NO: 3661 - DNA, 600 bp, Homo sapiens
ctcagctggatgcactacaaccagacaggtcagtggtcaatgcctgagagggcggtcctggggccatctggtcactcggtgctgactgactgctgggccccagacagtccagtggacatctggtctgtgggctgtatcatggcagagatgctgacagggaaaactctgttcaaggggaaagattacctggaccagctgacccagatcctgaaagtgaccggggtgcctggcacggagtttgtgcagaagctgaacgacaaagcggccaaatcctacatccagtccctgccacagacccccaggaaggatttcactcagctgttcccacgggccagcccccaggctgcggacctgctggagaagatgctggagctagacgtggacaagcgcctgacggccgcgcaggccctcacccatcccttctttgaacccttccgggaccctgaggaagagacggaggcccagcagccgtttgatgattccttagaacacgagaaactcacagtggatgaatggaagcagcacatctacaaggagattgtgaacttcagccccattgcccggaaggactcacggcgccggagtggcatgaagctgtag

SEQ ID NO: 3662 - DNA, 600 bp, Homo sapiens; identical to SEQ ID NO: 3661

SEQ ID NO: 3663 - DNA, 600 bp, Homo sapiens
ggctcagggaccccagaagccgagggcccctcgccagtggggcccccgccctgcccatctccgactatccctggccccctgcccaccccatggatggatgacatcccagggctgctgccacccccacctgtggggagacaccagactgggggtggtgtggagatactcttagagaagaggctgctgggccacgggctcggcatggcagggcagtggctagcccggaagcaggagatcattaagaccacggagcagctcatcgaggccgtcaacaacggtgactttgaggcctacgcgaaaatctgtgacccagggctgacctcgtttgagcctgaagcactgggcaacctggttgaagggatggacttccacagattctacttcgagaacctgctggccaagaacagcaagccgatccacacgaccatcctgaacccacacgtgcacgtcattggagaggatgccgcctgcatcgcttacatccggctcacgcagtacattgacgggcagggccggccccgcaccagccagtctgaggagacccgctggcagaacgtgcacttccactgctcgggcgcgcctgtggccccgctgcagtga

SEQ ID NO: 3664 - DNA, 600 bp, Homo sapiens
agagaattattcaatgagataaaaattaacaaagcagtttatatatttcttcatgaagacctcacagtaaaaataggtgattttggtctagctacagtgaaatctcgatggagtgggtcccatcagtttgaacagttgtctggatccattttgtggatggcaccagaagtcatcagaatgcaagataaaaatccatacagctttcagtcagatgtatatgcatttggaattgttctgtatgaattgatgactggacagttaccttattcaaacatcaacaacagggaccagataatttttatggtgggacgaggatacctgtctccagatctcagtaaggtacggagtaactgtccaaaagccatgaagagattaatggcagagtgcctcaaaaagaaaagagatgagagaccactctttccccaaattctcgcctctattgagctgctggcccgctcattgccaaaaattcaccgcagtgcatcagaaccctccttgaatcgggctggtttccaaacagaggattttagtctatatgcttgtgcttctccaaaaacacccatccaggcagggggatatggtgcgtttcctgtccactga

SEQ ID NO: 3665 - DNA, 408 bp, Homo sapiens
ccaacaagtcccaaatttggaaaagctgactcatatgaaaagctggaaaaactaggggaaggatcttatgctacagtatacaaagggaaaagcaagaacacatacactggagagaagttaactgagattcctatacagggacttaatgatcctagagatctgcaagcattgtctgagctgagggaaaattgtaaacatcaggcactttggttaatagttgaaagacctgttgtaacccaacagagaataagggtaaatgggaagttggtagctctgaaggtgatcaggctgcaggaagaagaagggacacctttcacagctatcagggaaggtaggcacttttccttgttgatattgcttttgtgtttctatggtccccgtagctattttaatattatacacctctga

SEQ ID NO: 3666 - DNA, 408 bp, Homo sapiens; identical to SEQ ID NO: 3665

SEQ ID NO: 3667 - DNA, 540 bp, Homo sapiens
atgggagaaggggtttggaggacaattaatgatgcctttctgatcttgaatcttcccactcatactcctccaaaagtcataaatccaacaaggagaacaaataaaaacagacaactcataccttcaagagcattaagagacagcaacaagcctgtgatagcaaagagtgacacaggggaagctgatagaggcttaagaagctgtgaaaaacagtacaggggtgtggaggacttaatcaaatcacaagcaaaattattccagaaagacaaaactgggatgctgtgtagttcattcacagcactggatgcaataaaggaggctgaaagtgactggaattggcagctgttggaaagcattgcctctaggggagagtcaaacggtgcttctcttttaaaaggactaaaacatgctaacatagtgctacttcatgacatcatccataccaaggagacgctgacacttgtgtttgaatatgtggggaggttgtcattcagaaccaagtacagaatgcgaacagatgtaaacattgtggatgactga

SEQ ID NO: 3668 - DNA, 540 bp, Homo sapiens; identical to SEQ ID NO: 3667

SEQ ID NO: 3669 - DNA, 657 bp, Homo sapiens
ttgtttttatttcagttgctgcgaggtctgtcttacatccaccagcgttatattttgcacagagacctgaaaccacagaaccttctgatcagtgacacgggggagttaaagctggcagatttcgagatagctattgatacagcaattgcaatgttgagtgttttaaagcatttggttcttatgaccagactgctgtgcagaaggatcgtgcccatgcacctctcctcagaggcatggactgaattgtccagcttggaacacgcagttggcatgcatcctgtgcacagagtgtacctcctgacagtccctgtcattgctggtcttgcaagagcaaaatccgtccctagccacacatactccaacgaagtggttaccttgtggtacagacctccagatgtccttctaggctcaacagaatattccacctgccttgacatgtggggagtaggttgcatctttgttgaaatgatccaaggagttgctgcttttccaggaatgaaagacattcaggatcaacttgaacgaatatttctgttctatgaaaagaaaaagtctatgtggaagaaaagtgttcagaagagatccagtgaaaatgaagatgttgcaaaaataaacattgagtggttcatgtgtggagacattagatggatgttctaa

SEQ ID NO: 3670 - DNA, 657 bp, Homo sapiens; identical to SEQ ID NO: 3669

SEQ ID NO: 3671 - DNA, 444 bp, Homo sapiens
atggttcctggggaatatagagagttgacagtaaatgatagtgatggcaaaggcgatattataaacattaatggaaggaggtacacacctcaaagagaaaaggataaccacctgaaagggatgattgccaacaggaaaagaatgttggatatgatgtttcagcttctccgaggtctggactttcttcattcacaccgagtagtgcatcgcgatctaaaaccacagaacattctggtgaccagcagcggacaaataaaactcgctgacttcggccttgcccgcatctatagtttccagatggctctaacctcagtgggattgaaacccagggtcgtcacgctgtggtacagagcacccgaagtcttgctccagtccagctacgccacccccgtggatctctggagtgttggctgcatatttgcagaaatgtttcgtagaaagtaa

SEQ ID NO: 3672 - DNA, 444 bp, Homo sapiens; identical to SEQ ID NO: 3671

SEQ ID NO: 3673 - DNA, 534 bp, Homo sapiens
atggagaaggacggcctgtgccgcgctgaccagcagtacgaatgcgtggcggagatcggggagggcgcctatgggaaggtgttcaaggcccgcgacttgaagaacggaggccgtttcgtggcgttgaagcgcgtgcgggtgcagaccggcgaggagggcatgccgctctccaccatccgcgaggtggcggtgctgaggcacctggagaccttcgagcaccccaacgtggtcaggttgtttgatgtgtgcacagtgtcacgaacagacagagaaaccaaactaactttagtgtttgaacatgtcgatcaagacttgaccacttacttggataaagttccagagcctggagtgcccactgaaaccataaaggaatcaagccatggcccctctcagctcctggtggtctccattttgcctgaattacgagcagaaagatccatcttgctgactgtcaacccttctttaccacaagctatggtgacttttagggagcacaaacaagaagagactttgggaaatgagaaccagttatag

SEQ ID NO: 3674 - DNA, 534 bp, Homo sapiens; identical to SEQ ID NO: 3673

SEQ ID NO: 3675 - DNA, 600 bp, Homo sapiens
gatttatctgaaggcaattcctcagatatcaactatcaaactaggaaaactgtgagtttaacaccaagtcctacaacacaagttgaaacacctgatcttgtggatcatgataacacttcaccactcttcagaacacccctcagttttactaatccacttcactctgatgactcagactcagatgaaagaaactctgatggtgctgtgacccagaataaaactaatatttcaacagcaagtgccacagtttctgctgccactagtactgaaagcatttctactaggaaagtattgccaatgtccattgctagacataatatagcaggaacaacacattcaggtgctgaaaaagatgttgatgttagtgaagattcacctcctcccctacctgaaagaactcctgaatcgtttgtgttagcaagtgaacataatcatccagcgggaggtattcactatgaaatgtgcatagaatgtccacctactttcagtgacaagagagaacaaatatcagaaaatccaacagaagccacagatattggttttggtaatcgatgtggaaaacccaaaggaccaagagatccaccttcagaatggacatga

SEQ ID NO: 3676 - DNA, 600 bp, Homo sapiens
ataaacagggtacttcttgggaagaagaatggggagctgaaattggctgattttggcctggctcgagcctttgggattcccgtccgctgttactcagctgagtcctctaagtgggaggtccctttcggggggggtctcctccaggtggtcacactgtggtaccgcccaccggatgtcctctttggggccaagctgtactccacgtccatcgacatgtggtcagccggctgcatctttgcagagctggccaatgctgggcggcctctttttcccggcaatgatgtcgatgaccagaggggaagaggccctcaccctgcccctgaagatgcagctgtggccctttcccaagtgatccttgactccgtggacacactgctggggacgcccaccgaggagcagtggccctctatgaccaagctgccagactataagccctatccgatgtacccggccacaacatccctggtgaacgtcgtgcccaaactcaatgccacagggagggatctgctgcagaaccttctgaagtgtaaccctgtccagcgtatctcagcagaagaggccctgcagcacccctacttctccgacttctgtccgccctag

SEQ ID NO: 3677 - DNA, 600 bp, Homo sapiens
gagatcatggagtgctccatgaatgaggaccatccgggctacggaaggaggggacatgtctcccgattcctgttggtgcaaccccagagctgctgcacagcggaagaggccttggcacacccattcttcctgcagtacgtggtggaggaagtgcggcacttcagcccccgggggaagttcaaggtgatcgctctgactgtggtggcttcagtgcggagctactaccagtaccaccgggtgaacccggtgacccgggagatcgtcatccgagacccacccctacaccctccagcctctgcgccggctcatcgacgcctacgctttctgaatctatggcccctggggatttataaactcatcagggacatgtcagggaatgagataatgaagacaacacactatttggtggacaagaaatacccctggaatgacctgggaagggaaaataatgccatcttcagttttggttttcagaaaggggttcgcaaggaaagtacatttgtccaggaatcaggagctctgagtgccatagcccagtacacaggctgtggaaccagcaaatttgagttccaatccaaaactgtctcagaaccagattaa

SEQ ID NO: 3678 - DNA, 600 bp, Homo sapiens
ggggaatctggattgggaaagtcgacattaatcaactcattattcctcacagatttgtattctccagagtacccagctattaatagaagcaaactcttgctgtttatttatgacagaacacacatgcaggacttgaaagatgttactaacaatgtccactacgagaactatggaagcagaaaactggcagctgtgacttacaatggagttgataacaacaagaataaagggcagctgactaaagaatgtatcttgcatccctgtatggaggtctcccgattcctgttggtgcaaccccagagctgctgcacagcggaagaggccttggcacaccccttcttcctgcagtacgtggtggaggaagtgcggcacttcagcccccgggggaagttcaaggtgatcgctctgactgtgctggcttcagtgctgatctactaccagtaccaccgggtgaacccgcctctgcgccggctcatcgacgcctatgctttccgaatctatggcccctgggcgaggaaggggcagcagcagaactgggcagcccttttcaagaacacacccaaggccgtgctcctctccctggccgaggaggactactga

SEQ ID NO: 3679 - DNA, 600 bp, Homo sapiens
aagggatctcctccttccctgggctgttccagccacttactgctctcagctccccctgctgacgcagccactccagcagcaggagtgagcgacgcagagcaggactctcagaatcgcactgaccagcccagaccagaagttagttcaatgaatggacttggagggggcgtgcaggcccatccagacacgctggctggtttccaccccaggaatcctgcactgaagaaaactgagaaggtggagctggtggagagatcaggggtttgggtggcaccaaccaccaatccatcccagatgtgggccagccttatggaaagactcattctagatgagtgggattctaagaagcaagtacaagcggattgccaccccatcgtcttgcctgtgtctgtggctgctgcagggcccttcacttatgccatttgctgtctgctttacctggaggtcatgggtgtaactttttctcattccaaggacctggatgatgtcccagtcaatgcatcggcagggaatgaagctttgatttttcttatggggcagaagcctgaacagagcctccactgcaacatcaaagtgcaagctgccaagcagctgatctga

SEQ ID NO: 3680 - DNA, 600 bp, Homo sapiens
atcctgacccgcctcacccaccaccccgtctacatcctgaaagggggctatgagcgcttctcaggcacgtaccactttctccggacccagaagatcatctggatgcctcaggaactggatgcatttcagccataccccattgaaatcgtgccagggaaggtcttcgttggcaatttcagtcaagcctgtgaccccaagattcagaaggacttgaaaatcaaagcccatgtcaatgtctccatggatacagggcccttttttgcaggcgatgctgacaagcttctgcacatccggatagaagattccccggaagcccagattcttcccttcttacgccacatgtgtcacttcattgaaattcaccatcaccttggctctgtcattctgatcttttccacccaaggtatcagccgcagttgtgccgccatcatagcctacctcatgcatagtaacgagcagaccttgcagaggtcctgggcctatgtcaagaagtgcaaaaacaacatgtgtccaaatcggggattggtgagccagctgctggaatgggagaagactatccttggagattccatcacaaacatcatggatccgctctactga

SEQ ID NO: 3681 - DNA, 600 bp, Homo sapiens; identical to SEQ ID NO: 3680

SEQ ID NO: 3682 - DNA, 399 bp, Homo sapiens
atgaggcctagagatcaagaatatctgagtcatttttcttttactgacccgaaccttcaggcccacctggccttaataacaatggttctagttgcttcatggactaaaagatctatacatgtagtggataagcagttgccagtgacattctccccagaagcagaggcagccagagttgaatgttattatccagctttgttgctgctctggtattctcaaggcttgcattaccagccccaaagtaacgacacacactactgcaatgatatctgcattccacttaaggaagttttggaaactttaggttcttctgtttcttacaacaaattcagaaacagaaaagccatattcatcttgatcctagggaagaaggcaaaattattacccatacgtctttga

SEQ ID NO: 3683 - DNA, 399 bp, Homo sapiens; identical to SEQ ID NO: 3682

SEQ ID NO: 3684 - DNA, 1400 bp, Homo sapiens
tgcagcagaagctgtacatgtcagtagaagattttattctggaagttgatgagtcatctcttaataaacgcttaaaaacattgcaggatttgtcagtctctttagaagcagtgtatggacaagccaaagaaggagcaaattctgatgaaatacttaaaaaattttatgactggaagtgtgataaaagagaggagttcaccagtgttagaagtgaaacagacgcttctctgcaccgtcttgtagcatggttccaaagaaccttaaaggatcaaggtgatgcagacaaggagataatttcaaatacatatagtcaagtactgcaaaagattcattcagaggaaaggctcattgccacagtacaagctaagtacaaggacagtattgagtcagatgatcctgatggctctcaaattgagaaaataaaagaagaaataactcagctgcgcaataatgtctttcaggaaatttatcatgagagagaggaatataactctggtggtctccttacaatgagcttggaacgagatcttcttgatgctgagcccatgaaggaacttagcagcaagcgtcctttggtacgttctgaggttaatgggcagataattctgttaaagggctattctgtggatgttgacacagaagccaaggtgattgagagagcagccacctaccatagagcttggagagaagctgaaggagactcagggttactgccattgatattcctgtttttatgtaagtctgatcctatggcttatctgatggtcccatactaccctagggcaaacctgaatgctgttcaagccaacatgcctttaaattcagaagaaactttaaaggtcatgaaaggtgttgcccagggtctgcatacattgcataaggctgacataattcatggatcacttcatcagaacaatgtatttgctttaaaccgtgaacaaggaattgttggagattttgacttcaccaaatctgtgagtcagcgagcctcggtgaacatgatggttggtgacttgagtttgatgtcacctgagttgaaaatgggaaaacctgcttctccaggttcagacttatatgcttatggctgcctcttattatggctttctgttcaaaatcaggagtttgagataaataaagatggaatccccaaagtggatcagtttcatctggatgataaagtcaaatccctcctctgtagcttgatatgttatagaagttcaatgactgctgaacaagttttaaatgctgaatgtttcttgatgccaaaggagcaatcagttccaaacccagaaaaagatactgaatacaccctatataaaaaggaagaagaaataaagacggagaacttggataaatgtatggagaagacaagaaatggtgaagccaactttgattgttaa

SEQ ID NO: 3685 - DNA, 1400 bp, Homo sapiens; identical to SEQ ID NO: 3684

SEQ ID NO: 3686 - DNA, 600 bp, Homo sapiens
tcagactatgagctcacctacaacctagagaagaagcgacatgagcgcagtgtgaagagcacagctgtgcgggtgggagactttggcagtgccacctttgaccatgagcaccatagcaccattgtctccactcgccattaccgagcaccagaagtcatccttgagttgggttggtcacagccttgtgatgtgtggagtataggctgcatcatctttgagtactatgtgggcttcaccctcttccagacccatgacaacagacagcatctagccacgatggaaaggatcttgggtcctatcccttcccggatgatccgaaagacaagaaaacagaaatatttttaccggggtcgcctggattgggatgagaacacatcagctggacgctatgttcgtgagaactgcaaaccgctgcggcagtatctgacctcagaggcagaggaagaccaccagctcttcgatctgattgaaagcatgctagagtatgaaccagctcagcggctgaccttgggtgaagcccttcagcatcctttcttctcccgcctttgggctgagccacccaacaagttgtgggactccagtcaggatatcagtccgtga

SEQ ID NO: 3687 - DNA, 600 bp, Homo sapiens; identical to SEQ ID NO: 3686

SEQ ID NO: 3688 - DNA, 600 bp, Homo sapiens
gcatttgagctggcaacgggagattatttgtttgaaccacattctggggaagactattccagagacgaagaccacatagcccacatcatagagctgctaggcagtattccaaggcactttgctctatctggaaaatattctcgggaattcttcaatcgcagagctctggatcctgaatccagcaacgcgaggaaggcctgtacttttggtcattcaagttgcgctctgtttctgtctgcgcgggcggtggtagtgtctgcatgcagtgtactgattaaactgtcgtgtgtttctgttttgctggcaatgtttcccaatgcagatcacatagcattgatcattgaactgctggggaaagtccctcgaaaatacgctatgttggggaaatactccaaggagtttttcaccagaaaaggagaactgcgacacatcaccaagctgaagccctggagcctctttgatgtacttgtggaaaagtatggctggccccatgaagatgctgcacagtttacagatttcctgatcccgatgttagaaatggttccagaaaaacgagcctcagctggcgaatgccttcggcatccttggttgaattcttag

SEQ ID NO: 3689 - DNA, 600 bp, Homo sapiens; identical to SEQ ID NO: 3688

SEQ ID NO: 3690 - DNA, 600 bp, Homo sapiens
tctcaggttgccaaatactgctgtgagcatttgttagatcacatcgccgataaccaggatttacaggcctctctggctgtatccaaagcccttggggattttgattacaaatgtatccatgggaaaggtcctactgggcagcttgtctcaccagagcctgaagtccatgacactgaaagatctgaagaagatgatcacttcattatccttgcatgtgatagtatctgggatgttatgggaaatgaagagctctgtgattttgtaagatccaggcttgaagtcactgatgaccctgagaaagtttacaatgaaatagtcgacacctgtttgcataagggaatatcaccagaagcagcgaagaaggaggcagagttgggcaagtacctggaatgcagagtagaagaaatcataaagaagcagggggaaggtgtccctgacttagtccatgtggtgtacacattagccaatgagaacatccccagactgccacctggaggtgaattggcaaacaagcaaaatgttattgaagccatttataaaagacggaatctttataaaaatgatgacagtgactccacatcaactgatgctatgtgctaa

SEQ ID NO: 3691 - DNA, 600 bp, Homo sapiens
gatggtggaatatggtttgtgacccaaaaaccagtagtttccacacaggtggcacagcccttcctaagtgggctccagggccatggacctgaggccacaggccaagttctaagacaaagaagaaagcagttacagtcttgtggaaaaggtgggaaaatgtgggaagatggtaaaatctgttccctgattcttctggtgcctgctggtaccttctctgggctgacaaacaactgccatctctgggctgtgaccgtctacgacaagctggcatctttctttaaagaggcacctctggacctgcagcaccggctcctcatgaaggtgggcagcacgcactctctgttcagggcctgctcagaacctgaggacccagccatggagcggtcagccttcatggagcaggatgctgggagcgggctggtgatgcgtctccatgagcggccagccctgctggtcagcagcacacctggacaggtctgcacgacccctggggcacttggggctgaggacgaagacttctctatcctgctggcagctttagaaagtaggtgtgtggctgcggtgaggagctctgggcttgtccgggccactgagctgtga

SEQ ID NO: 3692 - DNA, 600 bp, Homo sapiens
cttgcccagcagcacgtcgtaggattccatggttttttcgaggacaacgactttgtgttcgtggtgttggagccctgccgccggaggtctctcctggagctgcacaagaggaggaaagccctaactgagcctgaggcccgacactatgttgtctgcggcaaattgtgcttggctgccaacctcaagctgggcaactttttcctgaatgagtatctggagctgtgtggtaacagcctggaggtgttcttcaatgattgtaacagcctgcagtacataaagtgtgatggcaccgagtcctacctcaccgtgagttcccatccccattccatgatgaagaagatcacactccttaaatatttccgcaattacttgagcgagcacttcctgaaggcaggtgccaacatcacgccgcgcgaaggcgatgagctcgcccggctgccctacctgcggacctggttccacacccgcagcgccatcatcctgcacctcagcaacggcagcatgcagatcaacttcttccaggatcacaccaagctcacctggtgcccactgatggcagccgtcacctacatcgacgagaaccggaacttccgcacctaa

SEQ ID NO: 3693 - DNA, 600 bp, Homo sapiens
tatattcactctgcaaatgtactgcacagagatcccaaaccagctattcttttcattaatactgaaaacttggtgctgaagataggaaccattcaacttagttcccaaaatgagcctactgatgttgttgataaattaaatgacttgaatagctcggtgtcccaactagaactgaaaagtttgatatcaaagtcagtaagccaagaaaaacaggaaaaaggaatgacaaatctggctcaattagaagcctcgtaccaatcatcttgggacagccagtttgtgagtggtggggaggactgttttctcataaatcagttttgttgtgagttctttagcaggaaagaagatcctgaaatgctagaaactgagccagtagaggatgggaagcttggggagagaggaaatgaggaaggatttctgaacaacagtggggagttcctctctaacaagcagctcgagtccataggcatcccgcagtttcacagtccagttgggtcaccacttaagtcaacacaggccacaggaacaccttccgctgtgaaatcttcccctcaaattcctcatcaaacatacagcagcattctgaaacatctgagctaa

SEQ ID NO: 3694 - DNA, 600 bp, Homo sapiens; identical to SEQ ID NO: 3693

SEQ ID NO: 3695 - DNA, 600 bp, Homo sapiens
agatacacaccccgcaggaacatctctctttattttgtggctttggtgccacaggaagaggagttggatgaccagaaatttctggattccagcttgtctttttactctttgctgatgataaaaggaagatgccctttactgaaagtcatggcaactccagagcaggtggacaagatgaaggctatcgttcagaagctccgcttcacatgcagaagtgacagctttgagaaccctgggctgcagcagcacttcaggaacctggaggccttggccttggatttgatggagactgaacaagcagtggacctgacattgcccaaggttgaagcaatgaataaaagattggactccctggtggttgagtttaaggagcttgtttacccaccagattacaatcctgaagggaaatttaccaagagaaaacaaaataatgaagattttggaagcgaaagacccaagatgaagtattcagaagaggagctgaaggccaatatcagcaagggcatgctgggcaatttcactgtgcccatgctgaaagaggcatatgggctgaagaagcaggagctgctggaagttctctctgagcacttccaggcctga

SEQ ID NO: 3696 - DNA, 600 bp, Homo sapiens; identical to SEQ ID NO: 3695

SEQ ID NO: 3697 - DNA, 600 bp, Homo sapiens
ttgttttctggatccttagaacctgtggcctgcagctctgtgctttctgagggatcaccacttactgacagaagcaggacggtttcagcctccagtactggggatttgccaaaagcaaaaacccgggaggctgacttgttgatgaatcccctggatacacggaatgcagataaaattagagtagaaattgctgacctgggaaatgcttgttgggcgcataaacacttcacggaagacatccagatgagtcaataccgttccatagaggttttaataggagagggatacagcacccctgcggacatctggagcacggcgtgtatggcatttgagctggcaatgggcgattatttgtttgaaccacattctggggaagactattccagagacgaagatcacatagcattgatcattgaactgctggggagagtccggtttactgaccgttttcttctggaaaaaaatacgctatgttggggaaatatttcgaggagtttttcaccagaaaaggagaactgcgacatcaccaagctgaaaccctggtgcccttttgatgtacttgtggagaagtatggctggccccatgaagatgctgcatag

SEQ ID NO: 3698 - DNA, 600 bp, Homo sapiens; identical to SEQ ID NO: 3697

SEQ ID NO: 3699 - DNA, 600 bp, Homo sapiens
gctgcaaattgtacagcattagcagaaaggatagccaaagaaattcagcattgtggctcctcaggccacagtaacaccctgaagatacaacagccaaatatgatagttgccaagatgccccaaggaattccgtgtattattttgatttgtctgaatcacatgattgctcagaagcagacagcaccagcaagccagcactcaaccctaagagcagccttcagtgagcagtctgctgaaattctaaaacagagtataggaagagccagcaggaaactgggccgtttggcaaaacccactgtgaccatcagtacagatggagatgtcatcacaataaaaaccaaaagcatctttaaaaataatgagatctcctttaagctgggagaagagtttgaggaaatcacgccaggtggccacaaaacaaagagtaaagtaaccttagataaggagtccctgattcaagttcaggactgggatggcaaagaaaccaccataacgagaaagctggtggatgggaaaatggtggtggaaagtactgtgaacagtgttatctgtacacgaacatacgagaaagtatcatcaaactcagtctcaaactcttaa

SEQ ID NO: 3700 - DNA, 600 bp, Homo sapiens; identical to SEQ ID NO: 3699

SEQ ID NO: 3701 - DNA, 600 bp, Homo sapiens
aatgacttaatagaagaacgatataaagccagccaagatccttttccagcagccataattttaaaagttgctttgaatatggcaagagggttaaagtatctgcaccaagaaaagaaactgcttcatggagacataaagtcttcaaatgttgtaattaaaggcgattttgaaacaattaaaatctgtgatgtaggagtctctctaccactggatgaaaatatgactgtgactgaccctgaggcttgttacattggcacagagccatggaaacccaaagaagctgtggaggagaatggtgttattactgacaaggcagacatatttgcctttggccttactttgtgggaaatgatgactttatcgattccacacattaatctttcaaatgatgatgatgatgaagataaaacttttgatgaaagtgattttgatgatgaagcatactatgcagcgttgggaactaggccacctattaatatggaagaactggatgaatcataccagaaagtaattgaactcttctctgtatgcactaatgaagaccctaaagatcgtccttctgctgcacacattgttgaagctctggaaacagatgtctag

SEQ ID NO: 3702 - DNA, 600 bp, Homo sapiens; identical to SEQ ID NO: 3701

SEQ ID NO: 3703 - DNA, 600 bp, Homo sapiens
aaccagatcataagggagctgcaggttcttcatgagtgcaactctccgtacatcgtgggcttctgtggtgcattctacagcgagaggcgagatcagtatctgcagcacatggatggagattccctggatcaagtcctgaagaaagcgggaagaattcctgaacaaattttagaaaaagttagcattgctgtaataaaaggcctgacatatctgagggagaagcacaagatcatgcacatagatgtccagccctcccacatcatagtcagctcccgtggggagatcaagctctgtaactttgggggtgggcagctcatcgactccatggccaactccttcatgggcccaaggtcctacatgtccccagaaagattccaggggactcattactctgtgcagtcagacatctggagcatgggactctctctggtagagatggcagttgggaggtatcccatcccttctccagatgccaaggagctggagctgatgtttgggtgccagagatctgatgctgaggaagtggattttgcgggttggctctgctccaccatcgggcttaaccagcccagcacaccaacccatgctgctggcgtctaa

SEQ ID NO: 3704 - DNA, 600 bp, Homo sapiens
accttgtgtattaataacaaggacaatgggataactgctatcctttaccagagttggaagtacagtttcaaggatgaagatgagctggattcccacaccatggtgaagactagtgtggagagtgtgggcaccatgcgggccacaagcacgatgagtgaaggggcccagaccatgattgaacataatagcacgatgttggaatccgacttggggaccatggtgataaacagtgaggatgaggaagaagaagatggaactatgaaaagaaatgcaacctcaccacaagtacaaagaccatctttcatggactactttgataagcaagacttcaagaataagagtcacgaaaactgtaatcagaacatgcatgaacccttccctatgtccaaaaacgtttttcctgataactggaaagttcctcaagatggagactttgactttttgaaaaatctaagtttagaagaactacagatgcggttaaaagcactggaccccatgatggaacgggagatagaagaacttcgtcagagatacactgcgaaaagacagcccattctggatgcgatggatgcaaagaaaagaaggcagcaaaacttttga

SEQ ID NO: 3705 - DNA, 600 bp, Homo sapiens; identical to SEQ ID NO: 3704

SEQ ID NO: 3706 - DNA, 600 bp, Homo sapiens
aaagctgctgtgttgaaatatgaaaacaatgtcatgaatatcaggcagtttaactgttctccacacccctactggcttccaaactttatggatgttttcacatggtctttgccttttgttggggaaaaagtcacagagatgctggtaaatgtgctcaacatatgctctgatgacgaactgatttctgatgatgaagcagaaggaagcactacagttcgtaaggagatcatcaggaataagatcagagccattgggaagatggcacgggtcttttcaattcttcggcaagaaagtgagagtgtgctgactctcaagggcctgactcccacaggcacactccctctgggcgtcctctcaggaggcaagcagactatcgagacagccacagtagaagcggtagaggcccgggaagccatcagagggttctcgcttcagcacaagatccggagttttgaagaagcgcgaggtctggaccgaattaatgagcgaatgccaccccgaaaggatagcatacacgctggtgggccaatgaaatctgtaacctcagcacactcacatgctgcgcacaggagcgaccaagggaagaaagcccattcatga

SEQ ID NO: 3707 - DNA, 600 bp, Homo sapiens; identical to SEQ ID NO: 3706

SEQ ID NO: 3708 - DNA, 312 bp, Homo sapiens
gactggtgtcctgcagggcttcgttcagcccctcttctcatctcattcgacacaagtccccggggcctcttgtccatccccgggactgccattatcatcctcgtgcgagggagaactaatgccgacgtgatgaccgccctgtcccagggctacaggatgccccgtgtggagaactgcccagatgagctctatgacattatgaaaatgtgctggaaagaaaaggcagaagagagaccaacgtttgactacttacagagcgtcctggatgatttctacacagccacggaagggcaataccagcagcagccttag

SEQ ID NO: 3709 - DNA, 312 bp, Homo sapiens; identical to SEQ ID NO: 3708

SEQ ID NO: 3710 - DNA, 600 bp, Homo sapiens
ggctatggttcattcgtcttcatcccatgtcgtgttggttactataacaacagtaccaaggtggctgtgaaaaccctgaagccaggaactatgtctgtgcaagccttcctggaagaagccaacctcatgaagaccctgcagcatgacaagctcgtgaggctctacgctgtggtcaccagggaggagcccatttacatcatcaccgagtacatggccaagggcagtttgctggatttcctgaagagcgatgaaggtggcaaagtgctgcttccaaagctcattgacttttctgctcaggacagcagtgggctcagcatggtcttctttgtcatcagcttcaggcacaggcgttttcaggaaacaatcaccttgctccacactcagagttttggtcatggtgcacccccacatgctcccttgtccctgtgctcagtaaaccgctttttaaaaacgaaaatgaaaaacacagaaacagcacagattgcagagggaatggcatacatcgagcggaagaactacattcaccgggacctgcgagcagctaatgttctggtctccgagtcactcatgtgcaaaattgcagattttggccttgctaga

SEQ ID NO: 3711 - DNA, 600 bp, Homo sapiens; identical to SEQ ID NO: 3710

SEQ ID NO: 3712 - DNA, 600 bp, Homo sapiens
attgtccagctcatggagatctttgagactgaggatcaagtttacatggtaatggagctggctaccggaggggagctctttgatcgactcattgctcagggatcctttacagagcgggatgccgtcaggatcctccagatggttgctgatgggattaggtatttgcatgcgctgcagataactcataggaatctaaagcctgaaaacctcttatactatcatccaggtgaagagtcgaaaattttaattacagattttggtttggcatactccgggaaaaaaagtggtgactggacaatgaagacactctgtgggaccccagagtacatagctcctgaggttttgctaaggaagccttataccagtgcagtggacatgtgggctcttggtgtgatcacatatgctttacttagcggattcctgccttttgatgatgaaagccagacaaggctttacaggaagattctgaaaggcaaatataattatacaggagagaaactcagcatgacgcttgggtgtttagcgagagatttttctgccttaaatcttgatgatccaagccctttttgtgatgaagtgttttctcagcgaaatgtttaa

SEQ ID NO: 3713 - DNA, 600 bp, Homo sapiens; identical to SEQ ID NO: 3712

SEQ ID NO: 3714 - DNA, 600 bp, Homo sapiens
cccatctacattgtcaccgagtacatggccagaggatgcctgctggatttcctgaagacagatgaagggagcagattgtcactcccaaggctgattgacatgtcggcgcagattgctgaagggatggcatacattgagcgcatgaattccatccaccgcgacctgcgggcggccaacatcctggtgtctgaggccttgtgctgcaaaattgctgattttggcttggctcgaatcatcgacagtgaatacacggcccaagagggggccaagttccccatcaagtggacagccccggaagccatccacttcggggtcttcaccatcaaagcagacgtgtggtcgtttggagtcctcctgatggaagttgtcacttatgggcgggtgccatacccagggatgagcaaccccgaggtcatccgcaacctggagcgcggctaccgcatgccgcgccccgacacctgcccgcccgagctgtaccgcggcgtcatcgccgagtgctggcgcagccggcccgaggagcggcccaccttcgagttcctgcagtcggtgctggaggacttctacacggccaccgagcggcagtacgagctgcagccctag

SEQ ID NO: 3715 - DNA, 600 bp, Homo sapiens
gatctcgatcctgagattgtaaagtcatttctcttccagctgctaaaaggcctcggattctgtcacagccgcaatgtgctacgcagggacctgaagccccagaacctgctaataaacaggaatggggagctgaaattggctgactttggcctgtctcgagcctttgggatccccatctgctatgtcttctttggggccaagctgtactccacgtccattgacttgtggtcagctggctgcatctttgcagagctggccaatgctggatggcctctttttccaggcaatgacgtcgatgaccagttgaagaggatcttctggctgctagggatgctcaccaaggagcagtggccctccatgaccaagctgccagactataagctgtacccattgtacccggccacaacatccctggtgaacatcgtgcccaaactcagtgccacagggagggatctgctgcagaatcttctgaagtgtaacccctgccaatgtatctcagcagaagaggccctgcagtacccctacttttccgacttctgtccgccctgggcccagggacccccagccaccaggctggggcctggcctatttaagccttag

SEQ ID NO: 3716 - DNA, 600 bp, Homo sapiens
acagatcttgtggaacattacaagaagaatcctatgatggaaacatgggaatatggcatcatgcgtgttaggaatatcagagaaagcaccgctcacaactatatgctaagagaacttaaactttcaaaggttgggcaagggaatatggagagaatggtctggcaataccacttttggacctggccggaccacggagtgcccattgaccccaggggtgtgctggacttcctggaggaggtgcaccataagcaggaacgcatcatgcatgcaaggccagtcgtggtgcacggcagtgctggaattggccggacagggacatacgttgtgattgatattctgactgacatcaacagagagaaaggtgttgactgcaacattgacgttctcaaaactatccagatggtgcagtctcagaggtcagggatggtccagacagaaacacagtaccgatttatctatatggcggtccagcattatactgaaacactacagcgcaggattgaagaagagcagaaaagcaagaggaaagaaatgagagcagacagtgctagagtgtatgaaaacgtgggcctgatgcaacagcagaagagtttcagatga

SEQ ID NO: 3717 - DNA, 600 bp, Homo sapiens
tttagactgtccccatggagctgcccaggtgatgaaaacagaactgggagagttgtgaaaaccgtggctgtgaaaatactgaaaaacgaggccaatgaccccgctcttaaagatgagttattagcagaagcaaatgtcatgcagcagctggacaacccgtacatcgtgcggatgatcgggatatgcgaggccgagtcctggatgctggttatggagatggcagaacttggtcccctcaataagtatttgcagcagaacaggtattgggctgttggttcctcaggagcacgccgtgagatgagcacccagggagtgacgaagggggctccaggggatactggggagggcgagtcagagcagggcccagaggggagcagcaggcagggcacaatttcgggccagttccggggcaggactgtaaaggtgactcggatgctcaagaaacgagcatacccagcagtgggccccagacttctcgcaggcccaggtcctcctgggtgcacagagacctaccagacaacggtccggctgcactggtgttgtgagatgcctgtgtcagaagacactgagttcctcactcgcctcctatcatgccgatga

SEQ ID NO: 3718 - DNA, 600 bp, Homo sapiens; identical to SEQ ID NO: 3717

SEQ ID NO: 3719 - DNA, 600 bp, Homo sapiens
cccactgaacgtacttttggtggccccaaattagagttttctcttttacaattgcctgggctccttgaagcttgtgataacatgcataagatgctcagagtcctcaattgtgactccttcccatcaactgagagaggagaaggatctaaggtagtgggccattatagggcccgtgccataattggggcagaagttggatccagctgtgagatgctgcgctggcccctgactgacacagagccttctctagaacaggtcggtggccacacaatgctgcccattcgctggatgcctccagagagcatcatgtacaggaaattcacgacggaaagcgacgtctggagcctgggggtcgtgttgtgggagattttcacctatggcaaacagccctggtaccagctgtcaaacaatgaggtgatagagtgtatcactcagggccgagtcctgcagcgaccccgcacgtgcccccaggaggtgtatgagctgatgctggggtgctggcagcgagagccccacatgaggaagaacatcaagggcatccataccctccttcagaacttggccaaggcatctccggtctacctggacattctaggctag

SEQ ID NO: 3720 - DNA, 600 bp, Homo sapiens; identical to SEQ ID NO: 3719

SEQ ID NO: 3721 - DNA, 600 bp, Homo sapiens
gtgctgatggctgagggcaacccgcccacggaactgacgcagtcgcagatgctgcatatagcccagcagatcgccgcgggcatggtctacctggcgtcccagcacttcgtgcaccgcgatttggccaccaggaactgcctggtcggggagaacttgctggtgaaaatcggggactttgggatgtcccgggacgtgtacagcactgactactacaggttctacaccttaatgaaagttctcccttccttgatgggggcagggaaacacatggatgattctccgaagaaaagctttgctgatcttgaacaatggagacttttcagcaaatggaaccaagatggaggaaaagatgtggcaaaaacagaaatggaatcagagattacagaagttctgattcatagagtattggaagaaaaatgtaatattaataggttttgctctaggcagactaaagggggtctcacttttgccatcacattggcgttatttgtcatcacaagtcaagttgcacaggcagtgcagcagccgctgtcctgtgctgatcccacttgcaatgacttgggtgaccttaaggatgtgacgttattaccagtgaactaa

SEQ ID NO: 3722 - DNA, 600 bp, Homo sapiens; identical to SEQ ID NO: 3721

SEQ ID NO: 3723 - DNA, 600 bp, Homo sapiens
cagctccttcacttcgctgccgacgtggcccggggcatggactacttgagccaaaaacaggtttgtccggaggacttcgctttggatatctttcctgtggagttccctctaaaggatctggctgccagaaacattttagttggtgaaaactatgtggcaaaaatagcagattttggattgtcccgaggtcaagaggtgtatgtgaaaaagacaatgggaaggctcccagtgcgctggatggccatcgagtcactgaattacagtgtgtacacaaccaacagtgatgtatggtcctatggtgtgttactatgggagattgttagcttaggaggcacaccctactgcgggatgacttgtgcagaactctacgagaagctgccccagggctacagactggagaagcccctgaactgtgatgatgaggtgtatgatctaatgagacaatgctggcgggagaagccttatgagaggccatcatttgcccagatattggtgtccttaaacagaatgttagaggagcgaaagacctacgtgaataccacgctttatgagaagtttacttatgcaggaattgactgttctgctgaagaagcggcctag

SEQ ID NO: 3724 - DNA, 600 bp, Homo sapiens
ctggacggcctggacttgaaactcagctctgcaccttggccttgtggcaagtcccctttggtggagaacggcgccctctccatgggtgttttcaaggctgggcccatggctgcatctctgggcatgtcccgatatctggatatctgctggaagcctcaagaagccactgaggcagggcagggtaggagcagccgctgtccacagggtctctccagcggcgagggacaggccctggcccagctggccacagacgccaggcaacaaaatgggcatgagtgtcaggggtcccagaaggcttccttgtggggggcgcttgagaacagcagggaggaccgcgtcttgtacagaagccgccacaagggtgacatctgtcctgtgagctactcttcctgccccgggatcaagacgtccgaccaccgccctgtgtatggcctcttccgggtgaaagtgaggccggggcgagacaacattccgttggcagctggcaaatttgatagagaactgtacttactaggaattaaaagacggatttcgaaggagattcagaggcagcaagcactacagagtcagaactccagcaccatctgctccgtttcttga

SEQ ID NO: 3725 - DNA, 600 bp, Homo sapiens; identical to SEQ ID NO: 3724

SEQ ID NO: 3726 - DNA, 600 bp, Homo sapiens
cttgctctgtccacggcgagcgggcttgcccatcttcacatggagattgttggtacccaaggaaagccagccattgctcatagagatttgaaatcaaagaatatcttggtaaagaagaatggaacttgctgtattgcagacttaggactggcagtaagacatgattcagccacagataccattgatattgctccaaaccacagagtgggaacaaaaaggtacatggcccctgaagttctcgatgattccataaatatgaaacattttgaatccttcaaacgtgctgacatctatgcaatgggcttagtattctgggaaattgctcgacgatgttccattggtggaattcatgaagattaccaactgccttattatgatcttgtaccttctgacccatcagttgaagaaatgagaaaagttgtttgtgaacagaagttaaggccaaatatcccaaacagatggcagagctgtgaagccttgagagtaatggctaaaattatgagagaatgttggtatgccaatggagcagctaggcttacagcattgcggattaagaaaacattatcgcaactcagtcaacaggaaggcatcaaaatgtaa

SEQ ID NO: 3727 - DNA, 600 bp, Homo sapiens; identical to SEQ ID NO: 3726

SEQ ID NO: 3728 - DNA, 600 bp, Homo sapiens
agaacgatattgaacagctttgctatgtgcttcgcatcttgggcaccccaaaccctcaagtctggccggagctcactgagctgccggactacaacaagatctcctttaaggagcaggtgcccatgcccctggaggaggtgctgcctgacgtctctccccaggcattggatctgctgggtcaattccttctctaccctcctcaccagcgcatcgcagcttccaagctgtgggagccccaggagagaggcaaggccgactttggggtcaagcaaagcttcctggtggagggcaggtttaagcatgagatgtttgaggaggtgttcgctgaagagagaaatgctcccctgcctgcccatccatctgagctgccgattcctcagcgtctagggggacctgcccccaaggcccatccagggcccccccacatccatgacttccacgtggaccggcctcttgaggagtcgctgttgaacccagagctgattcggcccttcatcctggagggcccttgcgagggttggtctcgaggcagaggtcatgttcccagccaagagtatgagaacatccagtcgagcagaggagattcatggcctgtgctcg

SEQ ID NO: 3729 - DNA, 600 bp, Homo sapiens
ggatgagccctgcaagcagccctgcaccacccccagagctgactgtggtcacccgtgtatggcaccctgccataccagctcaccctgccctgtgactgcttgtaaagctaaggtagagctacagtgtgaatgtggacgaagaaaagagatggtgatttgctctgaagcatctagtacttatcaaagaatagctgcaatctccatggcctctaagataacagacatgcagcttggaggttcagtggagatcagcaagttaattaccaaaaaggaagttcatcaagccaggagattagcagaggcatttcatatcagtgaggattctgatcctttcaatatacgttcttcagggtcaaaattcagtgatagtttgaaagaagatgccaggaaggacttaaagtttgtcagtgacgttgagaaggaaatggaaaccctcgtggaggccgtgaataagggaaagaatagtaagaaaagccacagcttccctcccatgaacagagaccaccgccggatcatccatgacttggcccaagtttatggcctggagagcgtgagctatgacagtgaaccgaagcgcaatgtggtggtcactgccatcag

SEQ ID NO: 3730 - DNA, 600 bp, Homo sapiens; identical to SEQ ID NO: 3729

SEQ ID NO: 3731 - DNA, 381 bp, Homo sapiens
atggatcctaggaagaggtctgatgacatcatggaggatgagctgtgtagggagatattcaacaggagggcggaagtagagtcctccaaggaggcatcactgcctcctcgatccagtccagcaaggcatcccagaggcaaggggacctgctgtggcttcccacgaccctgccgtcacactgaggcaccttgtgtccctgagcagagttacatgctccaagactccctggagcacgtgcagctgtttgacctgatgaggaggatgttagaatttgaccctgcccggcgcatcacactggccgaggccctgctgcaccccttctttgctggcctgacccctgaggagcggtccttccacaccagctgcaacccaagcagatga

SEQ ID NO: 3732 - DNA, 600 bp, Homo sapiens
cgacaatcccaagccaacgcccccgtgtatcagcagaacggtgagtctgcaacttccctccctgcttttaagcaggcgtttgatgaaagtccccactcagcatattaccaggggtttggccattgcttggggggattatggaagcatgtggtgaccaggggccccagtctggggacagctgccctgtccgaggagctgtcacctgcaaccggcatcacggccttcatggatggtgccttgggcatcccaggaaccaagcctacgcgaggggtcctctcgggagcttcgggggctgccatcctgcacaccgggaagaggtggttcatcatctgtccggtggctgagcaccccgcccccgaggcccctgaatcttcgcccccacttcctctaagctccctgccgccagaagccagccaaggtgctggggaactcgccttcctgtgcgcgtgggtgctggggcactcaagcctgccgcacatcagcctcgtgacctttgctctcactcagatctgtccacctcctgagcctgctgagatcataccaggccctttccttgtgagcccgcaggctccactctgcatccctgagcaggctgtgtga

SEQ ID NO: 3733 - DNA, 600 bp, Homo sapiens
actgactggccagagcaaggagtgccaaagtccggagaaggatttattgacttcatcggccaagtccataaaacaaaagaacagtttggccaagatggacccatttcagtccattgcagcgcgggcgttggaagaactggagtcttcataacgctaagcattgttttggaaagaatgagatatgaaggagttgtagatatcttccagactgtcaaaatgttaagaacacaacgaccagctatggtacagacagaggtattttttgatgtgggcagccagtcctgtgaagccattttcagggatggaaagcttggaagtccagtgccctgtgtaaatggatttgtgtgcctggtgtgccgcaccagctaccttctggctgtatatgaacatcatatatacctcaaggattcaaaatcaagggaagaagaaatcacagcaaagaaccaccatcttattcaggattgcttgaaaggtgcaaggagaaattgccagaatgctgcagttcagcacaagatatgtgctggtgtggcttctcacaatgaaacggactctgctttgacatcgccccttcccaccatactgctcataataacattttag

SEQ ID NO: 3734 - DNA, 600 bp, Homo sapiens; identical to SEQ ID NO: 3733

SEQ ID NO: 3735 - DNA, 600 bp, Homo sapiens
gactggatcaagggggagacctaccagtgcagggtgacccacacccacctgcagtccacgaccaagatcagcggcccatgtgctcccccacaggtctacgtgtttgcaacgctagaagagccgaggaaccaggacaagcgcaccctcacctgcctgatccagaacttctggcccaaggacatcttggtgcagtggctgtacaacgaggtgcagctcccggacacttggcacagcatgacgcagccccgcaaaaccaagggctctggcgtcttagtcttcagctgcctggaggttaccagggctgaatgggaacagaaaaacgagttcatctgctctgtggtccatgagacagcgactggctcacagaccgtcaagtatgctccagaatcactgacagagagcaagttttctgtggcctcagatgtttggagctttggagtggttctgtatgaacttttcacatacattgagaagagtaaaagtccaccagcgatctatatgatcatgacagaatgctggaacaataatgtaaatcaacgcccctcctttagggatctagctcttcgagtggatcaaataagggataacatggctggatga

SEQ ID NO: 3736 - DNA, 600 bp, Homo sapiens; identical to SEQ ID NO: 3735

SEQ ID NO: 3737 - DNA, 600 bp, Homo sapiens
tatcctgaccttgcaaagttacgcaaaggacctgataccgtaggcccctgtggactgcttcaaccatttgctgacccaataaaacttttcaccagagaacccttacgaccctcaacgtctactgagtactacacactattttatatccttattctatcaggctttgggatgatctcccatgtcgtgacgtattactctggaaaaaaggagccatttgggtatatgggcatacacttccttggcctatccggcgcagtaattacagtcttctgctttaaaacgaaaaactccttggctggctttttaccacaaggcacacctatgccacttatccctatactagtaatcattgaaaccattagcctatttattcaaccaatagcattagctgtgcaattaacagccaacattatagtcagtcatctactaatacatttaattgcaggagacacactagtactattagctattagttttcccacagcttcagttgcttttattattctaatcctactgactattctcaaattcgccatagaccttattcaggcttatgtcttcacactactagtaagcctttatctatatgacaacacataa

SEQ ID NO: 3738 - DNA, 600 bp, Homo sapiens
gtctacaaggtggagacgattggggatgcttacatggtggtatctggcctcccaggccgaaatggtcaacgccatgcaccagaaattgctcgtatggccctagcattactagatgcagtttcttcctttcgcatccgccaccgaccccatgaccagctgaggctacgcataggggtccatactgactctcccaacctgtttcttctcaaagggccagtctgtgctggggttgttggcctgaagatgccccgttattgtctttttggagacacagtgaacactgcttctcgaatggagtctaatggtcaagcgctgaagatccatgtctcctctaccaccaaggatgccctagatgagctaggatgcttccagctagagcttcggggggatgtggaaatgaaggtgatggcaggccatggggaggggggcatggaaagggagggtgaaagtgattatgggaatcatagggaaagagagggagacaaagggactaacatcgaagcatctgaatcatgtccactctcccacttccagggaaaaggaaagatgcgaacatactggctcttaggagagcggaaaggacctcctggactcctgtaa

SEQ ID NO: 3739 - DNA, 600 bp, Homo sapiens; identical to SEQ ID NO: 3738

SEQ ID NO: 3740 - DNA, 600 bp, Homo sapiens
cctgggacacctgcccgccgctgccgctcactaccctcatcccccgagctcccccgccgtatggagacagcactgccaggtcctggccctcccgctgtgggcccctcggctgaagagaagatggagtgcgagggcagcagccctgagccggaacctccagggccagcgccccagctgcctctggctgtggccacagacaacttcatcagcacctgttcctcggcctcccaaccctggtcccctagatcaggacccgtcctcaataacaatcccccagctgtggtggtgaactccccacaaggctgggctggggagccctggaaccgggcccagcatagcctgccccgggcggcagccctggagcggacagaaccctcgccacccccttcagctccccgggagcccgatgaggggctgccctgtcctggctgctgcctcggccccttcagctttggcttcctgtccatgtgcccccgccccacaccagctgttgcccgctaccgcaacctgaactgtgaggcgggcagtctcctctgccaccgagggcaccacgccaagccacccacacccagcctgcagctgcctggggcacgctcttag

SEQ ID NO: 3741 - DNA, 600 bp, Homo sapiens
caagtgcatgatgggaaaggtattagatttactgctaatgaggacattcgtccggaaaaggggtctggtgtggacgatcctgtgggagaagtctctattcaggtggacttgtttacacaccctggtactggggagcacaaggtcacagtgaaagtggtggctgccaatgacctcaagtggcagacagcgggtatgttccggcctttcgtggaggtgactatggttggcccacaccaaagtgataagaagaggaagttcacaaccaaatccaaaagcaacaactgggcccccaagtacaatgagacattccacttcctcctgggaaatgaggaggggcccgagtcctatgagttgcagatatgcgtgaaggattactgctttgcccgggaagatcgcgtgctagggctggctgtgatgcctctgagggatgtcacagccaagggcagctgtgcctgctggtgccccttgggccggaagatccatatggatgagacaggcctgaccattctccggattttatctcagaggagcaatgacgaggtggcccgagaatttgtgaaactcaaatcagagtctcgttccacggaggaggggagctga

SEQ ID NO: 3742 - DNA, 600 bp, Homo sapiens; identical to SEQ ID NO: 3741

SEQ ID NO: 3743 - DNA, 600 bp, Homo sapiens
ggcaggttgtctgggatcagaagttgtcactcattgtcatgttgacgactctcacagaacgagggcggaccaaatgtcaccagtactggccagatccccccgacgtcatgaaccacggcggctttcacatccagtgtcagtcagaggactgcaccatcgcctatgtgtcccgagaaatgctggtcacaaacacccagaccggggaagaacacacagtgacacatctccagtacgtcgcatggcctgaccacggtgtgcccgatgactcctccgactttctggaatttgtaaactatgtgaggtctctgagagtggacagcgagcccgtcctagttcactgcagtgctggaataggtcgaaccggtgtgttggtcactatggaaacagccatgtgcctaactgagaggaacctgcccatttacccactggatattgtccgaaaaatgcgagaccagcgcgccatgatggtgcagacatcagttccctcttggtgcctaacctggattagtaatgtgcattcaggtgaattttcagctgaggctctgagaactggtactctcagtgtgttctggtcatcttgtggcttagttgtagaagcag

SEQ ID NO: 3744 - DNA, 600 bp, Homo sapiens; identical to SEQ ID NO: 3743

SEQ ID NO: 3745 - DNA, 600 bp, Homo sapiens
gtcgagaatcaagatcagcaagaacccgaaccgtacagtgatgatgacgaaatcaatggagtgacacaaggtgatagacttcgggccttgaaaagcagaagacaatccaaaacaaacgctattcctctcacggaatacaatttcactatatctgaaatctcagagtaccgaggctccaaggatgctgcagagaagaaggtgaactggaatataggcaagagagtaattcttcaatccagtgttcagagctgtaaaacatctgaacctaacatttctggcagtgcaggcattactaaaagaaccaccagatctgcttcaaggaaaagcagtgttaaaagcttccctgccatgtatatccgaggctttgggcctaggggccttatcagtgtgaaattagtccccagtgcaaagcagccagtctcccaagagaccttggcagagctgggagttctgtgtgctttgccttttgaagactcattcagctctgccatgtctcctctacactgttttgtacaaccttactgcacacttaacactcgcatggggatgcagcagtgccccggcataaggattggaggactgtcaggcactgactcatga

SEQ ID NO: 3746 - DNA, 600 bp, Homo sapiens; identical to SEQ ID NO: 3745

SEQ ID NO: 3747 - DNA, 600 bp, Homo sapiens
agctacctgctggcctctatggccatcgaccggctggtggccatctgcaaccccttacactatgatgtggttatgaaaccatggcattgcctactcatgctattgggttcttgcagcatctcccacctacattccctgttccgcgtgctacttatgtctcgcttgtctttctgtgcctctcacatcattaagcactttttctgtgacacccagcctgtgctaaagctctcctgctctgacacatcctccagccagatggtggtgatgactgagaccttagctgtcattgtgacccccttcctgtgtaccatcttctcctacctgcaaatcatcgtcactgtgctcagaatcccctctgcagccgggaagtggaaggccttctctacctgtggctcccacctcactgtagtggtcctgttctatgggagtgtcatctatgtctattttaggcctctgtccatgtactcagtgatgaagggccggataaggaagaactatcacatttctgaggctcgatctgtacttcaagaagcctccttcagagattcagagcctgatcttaaccccatggcagatcccgaagtctttttaggcccctga

SEQ ID NO: 3748 - DNA, 600 bp, Homo sapiens
cggcctgccgaggctgagcgctttgcaataagcatcaagttcaatgatgaggtgaagcacatcaaggtggtggagaaggacaactggatccacatcacagaggccaagaaattcgacagcctcctggagttggtggagtactaccagtgccactcactgaaggagagcttcaagcagctggacaccacactcaagtacccctacaagtcccgggaacgttcggcctccagggcctccagccggtccccagcttcctgtgcttcctacaacttttcttttctcagtcctcagggcctcagctttgcttctcagggcccctccgctcccttctggtcagtgttcacgccccgcgtcatcggcacagctgtggccaggtataactttgccgcccgagatatgagggagctttcgctgcgggagggtgacgtggtgaggatctacagccgcatcggcggagaccagggctggtggaagggcgagaccaacggacgggctcctccttcccgatccttcgtcctcagaggctcctccttcctgatccgccgtcctcagaggctcctccttcctgatccctcgtcctcagaggctcctgcttcctga

SEQ ID NO: 3749 - DNA, 600 bp, Homo sapiens; identical to SEQ ID NO: 3748

SEQ ID NO: 3750 - DNA, 600 bp, Homo sapiens
cgggagatcgactacactgcatacccctggtttgcaggtaacatggagaggcagcagacggacaacctgctcaagtcccacgccagcgggacctacctgatcagggagcggcctgccgaggctgagcgctttgcaataagcatcaagttcaatgatgaggtgaagcacatcaaggtggtggagaaggacaactggatccacatcacagaggccaagaaattcgacagcctcctggagttggtggagtactaccagtgccactcactgaaggagagcttcaagcagctggacaccacactcaagtacccctacaagtcccgggaacgttcggcctccagggcctccagccggtccccagcttcctgtgcttcctacaacttttcttttctcagtcctcagggcctcagctttgcttctcagggcccctccgctcccttctggtcagtgttcacgccccgcgtcatcggcacagctgtggccaggtataactttgccgcccgagatatgagggagctttcgctgcgggagggtgacgtggtgaggatctacagccgcatcggcggagaccagggctggtggaagggcgagaccaacggacgg

SEQ ID NO: 3751 - DNA, 600 bp, Homo sapiens
tatggcgtctgcaccaagcagcgccccatcttcatcatcactgagtacatggccaatggctgcctcctgaactacctgagggagatgcgccaccgcttccagactcagcagctgctagagatgtgcaaggatgtctgtgaagccatggaatacctggagtcaaagcagttccttcaccgagacctggcagctcgaaactgtttggtaaacgatcaaggagttgttaaagtatctgatttcggcctgtccaggtatgtcctggatgatgaatacacaagctcagtaggctccaaatttccagtccggtggtccccaccggaagtcctgatgtatagcaagttcagcagcaaatctgacatttgggcttttggggttttgatgtgggaaatttactccctggggaagatgccatatgagagatttactaacagtgagactgctgaacacattgcccaaggcctacgtctctacaggcctcatctggcttcagagaaggtatataccatcatgtacagttgctggcatgagaaagcagatgagcgtcccactttcaaaattcttctgagcaatattctagatgtcatggatgaagaatcctga

SEQ ID NO: 3752 - DNA, 600 bp, Homo sapiens
accagagaaagtggcaaagcttcatccagtctaggtcttcaggattttgatttgctccaggtaataggaagaggaaagtatgtaaatggaggagacctaatgtttcatatgcagcgacaaagaaaacttcctgaagaacatgccagattttactctgcagaaatcagtctagcattcaattatcttcatgaaggaggagattatggtttcagtgttgactggtgggctcttggagtgctaatgtttgagacgatggcaggaaggactccatttgatactgttgggagctccgataaccctgaccagaacacagaggattctctcttccaagttattgtggaaaaacaaattcacataccacgttctctgtctggaaaagctgcaagtgttctgaagagttttcttaacaaggaccctaagaaacgactgggttgtcatcctcaaacaggatttgctgatattcagggacacccgttcttccaaaatgttgattgggatatgatggagcaaaaacaggtggtatctccctttaaaccaagtatttctggggaatttggtttggacaactttgattctcagtttactaatgaacctgtctag

SEQ ID NO: 3753 - DNA, 600 bp, Homo sapiens
ccaaatacgtgccgaggagggggctgctattttggaccagatgttacttccaagattcttaataaataccagttgaagatgctcatcaggtctcatgaatgtaagcccgaagggtatgaaatctgtcatgatgggaaggtggtgactatattttctgcttctaattattatgaagaaggcagcaatcgaggagcttacatcaaactatgttctggtacaactcctcgatttttccagtaccaagtaactaaagcaacgtgctttcagcctcttcgccaaagagtggatactatggaaaacagcgccatcaagatattaagagagagagtgatttcacgaaaaagtgaccttactcgtgctttccaacttcaagaccacagaaaatcaggcctgatctccgtggaagaatttcgtgccatgtggaaactttttagttctcactacaatgttcacattgatgattcccaagtcaataagcttgccaacataatggacttgaacaaagatggaagcattgactttaatgagtttttaaaggctttctatgtagtgcatagatatgaagacttgatgaaacctgatgtcaccaaccttggctaa

SEQ ID NO: 3754 - DNA, 600 bp, Homo sapiens
cctgaaaatattagtcattcagagcaactcaaggaaaaagagaagcaaggatttttcaggtcaatgaaaaagaaaaagaagaaatctcaaacagtacccaattccgacagccctgatcttctgacgttgcagaaatccattcattctgctagcactccaagcagcagaccaaaggagtggcgccccgagaagatctcagatctgcagacccaaagccagccattaaaatcactgcgcaagttgttacatctctcttcggcctcaaatcacccggcttcctcagatccccgcttccagcccttaacagctcaacaaaccaaaaattccttctcagaaattcggattcaccccctgagccaggcctctggcgggagcagcaacatccggcaggaacccgcaccgaagggcaggccagccctccagctgccaggtcagatggatcctggttggcatgtgtcctctgtgaccaggagtgccacagagggcccttcctactctgaacagctgggtgccaaaagtgggccaaatgggcacccctataacagaacaaatcgctcacgaatgccaaatctgaatgatttaaaagagacagccttgtaa

SEQ ID NO: 3755 - DNA, 426 bp, Homo sapiens
atgagtcaagcagaattgttcagaattccaagttcaacattcactctccgccagtgccaacttagagttaaacgagaccccaaaagacctataccttctaggtctaaggagaaagcaattggcttccttagagtccaaatcctttataaaattttcctagacgaacctgttgtggacaaaaacttctcaaatcacactcagtctgaggagaataagaaatgggttctcaatcataaaggtgccacgttacaagaggcaagggaaattttggtgacacatttaagtaaaaaatgtatacacagggaccttgctgtaagaaactgcctggagcctggaatgacaaatcagcaaccacaagagcaagtggaaagaagatactggatgtcagtctcttggcagtgtccacagagtattttaataaaataa

SEQ ID NO: 3756 - DNA, 426 bp, Homo sapiens; identical to SEQ ID NO: 3755

SEQ ID NO: 3757 - DNA, 600 bp, Homo sapiens
ccccggaatcgtgtgctgggctggtcccccttggatctctttgactatatcacagagaagggcccactgggtgaaggcccaagccgctgcttctttggccaagtagtggcagccatccagcactgccattcccgtggagttgtccatcgtgacatcaaggatgagaacatcctgatagacctacgccgtggctgtgccaaactcattgattttggttctggtgccctgcttcatgatgaaccctacactgactttgatgggacaagggtgtacagccccccagagtggatctctcgacaccagtaccatgcactcccggccactgtctggtcactgggcatcctcctctatgacatggtgtgtggggacattccctttgagagggaccaggagattctggaagctgagctccacttcccagcccatgtctccccagactgctgtgccctaatccgccggtgcctggcccccaaaccttcttcccgaccctcactggaagagatcctgctggacccctggatgcaaacaccagccgaggatgtacccctcaacccctccaaaggaggccctgcccctttggcctggtccttgctaccctaa

SEQ ID NO: 3758 - DNA, 600 bp, Homo sapiens; identical to SEQ ID NO: 3757

SEQ ID NO: 3759 - DNA, 600 bp, Homo sapiens
tctatagcttttgaatgtacacagcgaaccacaggatggggccaaaaggccattgaagtgcgctctttgcaatccagggttctggaaagtgagctgaagcgcaggtcaattaagaagctgagattcctgtgcacccggggtgacaagggtacactgacttcagctactttaggggacagtgttatgagcgaaggaataaaagtatcatcacaaattggaattagctcagacaggaaaagaaatcctaagtctaaaaaagaaaaaaagaaagaggccagtgctgctttcattgcctttgttcctaccgttttccaggaggcaagagaggggattcctcaaaggttgaaggagagccagagtattgaaagaaaactttatattggcatcaggacaatgcaatacgggggcctctatgaattaaagatcatggcaggacaggaaccaactgagccaatgccagcaggaatgggtagcagccagcatggaaaggaaatagcagcagaagtcaatgtggacagaggctacccactttggacaaaaaacctctcccctgacatgaaggcaatacatgagcaagtcccctccttctatgttatttaa

SEQ ID NO: 3760 - DNA, 600 bp, Homo sapiens; identical to SEQ ID NO: 3759

SEQ ID NO: 3761 - DNA, 600 bp, Homo sapiens
actttatatggcgatggtgctgctaaccagggccagatattcgaagcttacaacatggcagctttgtggaaattaccttgtattttcatctgtgagaataatcgctatggaatgggaacgtctgttgagagagcggcagccagcactgattactacaagagaggcgatttcattcctgggctgagagtggatggaatggatatcctgtgcgtccgagaggcaacaaggtttgctgctgcctattgtagatctgggaaggggcccatcctgatggagctgcagacttaccgttaccacggacacagtatgagtgaccctggagtcagttaccgtacacgagaagaaattcaggaagtaagaagtaagagtgaccctattatgcttctcaaggacaggatggtgaacagcaatcttgccagtgtggaagaactaaaggaaattgatgtggaagtgaggaaggagattgaggatgctgcccagtttgccacggccgatcctgagccacctttggaagagctgggctaccacatctactccagcgacccaccttttgaagttcgtggtgccaatcagtggatcaagtttaagtcagtcagttaa

SEQ ID NO: 3762 - DNA, 600 bp, Homo sapiens; identical to SEQ ID NO: 3761

SEQ ID NO: 3763 - DNA, 333 bp, Homo sapiens
atcctctattgtacagatgggaagttgaatagtttcatggaagccagagaaaagaaagtttccagaaagaagggatgggcagcagtggggcaggtcctgcctctgcacgaggagatagccctgcacaagtaccttaagcaccgcaatatcgttcagtacctgggctctgtttcagagaacggctacattaagatatttatggagcaggtgcctggaggaccctccttacagacccacattaaaggcaagtacgcaagcctcgattctcacgcaacaggccccagcagcatggaacagacagcagaacttgacctttccccaaccctgccctag

SEQ ID NO: 3764 - DNA, 333 bp, Homo sapiens; identical to SEQ ID NO: 3763

SEQ ID NO: 3765 - DNA, 364 bp, Homo sapiens
atgaaggaaccgacaatcaagttttacaccaaacagatcctggagggccttaagtatcttcatgaaaaccagatcgtgcacagagacataaagcacttgatgatgttattttccgaaggcgataatgttctggtgaacacctacagcggagtggtgaaaatctccgattttggaacctcgaaacgtcttgcgggtgtgaacccctgcacagagacttttactgagctccgagcccactttgagcctacctgtgagactgaaggggtagataaggacatggatgaagcggaagagggctatcccccagccaccggacctggccaggaggcccagccccaccagcagcacctgagcctccagctgg

SEQ ID NO: 3766 - DNA, 492 bp, Homo sapiens
atgcagaacctaaaggcagatccagaaagttggactcagaaagtggttgccataaaaatcattgatctggaagaagctgaagatgagatagaggacattcaacaagaaatcacagtgttgagatgtatgaaggatacaaaagtatggataataatggaatatcctgatggaggctccacactagatctgttagaacctggcccgttagatgaaacccagatcattactatattaagagaaatactgaaaggacttgattacctccattcggagaagaaaatccatagaggtgttaaagcggccaacgtcctgctgtctgagcactgcgaggtgaagctggtggactttggcatggctggccaactggcagacacccagaccaaaaggaacacttttgtgggcaccccgttctggatagcacccgaggtcatcaaacagtcggcctatgactcaaaggcagacatctggtccctgggcataacaactatttaa

SEQ ID NO: 3767 - DNA, 492 bp, Homo sapiens; identical to SEQ ID NO: 3766

SEQ ID NO: 3768 - DNA, 600 bp, Homo sapiens
aaatttacggagaccaaaagaacccaccaagaaggagaagcagttatgccaccactggaagatgacgatgaatttatggagactaaaagaaaccaagaacatgaaggcaaggtagactctcccaaaagaacatcttctggtgacttcaaattctcttcatcttattctgcttgtgctgctattggaacagagaagggaagcatccaggttccggactggccttttgatgatggtacagcaccatccagccagataattgataactggttaaaacttatgaaaaataaatttcatgaagatcctggttgttgtattgcaattcactgtgttgtaggttttggctctaatgggtttttttgccttggtttcactggggagagctacacactgaggcttccagatgaaatgcttgcaattccttctgagagatgcagcagaatatttgtggaagaatataaacctgaagaggtttacttgaatccgaaaagtttccacttgcagcaggccgcggttgtagaaaggtcaaagaagatttatctacaaattgagatgaaaggattgaacagtattttggaccgggtgctctcaattcagaattga

SEQ ID NO: 3769 - DNA, 600 bp, Homo sapiens
aggtatgttcttgatgaccagtatgtcagttcagtcggaacaaagtttccagtcaagtggtcagctccagaggtgtttcattacttcaaatacagcagcaagtcagacgtatgggcatttgggatcctgatgtgggaggtgttcagcctggggaagcagccctatgacttgtatgacaactcccaggtggttctgaaggtctcccagggccacaggctttaccggccccacctggcatcggacaccatctaccagatcatgtacagctgctggcacgaggcaagtgtattctctggagtctccatcctttcagaggatgctgctacacaggagaaggaccacaagcgttacctggtgggcacagtgaggactgttctggagaaaaccccaaaattaagttacggaaataagcaggtttttctttctgtgttacagttggacactatgtcacatgcacatgggtcctttgccatgtctggggaggctcttttgaaggtgttagatgatgaaattggttcctgcagaaattattcttgcactgtgctgaaccaagtttatgaacttcataaagatcttgtggcaactacaaaggatgtttag

SEQ ID NO: 3770 - DNA, 279 bp, Homo sapiens
atgctgtatgtttgttttacagatctaaagcgggaagccagtatctgtcatatgctgaaacatccacacattgtagagttattggagacatatagctcagatggaatgctttacatggttttcgaatttatcagtgcaagaggaggccttagctccatttatagcacctcagacattcccaaccccaaacccacctactatgttgacacatttcctggtgctccaggccttattgttctttgtcggaacaaatgccttgaaatgctgctgtcctcttaa

SEQ ID NO: 3771 - DNA, 279 bp, Homo sapiens; identical to SEQ ID NO: 3770

SEQ ID NO: 3772 - DNA, 600 bp, Homo sapiens
cctctagaatcccggtgcccgcccgttcgccgtgacgcggccggcgccccgcgcatgcgccgctcggcccgctcccctttccctgggccaccgcctcccgaccggttggagtgggcggagcctgtggttctggaagccgcgccgccgacgggggaggagggcgtgtctgcgcgaggcggccctccacgctgcggccgctatcccctccggaccatggccgacgacgacgtgctgttcgaggatgtgtacgagctgtgcgaggtgatcggaaaacagcagcagcaacagcaaagcccaggctatactgcctctgctcccaactggccccagcaggtggtctcttctgtagggagcagtaagcagctgcagccgcagcgaagccatgtgtcttcctgccctccacctcatggcttaaggagacccaggccccagggtcccttcagtgttgtacgacgatgtatcaacagagaaactgggcaacaatttgctgtaaaaattgttgatgtagccaagttcacatcaagtccagggttaagtacagaaggtgctaaagttgaacgagctgatggatatgaaccaccagtccaagaatctgtttaa

SEQ ID NO: 3773 - DNA, 600 bp, Homo sapiens; identical to SEQ ID NO: 3772

SEQ ID NO: 3774 - DNA, 600 bp, Homo sapiens
agtaatattttatacatggatgaatcagccagtgcagattcaatcaggatatgtgattttgggtttgcaaaacaacttcgaggagaaaatggacttctcttaactccatgctacactgcaaactttgttgcacctgaggttcttatgcaacagggatatgatgctgcttgtgatatctggagtttaggagtccttttttacacaatgttggctggctacactccatttgctaatggccccaatgatactcctgaagagatactgctgcgtataggcaatggaaaattctctttgagtggtggaaactgggacaatatttcagacggagcaaaggatttgctttcccatatgcttcatatggacccacatcagcggtatactgctgaacaaatattaaagcactcatggataactcacagagaccagttgccaaatgatcagccaaagagaaatgatgtgtcacatgttgttaagggagcaatggttgcaacatactctgccctgactcacaagacctttcaaccagtcctagagcctgtagctgcttcaagcttagcccagcgacggagcatgaaaaagcgaacatcaactggcctgtaa

SEQ ID NO: 3775 - DNA, 600 bp, Homo sapiens
cctgatgggcagattacagtgggacaaagaattggatctggatcatttggaacagtctacaagggaaagtggcatggtgttgtggcagtgaaaatgttgaatgtggcagcacctacacctcaccagtttgaacagttgtctggatcttttttgtgtatggcaccagaagtcatcagaatgcaagataaaaattcatacagctttcagtcagatatatatgcatttgggattgttctgtatgaattgatgactggacagttaccttattcaaacatcaacaacagggaccagataatttttatggtgggacaaggatacctatctccagatctcagtaaggtacggagtaactgtccaaaagccatgaagagattaatggcagagtgcctcaaaaagaaaagagatgagagaccactctttccccaaattctcacctctattaagctgctgacccgctcattgccaaaaattcaccacagtgcatcaaaaccctccttgaattgggctggtttccaaacagaggattttagtctatatgcttgttcttctccaaaaacacccatccaggcagggggatatggtgcatttcttgtctactga

SEQ ID NO: 3776 - DNA, 600 bp, Homo sapiens; identical to SEQ ID NO: 3775

SEQ ID NO: 3777 - DNA, 600 bp, Homo sapiens
gtcatgagggaaaataagaaccctaatattgttaattatttagatagctacttggtgggtgatgaactatgggtagtcatggaatacttggctggtggctctctgactgatgtggtcacagagacctgtatggatgaaggacagatagcagctgtctgcagagagtgcctgcaagctttggatttcctgcactcaaaccaggtgatccatagagatataaagagtgacaatattcttctcgggatggatggctctgttaaattgactgactttgggttctgtgcccagatcactcctgagcaaagtaaacgaagcactatggtgggaaccccatattggatggcacctgaggtggtgactcgaaaagcttatggtccgaaagttgatatctggtctcttggaattatggcaattgaaatggtggaaggtgaacccccttaccttaatgaaaatccactcagggcattgtatctgatagccactaatggaactccagagctccagaatcctgagagactgtcagctgtattccgtgactttttaaatcgctgtcttgagatggatgtggataggcgaggatctgccaaggagcttttgcag

SEQ ID NO: 3778 - DNA, 600 bp, Homo sapiens
ttcttgaaagactgtgtaggcccagaagtggagaaagcctgtgccaacccagctgctgggtctgtcatcctgctggagaacctccactttcatgtggaagaagaagggaagggaaaactctgggaacaagacaagatccacctgatcaataatatgctggacaaagtcaatgagatgattattggtggtggaacggcttttaccttccttaaggtgctcaacaacatggagactggcacttctctgtttgatgaagagggagccaagattgtcaaagacctaatgtcccaagctgagaagaatgcagcaagaagtatgctgagactgtcacttgggctaagcagattgtgtggaatggtcctgtggggggtatttgaatgggaagcttttgcccagggaaccaaagccctcatggatgaggtggtgaaagccacttctaggggctgcattaccatcataggtggtggaaacactgccacttgctgtgccaaatggaacacagaggataaaatcagacatgtgagcactacgggtggtgccagtttagagctcctggacagtaaagtccttcctggggtggatgctctcggcaatatttag

SEQ ID NO: 3779 - DNA, 384 bp, Homo sapiens
atggtcgtggacgtagtcctctttaaggataagaaatttaaaactacagaaatgctaactgatagacgtgttaaattcagacgtactggcttctgtttcatggaacctatgtttatttcttctgctgtcccacatttaattgataacaacatcactacaagtataagaaaaggaagcagaaacggggcgaatgatgtgaaacaccatcggtggttccgctccgtggactggaaagctgttccgcagagaaaactgaagcctcccatcgtgcccacgatagctggcaacggcgacacttccaacttcgaaacttaccctgagcatgactgggacacagccgcgcccgtgccgcagaaggatttagaaatcttcaagaatttctga

SEQ ID NO: 3780 - DNA, 600 bp, Homo sapiens
gcttgctgcttcaacaggattctcaacgactgcattcaaagcaatggatgtgtattcaatgtcacttgtgatgtgggaaactatcaatcggacaaaacttctgccttcagaatctccagaataccagcaaccgtatccagaacttcagaataccaaagttcaggatgtcagaacccatgtgatcactaataaaatgcgtccaacatggcgaccatcagtcctttcgcatgaattgatgagcttgttcgctagagtggctgaggatatgtgggatgtggatgcggattcaagaatcactgctggttgtgcattcaatcaactctggcttcatacaatggccgccagaggacgttcagaaggatatcatagtggagacgatgagagtaatccattggaagttagtgatccacttgaggtttatcatgaccttccggggaaatatccacatccatcggcggatccaatggacgacgataatccaccaccgccgaccgttccgatctgtactgaagatgcagaccgaccgccgaccgccgaccgacagtcgaccgagcttaccaaattcatgaattttcgggtcaacatcccagagagtgtctg

SEQ ID NO: 3781 - DNA, 600 bp, Homo sapiens
caggcccagagcctccactgtggccttaacctcactccttgctgtgtcttgggaacctgtgattacccagctgaagacacagccaggaaaacgtggaggggaggtggaaaggccctggagcccacccgagagaccccaccagagcctgccaccctgggagctgctgcaatggggccaggccgagtcacccactggtggaggagcagcacagctgcagctgcccaaactgctgctgtgggcccaggcatctccctgcactctcggggacccaggaaggcccctcttatgcctgcaggctcagaagtgcctcctcctactgtctggcttctccctgctgtcagcacccactccaataacagagtaaagttgatcccaagcctgggcgctgtcacaacctggctggggactttgggcgccaagaagcatgggagagaggctaaaggggagctgaaggcagctcggcactggcctgcaggtgccccttggcatgaacaacctcagctccatgaacagcggcaggaggcacacaggttcctgggcagaggggggcaggtccccaatgaagccccaccttcaagctggaaagggcctaaaggctga

SEQ ID NO: 3782 - DNA, 183 bp, Homo sapiens
tcagacaactccatgtccccagaaatgatggcagggataacacacaatgagagggtgtatctgtggggcactggggtgctctgctgtgaatggccggtgggaaatcttcccttcaagagcacttcacatactgagacctccagatgcactttcaagggagatgtgtggcttccacaccagtgc

SEQ ID NO: 3783 - DNA, 600 bp, Homo sapiens
tcttgaatgtcagcattatggcaattccttgcctgtgttcagtggcacctagaggcttggcacctaataccagattaaataatggaagtatggctcttataattgcccgaaacacttctcggccagaatttataaaacacctgaaaagatatgccagtgtaaaaaatcagttcaattttccatttgttgagacttacactgttgaggaagtaaaagttcatccaaggaataatactggtggatataatccagaggaggaggaggatgaaactgcttcagaaaattgtttcccttggaatgtagatggtgacttaatggaagttgcatcagaggtccatattagattgcatccaagacttatcagtctttatggaggaagcatggaagaaatgattccaaagtaacatgtaattgtttctaaaagaaatgtacaaactagaattttaatataaagaaatgtggccatgctttaaacctaacggatatcctaatagaaattgatgttactaacaattagcctctagggctttaaaagtcaagatgaaatatcaattcaaattctgtttttagatatcaattcaaattcttttttttacaatg

SEQ ID NO: 3784 - DNA, 600 bp, Homo sapiens; identical to SEQ ID NO: 3783

SEQ ID NO: 3785 - DNA, 1155 bp, Homo sapiens
cctcgattcatccaaaagctgaggagccaagaagtagcagaagggagccgagtttatctggagtgtagagtcactggaaaccccactcctcgagtcagatggttctgtgaagggaaagaactgcacaacactcctgatattcaaatccactgtgagggaggggacctccataccctgatcatagcagaggcctttgaggacgacacaggtcgctacacctgtttggctacgaatcccagcggctcagacacaacatctgctgaggtgttcattgaaggtgccagttcaacagattctgacagtgaaagtttagctttcaaatcaagagctggagctatgccacaagctcaaaagaaaacaacttctgtttccttgacaataggatcatcatctccaaagacaggggtgaccacagctgtgattcaaccactgtctgtccctgtgcaacaggttcacagtccaacttcatatctctgccgacctgatggaaccactactgcctactttcctcctgtttttacaaaggaactgcaaaacacagccgtggcggaaggccaggtggtggttctggagtgccgggtccgtggggcaccccctctgcaggtccagtggtttcggcaagggagtgaaatccaagactctccagatttccgaattctacagaaaaaacctagatctacagctgaacctgaggagatttgcaccctagttatcgctgagactttccctgaagatgcagggatctttacatgttcagcaagaaatgattatggatcagcaaccagcactgcccagctggttgtcacctcagccaacactgaaaactgtagttacgagtcaatgggagaatccaacaatgaccacttccaacactttccacctccccctccaatcttggagacaagttccttggagttggcttcaaagaaaccatctgagatccagcaggtgaacaaccctgagttaggcctgagcagggcagcccttcaaatgcaattcaatgctgctgagagggaaacgaacggagtccatcccagccgtggagtaaatggactgattaacggcaaagctaacagtaataaatctcttccaacaccagctgtcctgctttcacccactaaggagccaccacctctgcttgccaaaccaaaactg

SEQ ID NO: 3786 - DNA, 330 bp, Homo sapiens
ccaacccctccccaccaataaaacagatcaatggaaacaagattattctcacatacctgaggcagcccacctactgctcttactgcaggaagtttatctggggagtatttgggaaacagggttatcaatgccaagtgtgcacatgtgttacccataaacactgccatcatctaaccattacagcctgtatttgccaaaacaatattaaccaagaagattcaaagattgccaaacagaggttcagaatcaacatctcacacaacttcagcatccacaactacaaatcactaccgctttgcaatcactgtggcgccttgctttgggggataa

SEQ ID NO: 3787 - DNA, 600 bp, Homo sapiens
aaggtgatctcaagtctaataacatttttcaacacaaagatgagtgactctcgtctggccacagtgaagacagagtgaagcagggcccagcccttggagaagccttcaggttctgttttgtggatcgcagctgacctgaaccccttcagcttccagtcggacgtctatgccagtgtggctgtgctctaaaatctcacgactggctcactgccttacagccacattggcagctgtgaccagattatctttatggtgggctgtgactcttcatccctggacctcagaaaaatctccagcaactgcccgaagccatgtggtgcctgctgtctgactgcctcatgttccagcaaaaggagtggctccttttgccccagactctcaccacaatttttctgctgcaagggtcgctccccaagatggaggggaatacctctaaatcgtccttttatcaaacccaagctgatgagtttccttcctgactactcaacacaggctgtcttgagcctgaccttactcccagccactagggagccaatctgagcccgccatgccaaggagccctgcccaccaacgaatcaatgttttatctctgtcctgaag

SEQ ID NO: 3788 - DNA, 600 bp, Homo sapiens
cataattaagagcttctggtgctgtccatttaatgggaatctgctttaagtcagaagatgagtacacaccaccatcctcttgacgagacattccaaagtcactgattttcagaacattattttcacctccaggcagtttcttacagcaaggtccctgtgtatacattttttactcgagatacaccatccagaatcagcatctaatgaaaatttcactgagttttagttcattcttctttctctgaaaggagaggaaatcgcctccaggaaccagttccttaatgacgtagataggccgtctttgtgtgtgaactcctatacttttgacattactgggatgattatattgcttgaggattttggcttctagtaaaaattttaatttcagttcctggggaagacgttcttgacgtgttttaacagcaacagcaattttatcctttaatgtgaccttaaatgtgtcaccaaaatttcccttgcctcttgtaacgtggcacctttatgattgagaacccatttcttattctcctaatggccatactgtgataccatgatgctcttaattggaacattgactttttttttttttgcaatttaaac

SEQ ID NO: 3789 - DNA, 480 bp, Homo sapiens
atggagaatgtgtctgcattgtcactgttgactgtggagagtcccacgtccatgtttgactattgtgatgactctttggagagggtcaagtctgctcttgacatcttttccatgatcatctacacagtgactttcttcctaggcttggctggcaatggccttgtcatttgggtagttggattccacatgtcctgcacagtcaacacggtccttgcgactgtggtaaccaccttcttcctctgctggttgcccttgcaagtgtccctgtggctggacttcacatcatttcgggaagacagagagggcctgaaccaggtggccttactcctaagacccctggccttgtctatggcctttatcaacagctgtctcaatccagttctctatgtcttcattgggcatgacttctgggagcacttgctccactccctgctagctgccttagaacgggcacttagcgaggagccagatagtgcctga

SEQ ID NO: 3790 - DNA, 480 bp, Homo sapiens; identical to SEQ ID NO: 3789

SEQ ID NO: 3791 - DNA, 1400 bp, Homo sapiens
cagcagtatttggcaacctgagaaccaggatgcccgttatacacagcaaagaatgaccacctttcaagtccacttggcaaagcaatcacagccccttttaatgagactgtccagaattattctcttaccgaacatcttttcctactctcagacctgccatcgttacatcttccacgaaggaactccacctttgagtgctaaagtgaattggggcaagataagaggaagagaaatcccacagacttcaatgatcccagagtcaggtcaaaagcccctgacttataccggtgactctaggaatggaaaaaaggaggaagctggagagactgtgatgaaggagagaaaggaagaacaagtagcagtcaagatgaaaataaaatttcagttttctgatggccaggagaaagctgtatctgtgatgaaagtcactgcattgaaaaatctcccttctggctacaactggcacatttcagcatgttctgggccatgccctcagcagatattctgagtacttgcccaactctgcctccttcttcgctgcttctggtgatactttgggtgcatttggaaaccagagaaaaaatcacacacatgttgtcttgacttcccttatgcaaacaggtgtcgactatttcattgtaaactttctcagggtcatcagtgacttcaagcctggatcttacaaaatcacagagctcttcatttcccataacatcccagatactatcacatgcaaggataatgaagtgatcatcttcttcagatctttcagtgtcatggacttcaggctctggaaacctgttctgattccattctttacattttccaaagaaggtgctcctgcagaccctgtaaatcctggttatcggcgatgtgatctaacaaatgctcacagcagtatttggcaacctgagaaccaggatgcccgttatacacagcaaagaatgaccacctttcaagtccacttggcaaagcaatcacagccccttttaatgagactgtccagaattattctcttaccgaacatcttttcctactctcagacctgccatcgttacatcttccacgaaggaactccacctttgagtgctaaagtgaattggggcaagataagaggaagagaaatcccacagacttcaatgatcccagagtcaggtcaaaagcccctgacttataccggtgactctaggaatggaaaaaaggaggaagctggagagactgtgatgaaggagagaaaggaagaacaagtagcagtcaagatgaaaataaaatttcagttttctgatggccaggagaaagctgtatctgtgatgaaagtcactgcattgaaaaatctcccttctggctacaactggcacatttcagcatgttctgggccatgccctcagcagatattctga

SEQ ID NO: 3792 - DNA, 548 bp, Homo sapiens
gacgccccccagccactgcacctttcccttcctgcgggtggggagactgagcccctttggctaagacgggttggggagcagaaccagggcctgcctccagttggccttgtggcctcagggaactcgttcccttcccgagcctctgtttctgcatttgtataatggggctggtaggacctccgagtaaaaaggccggacacagtgggggtgctctggagaggctgtggctgggatgggcgtggggagcccgcactctgctcccattgctaccctcacagcctctgcaggggctttgagcacgccagcaccttcactccagcctgtttcctgatctggcgggcacacagtgcaatgtgaaagcaggtgtgcgtgcacacccacacccgcatgcccacacatccatacactccacaccatcacacacacacacccacacacatccatacagtccataccatcacacacacccgcacacatccatacagtccacaccatcacacacacacccgcacacatccatacagtccacccgtcccgaaactgagaca

SEQ ID NO: 3793 - DNA, 548 bp, Homo sapiens; identical to SEQ ID NO: 3792

SEQ ID NO: 3794 - DNA, 414 bp, Homo sapiens
cagacctcagaggacaagccttctgaaagggatgccctgcagcctggctgcaacattgtgaccatagtttatacactgtacagtagcacaaccctggtggctctctccacagggcaaggggtggacctcttcatgcttgacttggctcttggtgaatttgtactggtggaaaaagatgtcaagattagtaagaaaggaaagatttacaacctgaatgagggcaatgctaagtattttgacagggccgtcaccgaatatgtgcagaaaaagaaattccctgaggacagcagtgctccctatggggtcaggtatgtgagctctatggtggtggatatgcaccacatcttggtctacagagaaatcttcatgtacccaggcaacaagaagagccctcagggcaagggaattctcctt

SEQ ID NO: 3795 - DNA, 600 bp, Homo sapiens
  misc_feature (504)..(524): n is a, c, g, or t
tgctggaggagctgctcagtctgaggctgatgatctagagtctaggatgaagctctgagctaagccttacgggtctgctccctgacctccagggcctcctccatcagggtgaggctcccctagttcagcggctgtccacgggtctaggagcctgagaggtgaggggtgagtttcctccatcctctgtccctcctcatggtgtccagcaataaaaactgaccagtgtctttccctccccaccccccccccccgatatctgtttcctctggtttcagacagaggcgacttctgccaggaggcagcctgcgattgtgacagagaggctgcccactgttcctttgacaacctcggcacctacaataaaaccatgtgcaactaccccagtttcttatgtgaaaactggttcctcagtgctgagtgccaccccttctctcagtggagaggaaggggatgatgcgtattgttaagaccgtggaggcagctgtagcagcagggactgcagcnnnnnnnnnnnnnnnnnnnnntacattcaagtccttcaggccatctggaccagatgttgaagaggactctgtgatccctcagccttgcactctaggg

SEQ ID NO: 3796 - DNA, 600 bp, Homo sapiens
acctacagactggggcgggcctgggccgcctcctgcccacccgcctgtaggccccactcacaatgatggtgcagtctgcagagccgctgtagagtttgcacctggggaagcagagacccctggatgcagagagccagcacgatgccatcatggccctccagtgtcttctgacacttgtaggtggtacatgtgtcccacacctgcagagacatttaacatggatgcgtcccgccggaactccatgaggtcctcgctgagcttgctctggttttcgtccaggacgtctgagtagcaggaggagagggggtgtcactggtgcccggagcagtggccaggcccctgcctgccccggtgcccaccctcaccaaacttgagctccaggctcttctctagctggtcgatcttctccgagagctttcccagcatggagcgcaggaaggcgatctcctggtccttctgggccagagccacgtgcatctcgtggaagcggtcatccgtctgctgcagaaactccttcaggccctcgaagcggcaagtctccaggtgggtctcgtaagtgtcctggttcccgatgaacgtgcacctgcggggacaggacag

SEQ ID NO: 3797 - DNA, 600 bp, Homo sapiens; identical to SEQ ID NO: 3796

SEQ ID NO: 3798 - DNA, 600 bp, Homo sapiens
gggcagggagtttggcagcagcgtctggcgttcaggaaaggggatgaggccacaggctgacgccggaagccacgggcctgtggatggcggctgcagcttgtatcgaccgccagacacacagggagtcagtctcacaagacaacatgataaaaacacaaagcacaatataaggcgtcagactggagaggccacggccatgattcctagcagggaatcctgaagagccactcattttgttcttgccagacgtgtcctgaatgctgtccctttccagacctggttcttcggctttctcttcaattcggtaagtttctccacatcttcccaacagagggaagaccttttcttcttgttcgtgataactagagtcagagtctgttgcgttgcagaggcatttttccttcggggacgccggaagacttcgccacacgcgcgccctctccgcggacaccaacgtgctgacgcatgttcattagcgagctgctccctccattttgtccccagtctcctttaggcgaactgcgcggttctatgttaaagccacttagtaatgaaaccttccatgaccacctggaacctccagtgtacagcttccttcat

SEQ ID NO: 3799 - DNA, 474 bp, Homo sapiens
atcaaggaattcagggcactcatgatccaggacgccagaaccagcagtccacagagccgagggttcacgatgaccgtgtagtgcagggggtgacagatggccacaaactggtcataggccatcacggtcaagagtaagctgtccaacactataaagagtacaaaaaagtacatctgggtgatgcaacctgcataggtgatgactttactctgtgtccggatgtttgacagtgtctttgggactgtggtggaggtaacacagatgtctacaaaggacaggttagagaggaagaagtacatgggggtgtggaggtgggaaccagagcagatggccaggatgatgagcaggtttccaaacacagttgtcagatacatggagaggaagagtccaaacataacgggctgcaattctggttcctctgaaagtcccagaagaagaaatcctaaaatcctcgtaccattctctggttccatg

SEQ ID NO: 3800 - DNA, 474 bp, Homo sapiens; identical to SEQ ID NO: 3799

SEQ ID NO: 3801 - DNA, 600 bp, Homo sapiens
gttcttcctgctgggggccatggcctatgaccgctacgtggccgtgtgccacccactgcactacacggtcatcatgcatggagggctgtgcctggggctggcggccagccgcctggtggctggcttctcaaattccctgatggaaacaattatcaccttccagcttcctgtgtcacggtgttatcaatcactttgtctgtgagaccttagcagtgctacagctagcctgtgtggatgtccccttcaacaaggtcatggtggccatctcagggtttctggtgatcttgcttccctgttccctggttctattctcctatgcttgcatagttgccaccattttgtgcattcgttctacccaggtacgctgcaaagcctttgggacctgtgcctctcacctcattgtggtttgcatgtgctttggggctaccatctgcacctacctggggccacagttggcctcctcagcagaggaagagaagatgattgctctcttctatggagtggtgtcacccatgttgaaccccttgatctacagcttgaggaataaggaagttacggctgctgtccggaaagttttagaaagatgcagataaagggtca

SEQ ID NO: 3802 - DNA, 600 bp, Homo sapiens
ccgccatggcctatgaccggtatgtggccatctgtcgcccactccactacccaaccataatgagccatgggctctgcttccgcctcgctcttggttcctgggccattggctttggcatctccctggcgaagatctacttcatctcctgcctcagcttctgtggtcccaatgtcatcaaccacttcttctgtgacatctctccagtacttaatctctcctgcacagacatgtccataactgagttggtagactttatcctggcactggtcatcttcctattcccactctttattactgtcctgtcctacggatgcattctggccaccatattatgcatgcccacaggaaagcagaaagcgttctccacttgtgcctcccatcttgtggtggtcaccattttctattcagccattattttcatgtatgctcgacctcgagttatccatgccttcaacatgaacaaaattatttccatcttctatgccattgtcactccttctctcaaccctttcatttattgcctaagaaaccgagaggtcaaggaagctctgaagaaactggcatattgccaggccagcagatctgactagtcaattacag

SEQ ID NO: 3803 - DNA, 600 bp, Homo sapiens; identical to SEQ ID NO: 3802

SEQ ID NO: 3804 - DNA, 600 bp, Homo sapiens
tcctggcaatggcatttgaccgctatgtggccatctgttacccactgagatacaccattttaacctcatcagccgtcaggaagattggcatagcagctgtggtcaggagctttttcatctgctgtccgttcatcttcctggtataccgacttacatattgtgggagaaacatcattcctcattcctactgtgagcacatgggcattgccagattggcttgtggcaatatcaatgtcaatatcatttatggcctcactgtggccctactctctacaggactggatatagtgcttatcattatatcctacacaatgatccttcacgcagtgtttcagatgtcttcctgggctgccaggttcaaggcccttagtacgtgcggctctcatatctgtgtcatatttatgttctataccccagcattcttttcatttcttgcccatcgctttggaggtaaaaccatccctcaccacattcacatcctagtgggcagtctctatgtgttagtgccccctatgctaaaccccatcatttatggggtgaagaccaaacaaattaaagatcgagtgattttgcttttctctcctatcagtgtatgctgtt

SEQ ID NO: 3805 - DNA, 600 bp, Homo sapiens
ctgtcctcctcactatggcctttgaccggtacattgcaatttgcaatccactacgttattcctccatcctgactaattccagaattatcaaaattgggctcactataataggtaggagttttttctttattacaccccccatcatctgtctgaaattttttaattactgtcatttccacatcctttctcactctttctgcctgcaccaggatcttctccgcttagcctgttcagacatccgattcaatagttactatgccctgatgctggttatttgcatactgttgttggatgctatactcatccttttctcctacatcctgattcttaagtcagtcctggcagttgcctctcaggaagagaggcataaattatttcagacctgcatctcccacatctgtgctgtccttgtgttctacatccctatcattagcctcacaatggtgcaccgttttggcaagcacctttcccccgtggcccacgttctcattggcaacatctacatccttttcccacctttaatgaatcccatcatctacagtgtcaagacccaacagattcataccagaatgcttagactcttttctctgaaaagatatt

SEQ ID NO: 3806 - DNA, 600 bp, Homo sapiens
ttctggcaatggccctggatcgctatgtggccatctgtatccccttgagacatgccaccatcttttcccagcagttcttaactcatattggacttggggtgacactcagggctgccattcttataataccttccttagggctcatcaaatgctgtctgaaacactatcgaactacagtcatctctcactcttactgtgagcacatggccatcgtgaagctggctactgaagatatccgagtcaacaagatatatggcctattcgttgcctttgcaatcctagggtttgacataatatttataaccttgtcctatgtccaaatttttatcactgtctttcagctgccccagaaggaggcacgattcaaggcctttaatacatgcattgcccacatttgtgtcttcctacagttctaccttcttgccttcttctctttcttcacacacaggtttggttcacacataccaccatatattcatatcctcttgtcaaatctttacctgttagtcccaccttttctcaaccctattgtctatggagtgaagaccaagcaaattcgtgaccatattgtgaaagtgtttttcttcaaaaaagtaactt

SEQ ID NO: 3807 - DNA, 1400 bp, Homo sapiens
tgttattgtatgttatacactcattacaaaagaactgtaccggtcatacgtaagaacgaggggtgtaggtaaagtccccaggaaaaaggtgaacgtcaaagttttcattatcattgctgtattctttatttgttttgttcctttccattttgcccgaattccttacaccctgagccaaacccgggatgtctttgactgcactgctgaaaatactctgttctatgtgaaagagagcactctgtggttaacttccttaaatgcatgcctggatccgttcatctattttttcctttgcaagtccttcagaaattccttgataagtatgctgaagtgccccaattctgcaacatctctgtcccaggacaataggaaaaaagaacaggatggtggtgacccaaatgaagagactccaatgtaaacaaattaactaaggaaatatttcaatctctttgtgttcagaactcgttaaagcaaagcgctaagtaaaaatattaactgacgaagaagcaactaagttaataataatgactctaaagaaacagaagattacaaaagcaattttcatttacctttccagtatgaaaagctatcttaaaatatagaaaactaatctaaactgtagctgtattagcagcaaaacaaacgacatccaattgtcatgctgcatgcaaaactacacagaattcatgttttgcagagttttgccaaaatgagtaatcatataatatttactgtaatttttaaaatacattatcgttcacaattttattttttcataatcaactaaggaagaacgatcaattggatataatcttcttaccaaaaatgatagttaaaatgtatatatatcctagtcccctaaccaaatcctgacctattgggatacttataaaaatttaagtaagtgggatacacaaagaataataactattaacttttcattattagcaaaaacctaagggatttaaactaattgaaactgtatttgattggacttaattttttatgtttatttagaagataaagatttaaagaagacctttacaataaagagaagaaatatcgaagtcattaaaataaggagacttacttttatgacattctaatactaaaaaatatagaaatatttccttaattctagagaaactagttttactaattttttacaacttcaataataccatcactgacacttacctttattaattagcttctagaaaatagctgctaattaggttaatgaacattttaccttagtgaaaaaaaattaattaaatatgattacaaagttgcacagcataactactgagaggaaagtgattgatctgtttgtaattacttgtttgtattggtgtgtataaaatacaaaatttacattaaactctaaaaaaaaaaaaaaa

SEQ ID NO: 3808 - DNA, 1400 bp, Homo sapiens; identical to SEQ ID NO: 3807

SEQ ID NO: 3809 - DNA, 600 bp, Homo sapiens
ggaaatggcattactctgaaataaaattgtgggaggaggcatagaacacaggcgggtgctggtgatgacacactttgtgtgctgaatccttgaatactcaattcagtgacatttggttctgggaatatgtagaaagagtcttggggaggtttaagtttctggttatattaaaattagtgatacatacttgtgaaggaaaataatcaggacacaaaagagtacatattgtattattttgtttgtatagtttcagaacatgtacatctaatttaatgtcaaaaaatcagaaccctgcttacctctgatggatataaagatggaagaatggggagagacatgaggcaatttctggggagatggaaatattttgttgtgttagggatgtggtgacattgttttgtcaatttgtcaaaacggtacagctaagatttgcacatttctaggtacatcaatttcacatcaaaacttctgaatgataataataacaaaaaggaaaatagtaataataatacagatgattagatttcatagtgaatacaagtgtggaaaatacaagaatggtgtaatgttgataattgttgaagttgtgtcatgggtgcc

SEQ ID NO: 3810 - DNA, 600 bp, Homo sapiens; identical to SEQ ID NO: 3809

SEQ ID NO: 3811 - DNA, 1400 bp, Homo sapiens
ccccatcagaaggcaccaacctcaacgcgcccaacagcctgggtgtcagcgccctgtgtgccatctgcggggaccgggccacgggcaaacactacggtgcctcgagctgtgacggctgcaagggcttcttccggaggagcgtgcggaagaaccacatgtactcctgcagatttagccggcagtgcgtggtggacaaagacaagaggaaccagtgccgctactgcaggctcaagaaatgcttccgggctggcatgaagaaggaagccgtccagaatgagcgggaccggatcagcactcgaaggtcaagctatgaggacagcagcctgccctccatcaatgcgctcctgcaggcggaggtcctgtcccgacagatcacctcccccgtctccgggatcaacggcgacattcgggcgaagaagattgccagcatcgcagatgtgtgtgagtccatgaaggagcagctgctggttctcgttgagtgggccaagtacatcccagctttctgcgagctccccctggacgaccaggtggccctgctcagagcccatgctggcgagcacctgctgctcggagccaccaagagatccatggtgttcaaggacgtgctgctcctaggcaatgactacattgtccctcggcactgcccggagctggcggagatgagccgggtgtccatacgcatccttgacgagctggtgctgcccttccaggagctgcagatcgatgacaatgagtatgcctacctcaaagccatcatcttctttgacccagatgccaaggggctgagcgatccagggaagatcaagcggctgcgttcccaggtgcaggtgagcttggaggactacatcaacgaccgccagtatgactcgcgtggccgctttggagagctgctgctgctgctgcccaccttgcagagcatcacctggcagatgatcgagcagatccagttcatcaagctcttcggcatggccaagattgacaacctgttgcaggagatgctgctgggaggtccgtgccaagcccaggaggggcggggttggagtggggactccccaggagacaggcctcacacagtgagctcacccctcagctccttggcttccccactgtgccgctttgggcaagttgcttaacctgtctgtgcctcagtttcctcaccagaaaaatgggaacaaggcaatggtctatttgttcaggcaccgagaacctagcacgtgccagtcactgttctaatgctggcaattcagcaaagaacaagatctttgccctcggggaggctgtgtgtgtgtgagtatgtatggatgcgtggatatctgtgtatatgcccgtatgtgcgtgcatgtgtatataagcctcacattttatgattttgaaataaacaggtaatacgaaaaaaaccc

SEQ ID NO: 3812 - DNA, 1400 bp, Homo sapiens; identical to SEQ ID NO: 3811

SEQ ID NO: 3813 - DNA, 1400 bp, Homo sapiens
cctcaggttatccacctgcctcagcctctcaaggtgctgggattacaaacccacaaggagtcccttgcgggaagactgccaatatgtctgttaggggatactttaagaacctgtaaaatcaacacaagttatttacttaaaagcacagcatacacaaccccattttggaaaaggagaaatagacaagaagaaatgggtaacaggcctcaagcaagtctgaaacccaagagagccaatgatggacattcagactcctgaataatttcctttgatgacatgtcctgcatcttctataaacaggcatgcactcataaaaaatgctgtaatcctgcagattgtactctagttagatctgcagaatgtggcactggatcatgctgtaacaataaaacttgtacgatccacgaaagaggccatgtctgcagaaaaagtgtagatatgtgtgattttccagaatattgcaatggaacatctgagttttgtgtacctgatgtgaaagctgctgatttagaatactgcagtaataagactagctattgctttaaaggagtatgcagagaaagggatagacagtgttcacagttatttggaaaatttgctaagtctgctaatcttctgtgcacagaagaagtgaattttcaaaatgacaaatttggaaactgtggttcccgttgtgatttttttgatatcctttgtggaaagattgtttgtcactggatacattcagaactagtaccaatgacagacttagacatacaatatacttaccttagaggtcacgtatgtttgtccgcacatgcaagaaatggttcaaaacaatcggagacctatacagaagatataactgcatgtggccaacacaaggtatgtcactcccgagaatgcagaaattttagtgaactaaatataacaaaatatactacaaattgtggacagaatgggatttgcaatgaacatttccattgtcaatgtgatcctggttatgctcctccagattgtgagccagcaatgtcatcaccaggaggaagtatcaatgatggattttggcttacagtagaaaaaagtgtacccttgcttccaaaacgacgtgctgctcctaaaaacaatggtcttttgatcagtttctacattttttcacctttgctcattttaattgctattgttagtcttaaatggaataaaatgaagagattttggagcaaagtgggaacagtaagcagcagatctatctcagaagacagcagtagtaacagcagccagtcacagagttaaagtaaccaagtgataaaatcaaagccatcggatgaagaaaggatattaccaagaaactcacgattaacttaaaactttcaacttcacagaaaaaaataaatcatatgactaaaagcataaaaaaaaaa

SEQ ID NO: 3814 - DNA, 1400 bp, Homo sapiens; identical to SEQ ID NO: 3813

SEQ ID NO: 3815 - DNA, 472 bp, Homo sapiens
cttctgccaccctttccactacactatgatcctgactagaatgctgtgtgtcaagatggtggtcatgtgccatgctctctcccaccttcatgccatgctgcatacctttctcatgggccaactaatcttctgtgcagataacagaatcccccacttcttctgtgacctctacgctctgatgaagatctcctgcaccagcacctacctcaacacccttatgattcacacagaaggtgctgttgtaatcagtggagctctggccttcattactgcctcctatgcctgcatcatcctggtggtcctccggatcccctcagccaagggcaggtggaaaaccttttctacctgcggctcccacctcactgtggtggccatattctatggcaccctcagttgggtctacttccggcccctttccagctattcagtgaccaagggtcgcattataacagtcgtgtacacagtggtgact

SEQ ID NO: 3816 - DNA, 472 bp, Homo sapiens; identical to SEQ ID NO: 3815

SEQ ID NO: 3817 - DNA, 463 bp, Homo sapiens
catctcccagcccctccggtatgtcaccatcatgaacactcaattgtgtgtgggcctggtagtagccgcctgggtggggggctttgtccactccattgtccaactggctctgatacttccactgcccttctgtgaccccaatatcatagataacttctactgtgatgttccccaagtactgagacttgcctgcactgatacctccctcctggagttcctcatgatcttcaacagtgggctgctagttatcatctggttcctcctccttctgatctcttatactgtcatcctggtgatgctgaggtcccactcgggaaaggcaaggaggaaggcagcttccacctgcaccacccacatcatcgtggtgtccatgatcttcattccctgtatctatatctatacctggcccttcaccccattcctcatggacaaggctgtgtccatcagctacacagtcatgacc

SEQ ID NO: 3818 - DNA, 463 bp, Homo sapiens; identical to SEQ ID NO: 3817

SEQ ID NO: 3819 - DNA, 472 bp, Homo sapiens
catctgtaacccactgttgtacatggtcaccatgtctccccaggtgtgttttctccttttgttgggtgtctatgggatggggtttgctggggccatggcccacacagcgtgcatgatgggtgtgaccttctgtgccaataaccttgtcaaccactacatgtgtgacatccttccccttcttgagtgtgcttgcaccagcacctatgtgaatgagcttgtagtgtttgttgttgtgagcattgatattggtgtgcccacagtcactatcttcatttcctatgctctcattctctccagcatcttccacattgattccacggagggcaggtccaaagccttcagcacctgcagctcccacataattgcagtttctctgttctttgggtcaggagcattcatgtacctcaaacccttttctcttttagctatgaaccagggcaaggtgtcttccctattctataccactgtggtg

SEQ ID NO: 3820 - DNA, 472 bp, Homo sapiens; identical to SEQ ID NO: 3819

SEQ ID NO: 3821 - DNA, 600 bp, Homo sapiens
tctcattttccatacagtcagtatcaattctggaagaatttccagacattaaagatagtcatcttggggctggtcctgccgctgcttgtcatggtcatctgctactcgggaatcctaaaaactctgcttcggtgtcgaaatgagaagaagaggcacagggctgtgaggcttatcttcaccatcatgattgtttattttctcttctgggctccctacaacattgtccttctcctgaacaccttccaggaattctttggcctgaataattgcagtagctctaacaggttggaccaagctatgcaggtgacagagactcttgggatgacgcactgctgcatcaaccccatcatctatgcctttgtcggggagaagttcagaaactacctcttagtcttcttccaaaagcacattgccaaacgcttctgcaaatgctgttctattttccagcaagaggctcccgagcgagcaagctcagtttacacccgatccactggggagcaggaaatatctgtgggcttgtgacacggactcaagtgggctggtgacccagtcagagttgtgcacatggcttagttttcatacacagcctgggctgggggt

SEQ ID NO: 3822 - DNA, 271 bp, Homo sapiens
acgtcatgtgctgcacggcctcgatcatgaccctgtgcgtgatcagcattgacaggtaagggccggaccgccccgtcccaggctccggctggggaccggctggcagctcagccccgcgcgctcgcctttcctgggaggatcaagctagacttcaaggcgggatgaagggctgcgcttaaaacaccgctccccccaatccaccctacaccaaccaaacttcggttacggcatagcctatgtacatctttaccagcccgggccgtcgaccacg

SEQ ID NO: 3823 - DNA, 271 bp, Homo sapiens; identical to SEQ ID NO: 3822

SEQ ID NO: 3824 - DNA, 600 bp, Homo sapiens
acctgggaaaacagaggaatctacctgtggtgactgaacgagggataattcaaactgacaacctgtgcagtcccgtggagggtaggggagtgtgggtgatcagaaggctggggccagtgtaaggcatagggaatatgtaagtcaggagttagaaatctccagtgtgcgttggaatcacctggagggcttggtaaaacacagatttttgggctccactccaagggtttctgacccaagaggtggggaccaaaaccatgcattcctaagaagtccccaggtcatgctgctgttgctggactgaggaccacactttgagaacctgtgctctaagtgaatacttggaagtcgtttcaggacatggggcatagaaactgaggagtagctgagaggaagatgaagagaagctgagaagaagctgaggatcctcacaggagcagacagagaaatgtgaagggtggggttttatgtgtgggaaagggacccgaagcccaggctgaagagtttaactttgggcccagaaactcaaccatcaatggaaacagggcagtgacaagtggagggggtgtctggaagctgagcaggcccgacagagagatgaag

SEQ ID NO: 3825 - DNA, 600 bp, Homo sapiens; identical to SEQ ID NO: 3824

SEQ ID NO: 3826 - DNA, 1400 bp, Homo sapiens
ttggagctctgggacaatggcgcaggtgctgattctgtcaagaatgatggcatctactcaaggtattttacagattaccatggaaatggtagatacagtttaaaagtgcttacccaggcaagaaaaaacacagctaggctaagtcaacaacagaataaagctctgtatgtaccgcgctatgctgaaaatggaaaaattatactgaacccatccaaacctgaagtcacagatgatgtggaaggagctcaaacagacgacttcagcagactcacctctggagggtcgtttactgtatcaggagtgcctcctaatggtaatcattctcaggtgttctcacctggtaaaattgtagacctcgaggctaagtttcaaggagatcatattcaactttcatggactgcccctggcaaggtcctcgataaaggaagagctgagagctacattataagaataagtaaacatttcctggacctccaagaagattttgataaagctgctttaataaatacttctggtctgatacctaaggagcctggttcagtagaaagttttgaatttaaaccagaaccttctaaaatagagaatggtacgacattctatattgcaattcaagccatccatgaagccaatgtcacctcagaggtttcaaacattgcacaagcaactaactttattcctccacaggaacccagcattcctgatctgggtaccaatatttctgcaatcagtttggcaatttttggattagctgtaattttatctatattttaaactagaaattatattagaactcaaattcaatgttatacatacttggtaaacatttatttaaaatttaatttactatacttattgtctattataaagctcattataatataaaagtgaagcacaaaagttgtaagtttcctaattacttgattaattaatactatttgagttattaaatgttaatcaaaatgagtatatcatttcctgtctttgaataatccactcattaatttttaatatgaaaagatatatatttgtacttgtaagcattttaagaaacatttttaaagtgtgctacaaattcatttggtgtactaacatcaaaatgtatccaagccatttaaaaaatatttatatatacatagtagcaaatagttttatagatttatttgtatcgcattttttattacaaatgaatatttcatgtttatataagctgtaatcaaaaaggactagtagtagtagtaaggaagtcaaatttgtttttttatcattgattataagtggtatatttgttttttgtcattgattaaaagtgattttagccctaggcccgaaatgactagcaaatatcattttctgtatgaattgtggaacatcacaataaaattatttctgtgctgatgcta

SEQ ID NO: 3827 - DNA, 600 bp, Homo sapiens
aggccaaaggaagcacatgcctctctcaggccaaactcacctgcccctcaactctcctccagagtcagaagtttctgccgcagccctgcagagggcacagaaaatggaagacagctcttatattgccatttcttccacaagagcccaggcctcctacagcttgaccgtgaggccagagacacaagccttcggcgccttaaggatgttctagcatggctgccaatgggagctcatggtgagggatacccatcccatatgcctgggcagaaggaagacttcatccctctggggctgttcacgtggtcctaatcttctgaacttggcgctgcccctggcagcccctgttctggcagagttgaagacagagctacacaggggaaaagaggagtttggggtatgggagagaagagaatgcacaaacagaggccgccattttggattcttatggacaatgacccagtggttcctaatcctctaggaggtctctaagaatataagtgggggagtggccacagaaaattcttctccactttctagccagaggagagaggaccccctgaatttctcacaaaggatgcccaaagatgcagccggtatttg

SEQ ID NO: 3828 - DNA, 487 bp, Homo sapiens
ctgctttcttctgctgccttttatgctccttgtgcacctcccttccccccaacctgggatgaaatctccccacgtgctggtgttcctttgcctcctggtggctctggtcaccgggaacctggttcagtttggggtgatgatcgagaagatgacaggcaagtccgccctgcagtacaacgactatggctgttactgcggcatcggtggctcccactggccggtggaccagactgactggtgctgccacgcccacgactgctgctacgggcgtctggagaagctgggctgtgagcccaaactggaaaagtatcttttctctgtcagcgaacgtggcattttctgcgccggcaggaccacctgccagcggctgacctgcgagtgtgacaagagggctgccctctgctttcgccgcaacctgggcacctacaaccgcaaatatgcccattatcccaacaagctgtgcaccgggcccaccccgccctgctga

SEQ ID NO: 3829 - DNA, 1016 bp, Homo sapiens
tggataccaatgttccgactggagacggggagcccgcgagacccgggtctccagggtctgcccaaggaagttgctcatgggagcagacctctagagcaggatttgaggccaggccaaagagaaccccagagatgaaaggcctcctcccactggcttggttcctggcttgtagtgtgcctgctgtgcaaggaggcttgctggacctaaaatcaatgatcgagaaggtgacagggaagaacgccctgacaaactacggcttctacggctgttactgcggctggggcggccgaggaacccccaaggatggcaccgattggtgctgttgggcgcatgaccactgctatgggcggctggaggagaagggctgcaacattcgcacacagtcctacaaatacagattcgcgtggggcgtggtcacctgcgagcccgggcccttctgccatgtgaacctctgtgcctgtgaccggaagctcgtctactgcctcaagagaaacctacggagctacaacccacagtaccaatactttcccaacatcctctgctcctaggcctccccagcgagctcctcccagaccaagacttttgttctgtttttctacaacacagagtactgactctgcctggttcctgagagaggctcctaagtcacagacctcagtctttctcgaagcttggcggacccccagggccacactgtaccctccagcgagtcccaggagagtgactctggtcataggacttggtagggtcccagggtccctaggcctccacttctgagggcagcccctctggtgccaagagctctcctccaactcagggttggctgtgtctcttttcttctctgaagacagcgtcctggctccagttggaacactttcctgagatgcacttacttctcagcttctgcgatcagattatcatcaccaccaccctccagagaatttttacgcaagaagagccaaattgactctctaaatctggtgtatgggtattaaataaaattcattctcaaggct

SEQ ID NO: 3830 - DNA, 1016 bp, Homo sapiens; identical to SEQ ID NO: 3829

SEQ ID NO: 3831 - DNA, 1400 bp, Homo sapiens
ttatggcctctggactgaactctggggcctttggggtggtgtgaaggagtctgtgggcttcttggaacacatggatctgttcggtgggtccccagacctctgctcccagagctcatggcccaggtggtgaggagggaaaggcagtcagattccaggctggagtgtgattctgtgggaatactggggtcagttatggaacaggacttgcccatcataggtaagtgagacagcaaatagatgattcaagagcaaggattactgcgggaaggtgagactcctactgtccacgcgcatgagcagaacctggaaccagaggggcagggaccaggggtctttactcatttattttatgggtaaagagacatgaagagacagcctctctcttctgtctcagaagctctgtgtttgggaaactttgagcccagtgagtagcagggtctgcagtgtgagtaccaggtttccctggcaatccaggtctcctctgaggaagcattctgacttcccactgaccacggaaggcatgtcagcttcatgcctcgggctagagttctgataatcggggctgaggggtgaaaagaaatccagtcagacagacagtggggagacaggtccctgccctttatttgcgggatcaatcagggactcccagaaaggaaggagaatggtgagaagggccctaagagttcgtctctcacctgggggctggtgacgtggtcaccacaagctgaagacaggctaatggggtggcgggtgtgtgtttaaacctcacgtgcctggaagctgcacattgaccaaaggagggagggaagtgctaaccatgtatagagtgggcaggcggttccagggagacaagcagcatgttattaaattgggcctaggcagttggacgataatggagaaaaagcagggatgctataatgagtcctccccaagggtgagttcagcaccccagccctgttctgcttgtatcccagtgatacttgggaggtaggaagaaaatgggagtaagagaacaatttggggctgaagggagtgtcagaggcacgttgatccttgttttgttgtcatggaaacttcggggctggtgggacttaggccaaaagctcagaggcacagccaaaatttagaagcttgctactcctacgactcggcctataaggaagagagaagctgtctgtactttggggactacattgctgaaggaaaaaaatcactccctggctaattaagattgcttccaaattgggggaatgtgtgtcatttcctttaccaaggccagtcatccctgcttccacccatggtcaggacagtcagccactacgtgatgctgtataaattggattacaaaccatattcttgttcagcttgcactaatctatataaataaaatatgtactttg

SEQ ID NO: 3832 - DNA, 1400 bp, Homo sapiens
attgggaggccgaagggtccccgggacccgcctgctgagtggacccgggtgtaagtctaacgccagttcctgcctgttgcctcttgtgagctcggactgctgatgccccggtgctgctgagcgccgtgcgcagaatggaaacagtgggcctggatcaaagttaaagtttctcagggtgggaaatgtgggggctttgccccaatgactgtagcattcaaggcttgaggctggaggaggtagctagggtatagtggctggtgaggctgcacagagcagattcaagaaagaagatcaggaaggggcatgacccctgagttatgaaggggagaagggacagatgagcttccggagactgctctcctcaccacacagcactagtccatcctcagcacctgagcctccctcacttggacactcaggggaccacacagagaagtggatggacacttcgccatccaggcagaactaagccaggcataaccacagccaagcagattaaccccaggcagaccgataaaaagacctccagataggcagacagacagatggaccaccaacctggacagacagccaaagcttcagagatacagtccacaggtggacaaagggatccccagccagagagagagagaccagccaacagcttgatagaccagtgcagccagagagaccaccaaacagagcccccaaaagacagacatctctgctagctggacagccaggtggaccccctaagttagattactagacagatataaacagatcccctgctgaacagatacacagagttctcagaccccacccccaccctcaggtgggctggctggctgacagaccttctggccagacagactcctaaccaaccagatggactgccagacaggcagacatcagccacatggaatcctgacatcccagccagccggccagactctcatcttgatgtcttgatggatggaccccagctagtcagacatgatcctccagattgacagacaagtcccccaaatgagtacacatctccagctattcagacagatggacccccagcaaatcaggacctatctaggcagaccccagccagacccccgccagacagactcccaaccagactgaccccttactattcacacagcctgccgagtagctgggactacaggtctaattttttttttttttaagaaatgagtttttgccatgttgcccagactggtcttgaactcccaacctcaagcaatcctcctgcctcagcctcccaaagtgctgagattacaggtgtgagccaccaggctcagccccctaagatttgaaacactttaaatggcccatggtagggttcctgctaggataaaacattaagcggctgttaaaagaaataaaaggaggacacgtctctgtgc

SEQ ID NO: 3833 - DNA, 1400 bp, Homo sapiens
cgaggagctggaggagatcgcgcgccgcgtgcagctcatcctggacgacctgggcgtggacgcagccgagggccgctggcgccgctgccagaagtgcgtctggaagttcctggagaagcccgagtcgtcgtgcccggcgcgggtggtggccgtgctctccttcctgctcatcctcgtctcgtccgtggtcatgtgcatgggcaccatccccgagctgcaggtgctggacgccgagggcaaccgcgtggagcacccgacgctggagaacgtggagacggcgtgcattggctggttcaccctggagtacctgctgcgcctcttctcgtcacccaacaagctgcacttcgcgctgtccttcatgaacattgtggacgtgctggccatcctccccttctacgtgagcctcacgctcacgcacctgggtgcccgcatgatggagctgaccaacgtgcagcaggccgtgcaggcgctgcggatcatgcgcatcgcgcgcatcttcaagctggcccgccactcctcgggcctgcagaccctcacctatgccctcaagcgcagcttcaaggaactggggctgctgctcatgtacctggcagtgggtatcttcgtcttctctgccctgggctacaccatggagcagagccatccagagaccctgtttaagagcatcccccagtccttctggtgggccatcatcaccatgaccaccgtcggctacggcgacatctaccccaagaccacgctgggcaagctcaacgcggccatcagcttcttgtgtggtgtcatcgccatcgccctgcccatccaccccatcatcaacaactttgtcaggtactacaacaagcagcgcgtcctggagaccgcggccaagcacgagctggagctgatggaactcaactccagcagcgggggcgagggcaagaccgggggctcccgcagtgacctggacaacctccctccagagcctgcggggaaggaggcgccgagctgcagcagccggctgaagctctcccacagcgacaccttcatccccctcctgaccgaggagaagcaccacaggacccggctccagagttgcaagtgacaggagggcccctcaggcagagatggaccaggcggtggacagatgggtagatgtggcaggcatgtcatcgacagcacagaagggctgtcctgtgtccccccaaccctcccctggacagactctgaaggccctcccggcacctctgccaaggctgggtaagactcctctatgttgcctgctgtccaggagcccgggagggaggggtgtgcaggagccgcagggccgtgtgggacgagtggaggccgcggcctggctggcacgagagcccacgcccgcttctgtatctccctcaataaagcctcctgctctgtgcaccctc

SEQ ID NO: 3834 - DNA, 600 bp, Homo sapiens
caacaagaataagaattcaattgtggaccccaaagtgacagtggagatccatggcgtgagccggracgtgkccagccgccagactgctgtcatcaccaacaaatggtttcaacccatggtgggacacggagtttgcgtttgaggtagttgtgcctgaccttgccctcatccgcttcttggtggaagattatgatgcctcctccaagaatgacttcattggccagagtaccatccccttgaacagcctcaagcaaggataccgccatgtccacctcatgtctaagaacggggaccagcatcyatcagccaccctctttgtgaagatctccctccaggactaggctggaggaagccagtggggtccccctgagtgggctgggctctgtccacatgtgggacagggctggtgtggctgctcccagcctcttgctcagagctaggcccccaaattgccttcagccctaacatagtgtctgctgctgcctccctggggaccagaagcctagcccagtccctggagctgtccttcatwccgttaggaataacactgcagccctctccmmcctccgrccagcgagtggtcaaggatttttataaaaa

SEQ ID NO: 3835 - DNA, 1400 bp, Homo sapiens
  misc_feature (51)..(64): n is a, c, g, or t
accgcggccacagctcggcgccaaccaccgcgggcctcccagccagccccnnnnnnnnnnnnnngagccctggctgtggtcggggggcagtgggccatgctgggggcagtggaaggccccaggtggaagcaggcggaggacattagagacatctacgacttccgagatgttctgggcacgggggccttctcggaggtgatcctggcagaagataagaggacgcagaagctggtggccatcaaatgcattgccaaggaggccctggagggcaaggaaggcagcatggagaatgagattgctgtcctgcacaagatcaagcaccccaacattgtagccctggatgacatctatgagagtgggggccacctctacctcatcatgcagctggtgtcgggtggggagctctttgaccgtattgtggaaaaaggcttctacacggagcgggacgccagccgcctcatcttccaggtgctggatgctgtgaaatacctgcatgacctgggcattgtacaccgggatctcaagccagagaatctgctgtactacagcctggatgaagactccaaaatcatgatctccgactttggcctctccaagatggaggacccgggcagtgtgctctccaccgcctgtggaactccgggatacgtggcccctgaagtcctggcccagaagccctacagcaaggctgtggattgctggtccataggtgtcatcgcctacatcttgctctgcggttaccctcccttctatgacgagaatgatgccaaactctttgaacagattttgaaggccgagtacgagtttgactctccttactgggacgacatctctgactctgccaaagatttcatccggcacttgatggagaaggacccagagaaaagattcacctgtgagcaggccttgcagcacccatggattgcaggagatacagctctagataagaatatccaccagtcggtgagtgagcagatcaagaagaactttgccaagagcaagtggaagcaagccttcaatgccacggctgtggtgcggcacatgaggaaactgcagctgggcaccagccaggaggggcaggggcagacggcgagccatggggagctgctgacaccagtggctggggggccggcagctggctgttgctgtcgagactgctgcgtggagccgggcacagaactgtcccccacactgccccaccagctctagggccctggacctcgggtcatgatcctctgcgtgggagggcttgggggcagcctgctccccttccctccctgaaccgggagtttctctgccctgtcccctcctcacctgcttccctaccactcctcactgcattttccatacaaatgtttctattttattgttccttcttgtaataaagggaagataaaacc

SEQ ID NO: 3836 - DNA, 600 bp, Homo sapiens
cagcaacctccacattcccacaggccttgagcagaattttctgagactgaagggaaatccccctttctttctaccagccctgcaagtttcctcatggacgctcgcgaggagcaggctgcaggtttcctgcctatggtgagatcagatgtggccaagggaaggagctctggttccagagaatttgcacaaagttccctctgtacagagacaaaacggcctccggctctcagagcataatccttggcagggctcagcaggcgcacgttggtttcttggtcgtcctttgagtgacaacttctccgtgaacctgctgaagaggcagaaaggctgtggaaagctgtatttccattcttgggtttctgcgccgtcggtgggcacttgttattttccaggaaccttctcctggtgtctacatgtttgcttagaggcggctccaagagcccccagagctgcctgcatagcacaccttagatgtggtatttattttcttagttctgtgaacacctgggagggagagcggagaaactgggatttatttttcaaattggtgtcataatattgtgtaaaaagggaaggaaaaaaaaaaccacccccagcttc

SEQ ID NO: 3837 - DNA, 600 bp, Homo sapiens; identical to SEQ ID NO: 3836

SEQ ID NO: 3838 - DNA, 1400 bp, Homo sapiens
ccttggtacaattgatgactcagaccctgaaactggattctaaagagagctgtgaagatgtcccggtagcaaacccagtgtcagaattcaaacttcatcggaaatatcgggacacactgatacttcatgggaaggttgcagaagaggcagaggaaatccattttaaagagctaccttcagctattatgccaggttctgaaaagatcaggagactagttgaagtcttgagaactgatgtaattcgtggcctgggagttcagcttttagagcaggtgtatgatcttttggaggaggaggatgaatttgatagagaggtacgtttgcgggagcacatgggtgaaaagtatacaacttacagtgtgaaagctcgccagttgaaattttttgaagaaaacatgaatttttgagcatttgtcctaatctgctgccagaattaaagacctatttttagaggattttggcttaaaaagcaagggcaaacagtcatttggaagccactcaccactgttttatatctcttttttatatctctttggcgtttccctacagaaaagaaattggacagaacagaataatatgaagcaggatcacaaaagaaaaaaaactttggctttcatattctctttgtgaggacaaatctgttgtttgtttgattactgtttactgagccttaatccaccaagtttatatttagaattttatttttttaaggtactaattaacttaaacacagagctataaaatgctggattgaaaattttatattgtaatgtagagataaaagcagtaggagaaacaaatgacataatatgtcgtcataattcctgctattgttaataaccttaaggagtagttgataaattataaaattttaaaaagtcaattcagttctagaaatagatttaaagaatatgaagttctatctagtacttgagcagctgtatttcttttctacacattgatggacttttaatattttattctcatttaatataaacctcatctagggtatatacaaattaaaactgagacacattggctttgtaaatcagtatgtttttacataatggttttgttagatttatttttccatcagtgaaaacatttcttaagcacaaatttcatttccatttaagcaatttgtaagcaaagtccaggtccatttagtttttggatatatttaatgtttgtctcctgaagtttgtcttcatgtactgtaagatattagttgtctttccatgttttaaatgtatgattatatagcacatattttattagttgtttaataagaggtaatacccatctaggaaagaaattttatgaagttaaatacaagtcttgaatagtacattttcacttctgtattcgagggactctaaaaataaatattgctccagaaa

SEQ ID NO: 3839 - DNA, 600 bp, Homo sapiens
tactcgaatggaggggtcagtagacctcctgcaaaccaggtttgcccgaatcttggctgagtatgagtccatgcagcagaaactgaaacaaagattaaccaaggttgagaaatttctgaaaccgcttattgacacagaattttcaagtattgagggacctggagcggaaagtgggcccatcgactctacatagaaccgaaaagctggtcattaacagggacatgcctcatgatccttttgatcctatgactgacatcaactaaaatttaaaagaagaggaagactcagttgggaaatttttccatgaggaaaatgtgctttggtgcaaggtacaaggcccacaccctctctgagagatactatgattaaaaaagctttatatcttgggatttttcacaactgataatgtgcaaagatataaactgattaacttgtcagtgtctgtattttctgattttttcacatacgctcattttatgtaatattcttcataaaaatgaataagtagccctcactttcatgccatttccattgttgagtgaagcgtatttgaagtaactgagaattaccatgtacatcatatttgggataacattttta

SEQ ID NO: 3840 - DNA, 600 bp, Homo sapiens; identical to SEQ ID NO: 3839

SEQ ID NO: 3841 - DNA, 600 bp, Homo sapiens
tggcagagtttgtgtgttgtcttgaaagattcaggtatgttgcctttatggtttcccccttctacatttcttagactacatttagagaactgtggccgttatctggaagtaaccatttgcactggagttctatgctctcgcacctttccaaagttaacagattttggggttgtgttgtcacccaagagattgttgtttgccatactttgtctgaaaaattcctttgtgtttctattgacttcaatgatagtaagaaaagtggttgttagttatagatgtctaggtacttcaggggcacttcattgagagttttgtcttggatattcttgaaagtttatatttttataattttttcttacatcagatgtttctttgcagtggcttaatgtttgaaattattttgtggctttttttgtaaatattgaaatgtagcaataatgtcttttgaatattcccaagcccatgagtccttgaaaatattttttatatatacagtaactttatgtgtaaatacataagcggcgtaagtttaaaggatgttggtgttccacgtgttttattcctgtatgttgtccaattgttgacagttctgaagaattc

SEQ ID NO: 3842 - DNA, 600 bp, Homo sapiens
cgcgtctcctacgtcaaggccgtggacatctacctctgggtcagctttgtgttcgtgttcctctcggtgctggagtatgcggctgtcaactacctgaccaccgtgcaggagcgcaaggaacggaagctgcgggagaagttcccgtgcatgtgtggaatgcttcattcaaaaaccatgatgctggatggaagctacagtgagtctgaggccaacagcctggctgggtaccccagaagccatatcctgacagaagaagaaaggcaagacaaaatagtggtccacctgggcctgagtggtgaagccaacgctgccagaaagaaggggcttctgaagggccagacgggttttcgtatcttccagaatacccatgccattgacaaatactctaggttgatattccctgcctcctacatatttttcaacttaatttattggtcagtgttttcctaggggctccaaggctgttcctagaagagggcatagacatcgagggggcctggccagtcattgacagacggacttgttgaccacacgcccctcaccaaacaatgcagcagctactggaccaccctgagcagcactcatctctcagagaagccc

SEQ ID NO: 3843 - DNA, 600 bp, Homo sapiens
caccaagtcatttatggcgccgccggccaccctgagggggacgcaggggagcctcactgccgcactggaggacagttaagtttgggaaagtgtctcaagtactcactagatgttgtgaacggcctgctcttcctccactcgcaaagcattgtgcacttggacctgaagcccgcgaacatcttgatcagtgagcaggatgtctgtaaaattagtgacttcggttgctctgagaagttggaagatctgctgtgcttccagacaccctcttaccctctaggaggcacatacacccaccgcgccccggagctcctgaaaggagagggcgtgacccctaaagccgacatttattcctttgccatcactctctggcaaatgactaccaagcaggcgccgtattcgggggagcggcagcacatactgtacgcggtggtggcctacgacctgcgcccgtccctctccgctgccgttttcgaggactcgctccccgggcagcgccttggggacgtcatccagcgctgctggagacccagcgcggcgcagaggccgagcgcgcggctgcttttggtggatctcacctctttgaaagctgaactcggctga

SEQ ID NO: 3844 - DNA, 1400 bp, Homo sapiens
ctccttcgggcgggtgatgctggtgaggcaccaggagaccggcggccactacgccatgaagatcctcaacaagcagaaggtggtgaagatgaagcaggtcgagcacatactgaacgagaagcgcatcctgcaggcgatcgactttccgttcctcgtcaagctccagttctcctttaaggacaactcctacctgtacctggtgatggagtacgtgccgggtggggagatgttctcccgcctacagcgcgtcggaaggtttagcgagccccatgcctgtttctatgccgcccaggtcgtcctggccgtccagtacctacactcgctcgacctcatccaccgcgacctgaagcccgagaatctcctcatcgaccagcagggctacctgcaggtgacggacttcggtttcgccaagcgcgtgaagggccgcacttggaccttgtgcgggaccccagagtacctggcccccgagatcatcctgagcaaaggctacaacaaggccgtggactggtgggccctaggggtgctcatctatgagatggccgtgggcttcccacccttctacgccgaccagcccatccagatctacgagaagatcgtctctgggagggtgcggtttccctccaaactcagctctgacctcaagcatctgctgcggagcctgctgcaggtggacctcaccaagcgcttcggaaacctcaggaacggggttggcgacatcaagaaccacaagtggttcgccacaaccagctggatcgccatctatgagaagaaggtggaagctcccttcatcccgaagtacacaggccctggggatgccagtaactttgacgactacgaggaggaagagctccggatctccatcaatgagaagtgtgccaaggagttttctgagttttaggggtgtgcttgtgcccctgtgggttttctttcctttttgtttttggtggtttgggggatgggagggttggattgaacagccagagggccccagagttccttgtatctaatttcatcctcaccccaccctccagggttgggggagcaggaagcccagatatttggaggaacagaaacaccagctgctccctcacccccccccatgccttcctggtccctctgtgcttctctctttctcctcccacagggtcccccttgccccagcccccttctgcctgttttaaacgagtttctcagctctattcaggccaggtcttgctgttgtatcaagggacacggtgtggaaagaggggctcaaacttaactccagccctgaacaggcaccacttactaagagaggatgaatgaaaagcacacctaccctttggcgtaatcctgcctgggaaggagagaggtttagtgccatgttcagtgggctgtttgctagaataaaaaattaaaac

SEQ ID NO: 3845 - DNA, 600 bp, Homo sapiens
tcaggttccctcttggtgcctaacctggattagtaatgtgcattcaggtgaattttcagctgaggctctgagaactggtactctcagtgtgttctggtcatcttgtggcttagttgtagaagcaggtgtgtctcttgcctctgcttgcctcctactgcacactcagcacccaggactggaatcaccgactactgaatctcctacatgtattgctgctacttcaagctcctccacttgaaaccttatgattttcccaaggggagatgggacagtgtcatctaaatattccgaatgtttggccttctgagaaaagagcttctagtaattgaaccatgggaaacccagcttctggagggttggccgtggggctgtgtacatgtgtgtgcccaggggtgagtgtttctcaggattcctaacgattcaaattaccgttgagtatatataaagaatgagtctctgtatggaagaacaaatgtgtgcattcacccccagtcacaatggtctccattgcatttcaaaggagaggatcagactatctgaatataaacacaatctgatgttaatttattctaagaacaccatcattttgattgtcctaaa

SEQ ID NO: 3846 - DNA, 600 bp, Homo sapiens
gcaatcctgcaagaacaaggtacataaacaagtcctcagtggttggcaattgtttcaaccagtttgaaccaagaactttccaggaaggctaaagggaaaccgaattttcacagccatgattcttttgcccacacttgggagcaaaagattctacaaagctcttttgagcatttagactctcgactggccaaggtttggggaagaacgaagccacctttgaagaagtaaggagtcgtgtatggtagggtaagtgagagagggggatgtttccaatgctttgatcccttcttacttaacctgaagctagacgagcaggcttcttccccccaaaactgattacaactgctacagagcagacagttaagagaaatgagcttgacctttaagagaaatgagctgcactccatgagtgcagctctggaggtacgaaaagaggggaagagacttggaaatgggagacgggggcagagagggaccctccaccacctctttgggcctggctccctgggaatgtgacttgagcccagagtgaacactcttggtagaagcccttctaccttcctgcaacaccttgtttccctctcagattgtaccattgag

SEQ ID NO: 3847 - DNA, 600 bp, Homo sapiens; identical to SEQ ID NO: 3846

SEQ ID NO: 3848 - DNA, 600 bp, Homo sapiens
caccccggggtctgcccaggggagtcaaggccccgaggtgggggggcctattccaggaggagtgggatctcggccctgtccagagcgagttaatgtgtccatctgcccaaccctgtcctgagaaaggacctggttttggccaggacctgacaaatacccaatggcagcagtgtcaacagacgggagtccagccagggtgggtgcccttgtcattgaggttagggacagctatccccaggttatgcctggccccacccagcagggagttggggtccccccacaggctgtgagctctgtgggccctgggatgtgatctagctcagatgccctctcatccttgatgtcatagttgagtgcacccaagtggcacccactggcggccaggggcacagcctggtggtggtggcaatagaactgtgcccctcctcagctcctcgcttcccctcccacagccccagccttactccaccatgcggacaatcattttgtacggatcacgggagcaatgctgtacggttttgtacactggtggtttgtttcctagaaaacccattgtgtctctggatttctagcacattactaaaagagcctctgctttgt

SEQ ID NO: 3849 - DNA, 600 bp, Homo sapiens; identical to SEQ ID NO: 3848

SEQ ID NO: 3850 - DNA, 600 bp, Homo sapiens
gtttaaggtctagatagggtttgctatagggtttgctctgacaatttttaaagcttttggattgttctaacatagcttaagctattggttcctaaaaatcccaaatcaagatctatgtagaatataaaggaagcctgaaccaatccttccacatactgttaagatgtagacttggaacaaagctgttgggacccagagcaatgaatttttgaactgaagctactggtactccccagcaccacctcatactaagaattcctcactctgacatgacagtattttttctgaccaggagctgaaagaccctgacattcatgatccaaagatataagaaattttgatatgtctgcatgcagcacagaactttgaacctaggaggcagtcaataaatacatgagaaattcagctgtcattcagttactcttaattctttataaaactttaaatgataccacatatttgtttgtttaaaatggctttcccaaaatcaaagtagactaaagcagccatctttaaaatccaggatcatcaatgctattaacagtatcaggtaaaaagtacactttaaaatattttaatcaggcagagttttatggatag

SEQ ID NO: 3851 - DNA, 600 bp, Homo sapiens; identical to SEQ ID NO: 3850

SEQ ID NO: 3852 - DNA, 600 bp, Homo sapiens
gtaagggtttttagaatcttcaagctctcccgccactctaagggcctccagatcctgggccagaccctcaaagctagtatgagagagctagggctgctcatctttttcctcttcatcggggtcatcctgttttctagtgcagtgtactttgccgaggcggaagaagctgagtcgcacttctccagtatccccgatgctttctggtgggcggtggtgtccatgaccactgtaggatacggtgacatgtaccctgtgacaattggaggcaagatcgtgggctccttgtgtgccatcgctggtgtgctaacaattgccctgcccgtacctgtcattgtgtccaatttcaactatttctaccaccgagaaactgagggggaagagcaggctcagttgctccacgtcagttcccctaacttagcctctgacagtgacctcagtcgccgcagttcctctactatgagcaagtctgagtacatggagatcgaagaggatatgaataatagcatagcccattatagacaggtcaatatcagaactgccaattgcaccactgctaaccaaaactgcgttaataagagcaagctactgaccgatgtttaa

SEQ ID NO: 3853 - DNA, 600 bp, Homo sapiens; identical to SEQ ID NO: 3852

SEQ ID NO: 3854 - DNA, 1400 bp, Homo sapiens
agctctcccgccactccaaggggctgcagatcctgggcaagaccttgcaggcctccatgagggagctggggctgctcatcttcttcctcttcatcggggtcatcctcttctccagtgccgtctacttcgcagaggctgacaaccagggaacccatttctctagcatccctgacgccttctggtgggcagtggtcaccatgaccactgtgggctacggggacatgaggcccatcactgttgggggcaagatcgtgggctcgctgtgtgccatcgccggggtcctcaccattgccctgcctgtgcccgtcatcgtctccaacttcaactacttctaccaccgggaaacggatcacgaggagccggcagtccttaaggaagagcagggcactcagagccaggggccggggctggacagaggagtccagcggaaggtcagcgggagcaggggatccttctgcaaggctggggggaccctggagaatgcagacagtgcccgaaggggcagctgccccctagagaagtgtaacgtcaaggccaagagcaacgtggacttgcggaggtccctttatgccctctgcctggacaccagccgggaaacagatttgtgaaaggagattcaggcagactggtggcagtggagtagggaatgggaggcttgctgaacatggatatctacattataccgcagagtatttgaagtcacactgtaacctcagtctacccctctcctttcactcctttcctccctccctcgatccccccattttctctattctttccatgacacccaagggtcgcctatttttaaaaagtaccacattccatgacgcaggagctgtggaaatggtgagcgctgtgagatggatgtatttgtagccagtctcctatacccagcagagggataacccaaacaaaaatgactctaaatagcccagatcccaagagattatgtaactcctccatccatgtgttccaaatttgctttacatatgattgtatttgtgtataggggaaaatattatttttatgcctggtaagtggctttttgtactgtagttcagatagagatattttgggtatattttcaagatacatgttgtatttatggaagaaagagttgtcctgatgtttttctgtgttacttatattagagtcagagatcttggtatgggctgttctgtttcctgtgtctccaagcctctgtcttttctgggatgtggtattggtgctttgtgtctagggcagagtatgttcttgaagaaaggcaaatctgactttttctgtgcgccttaaacaattcttgtaactttcttcaaaaagcattttaatgatattggaggaatacttctgataatttattgtctttatttttatcccaggaaataaaaggttaccttgtt

SEQ ID NO: 3855 - DNA, 1400 bp, Homo sapiens; identical to SEQ ID NO: 3854

SEQ ID NO: 3856 - DNA, 1171 bp, Homo sapiens
gtccgtagagctgtgagagaatgaagatgagctttgcgttgactttcaggtcagcaaaaggccgttggatcgcaaaccccagccagccgtgctcgaaagcctccattgggttatttgtgccagcaagtcctcctctggaccctgagaaggtcaaagagttacagcgcttcatcaccctttccaagagactccttgtgatgactggggcaggaatctccaccgaatcggggataccagactacaggtcagaaaaagtggggctttatgcccgcactgaccgcaggcccatccagcatggtgattttgtccggagtgccccaatccgccagcggtactgggcgagaaacttcgtaggctggcctcaattctcctcccaccagcctaaccctgcacactgggctttgagcacctgggagaaactcggaaagctgtactggttggtgacccaaaatgtggatgctttgcacaccaaggcggggagtcggcgcctgacagagctccacggatgcatggacagggtcctgtgcttggattgtggggaacagactccccggggggtgctgcaagagcgtttccaagtcctgaaccccacctggagtgctgaggcccatggcctggctcctgatggtgacgtctttctctcagaggagcaagtccggagctttcaggtcccaacctgcgttcaatgtggaggccatctgaaaccagatgtcgttttcttcggggacacagtgaaccctgacaaggttgattttgtgcacaagcgtgtaaaagaagccgactccctcttggtggtgggatcatccttgcaggtatactctggttacaggtttatcctcactgcctgggagaagaagctcccgattgcaatactgaacattgggcccacacggtcggatgacttggcgtgtctgaaactgaattctcgttgtggagagttgctgcctttgatagacccatgctgaccacagcctgatattccagaacctggaacagggactttcacttgaatcttgctgctaaatgtaaatgccttctcaaatgacagattccagttcccattcaacagagtagggtgcactgacaaagtatagaaggttctaggtatcttaatgtgtggatattcttaattaaaactcattttttttaaataaaaaattgttcagcttta

SEQ ID NO: 3857 - DNA, 1171 bp, Homo sapiens; identical to SEQ ID NO: 3856

SEQ ID NO: 3858 - DNA, 1400 bp, Homo sapiens
gacccttgtttgattttagctgcagaacgtattggtccagcttgctcttcagtgggagaaaacacttgtaagttgctaaacgagtcaatcccctcattcaggaaaactgacagaggagggcgtgactcacccaagcatatataactagctagaagtgggccaggacaggcccggcgcggtggctcacgcctgtaatcccagcagtttgggaggtcgaggtaggtggatcacctgaggtcgggagttcgagaccaacctgaccaacatggagaaaccctgtctctattaaaaatacaaaaaaaaaaaaaaaaaaaatagccgggcatggtggcgcaagcctgtaatcccagctactcaggaggctgaggcagaagaattgaacccaggaggtggaggttgcagtgagctgagatcgtgccgttactctccaacctggacaacaagagcgaaactccgtcttagaagtggaccaggacaggaccagattttggagtcatggtccggtgtccttttcactacaccatgtttgagctcagacccccactctcattccccaggtggctgacccagtccctgggggaagccctggatttcagaaagagcaagtctggatctgggaccctttccttccttccctggcttgtaactccaccaacccatcagaaggagaaggaaggagactcacctctgcctcaatgtgaatcagaccctaccccaccacgatgtggccctggcctgctgggctctccacctcagccttggataatgctgttgcctcatctataacatgcatttgtctttgtaatgtcaccaccttcccagctctccctctggccctgccttcttcggggaactcctggaaatatcagttactcagccctgggccccaccacctaggccactcctccaaaggaagtctaggagctgggaggaaaagaaaagaggggaaaatgagtttttatggggctgaacggggagaaaaggtcatcatcgattctactttagaatgagagtgtgaaatagacatttgtaaatgtaaaacttttaaggtatatcattataactgaaggagaaggtgccccaaaatgcaagattttccacaagattcccagagacaggaaaatcctctggctggctaactggaagcatgtaggagaatccaagcgaggtcaacagagaaggcaggaatgtgtggcagatttagtgaaagctagagatatggcagcgaaaggatgtaaacagtgcctgctgaatgatttccaaagagaaaaaaagtttgccagaagtttgtcaagtcaaccaatgtagaaagctttgcttatggtaataaaaatggctcatacttatatagcacttactttgttgcaagtactgctgtaaataaatgctttatgcaaacc

SEQ ID NO: 3859 - DNA, 1400 bp, Homo sapiens; identical to SEQ ID NO: 3858

SEQ ID NO: 3860 - DNA, 1400 bp, Homo sapiens
ggttcatctctgtggtctgtgttgtcctgacatgtaaaaagcatatcgtttattgaggtttttttcccccccttttagagcatccggaagtgataacacgcaaaatcacaaagtagcataaatcagtaaattagttgagttgtttttgggggggaggtgggggtagggggcacagaacaccagaaagagtgttggtgtgtaggtagattccatattaatgaggaacactgaactagttggaaattactgctttctctagaaatataaagcaaagcactattccaaggctatggagtagctctacagcctggcctcaactctaaaagtgtgaagaatgcaatgggcagagacctacctgcagtggactgtcattttcctttctttctctgaattactgctttttctgtgggcattaactatattgctacagcatctagtgtactgagcctgcggtgcatggctcaggccttttcccatcgacgtctagggggactctggaccgtgtgaagctagggggtgtttctcagcacactgcagaagggcagctcagaagaatgcagggcccattcagcatggggatcccagcacatcactgtagaatttgagtgatctatgctgaataaacagtggaatgtgaccagtcaagtagaaatcttgagtaatcagatggaatgcaatctttctaacattaagctaccaagatcctgaatgtcagagatgtactcagagggttaacagacaagcacaaggcatgctgactacattggtgtatccagattgctttgcttttagccagtgctttctaatttttttctcgacattcttgggatagttcaagtttgaaataattaagtggtggtgttctttaaggaatttctataaccaaattgatcttatttttgatttcacttatcatagaacaaatatgtatcattatggcagtgtatctatgtaattatcaatttaatcatcaccaccggtgtttccatattttttcccaagtatttaatatagctctcttatggtggtggcctggtgatggggaccgtctttcttttactgacacatgaccaatcatatggtattttcaagggaattttaagattcatcttttcagtttgatagtagactagttaaggaagaactctttcattacttgcatcgtgtaaatcatctctgtagacatgtgttcatattaatgaacacattttttctcaacattgtagcagaaatcattttattcgtcatgatcaatgaatatgtgatttgctccagatcgttagaaggaaaagtaagatttcagtcatcaaaaatgtttttaccgtagccctcatctaacttacacgtggtgcatattaaaataagcagagaaaaaaaaatgtgaataaactactgaaaac

SEQ ID NO: 3861 - DNA, 600 bp, Homo sapiens
acgcttcccaaactgctttgcatgagaagtcatgtagacaggtacttcactcagaaagaggaaactgagagtggtagtggaccaaaatcttctagaaacacattggaagctgcgctcgattctattcgctacattacaagacacatcatgaaggaaaatgatgtccgtgaggttgttgaagattggaaattcatagcccaggttcttgatcggatgtttctgtggacttttcttttcgtttcaattgttggatctcttgggctttttgttcctgttatttataaatgggcaaatatattaataccagttcatattggaaatgcaaataagtgaagcctcccaagggactgaagtatacatttagttaacacacatatatctgatggcacctataaaattatgaaaatgtaagttatgtgttaaatttagtgcaagctttaacagactaagttgctaacctcaatttatgttaacagatgatccatttgaacagttggctgtatgactgaagtaataactgatgagatacatttgatcttgtaaaaatagcaaaatattatctgaactggactagtgaaaaatctagtatttgtatcctgg

SEQ ID NO: 3862 - DNA, 600 bp, Homo sapiens; identical to SEQ ID NO: 3861

SEQ ID NO: 3863 - DNA, 1400 bp, Homo sapiens
acagagacgtccatcggggtactcgtggacaagcttcagcgcatgggggagccctacagcccgtgcaccgtgaatggttctgaggtccccgtccaaaacttctacagtgactacaacacgacctactccatccaggcctgtcttcgctcctgcttccaagaccacatgatccgtaactgcaactgtggccactacctgtacccactgccccgtggggagaaatactgcaacaaccgggacttcccagactgggcccattgctactcagatctacagatgagcgtggcgcagagagagacctgcattggcatgtgcaaggagtcctgcaatgacacccagtacaagatgaccatctccatggctgactggccttctgaggcctccgaggactggattttccacgtcttgtctcaggagcgggaccaaagcaccaatatcaccctgagcaggaagggaattgtcaagctcaacatctacttccaagaatttaactatcgcaccattgaagaatcagcagccaataacatcgtctggctgctctcgaatctgggtggccagtttggcttctggatggggggctctgtgctgtgcctcatcgagtttggggagatcatcatcgactttgtgtggatcaccatcatcaagctggtggccttggccaagagcctacggcagcggcgagcccaagccagctacgctggcccaccgcccaccgtggccgagctggtggaggcccacaccaactttggcttccagcctgacacggccccccgcagccccaacactgggccctaccccagtgagcaggccctgcccatcccaggcaccccgccccccaactatgactccctgcgtctgcagccgctggacgtcatcgagtctgacagtgagggtgatgccatctaaccctgcccctgcccaccccgggcggctgaaactcactgagcagccaagactgttgcccgaggcctcactgtatggtgccctctccaaagggtcgggagggtagctctccaggccagagcttgtgtccttcaacagagaggccagcggcaactggtccgttactggccaagggctctgtagaatcacggtgctggtacaggatgcaggaataaattgtatcttcacctggttcctaccctcgtccctacctgtcctgatcctggtcctgaagacccctcggaacaccctctcctggtggcaggccacttccctcccagtgccagtctccatccaccccagagaggaacaggcgggtgggccatgtggttttctccttcctggccttggctggcctctggggcaggggtggtggagagatggaagggcatcaggtgtagggaccctgccaagtggcacctgatttactctagaaaataaaagtagaaaatactgag

SEQ ID NO: 3864 - DNA, 1400 bp, Homo sapiens
ggagtcagggacctgctgctcagtaagaagattctcgccccttccctctctccctgcctcactcctccgtgagcaccaccagggctccaggagcctcatccagcctcagagatctcccttctcatctccccacgcccgtctctttctcacctttcccacctctctccccaaagtgatcctaagaatgtacagttgagctcaggttagatatttcgaccctggggcgtgcagcagggaaggcccaactggttcaggctcaaccttccaacttcctgtggcctgaagaagcacttctgctgcatcgctgttctgggcatggcagggccaggcctctgctggctcctggagagcagaggctgtgcccagaggaggaggggtgagagacctgctcaggcgtcgctggatttattcacttgtgtgtgtacctgtggctgtgtgtctgcttgtatgcatttataggcctgtgtgtatagctgtgtgtgtgttcaagtgcgtgactgtatgtgtgtgtgtgaaccactgtgtactggagcctgcattatgcacgtgtctgggtatctttgtatatatgtgtatatatgtgtgccctggactgtttcaaggtccacggagtacggctggtgtgtcatactgtgcaggcctgtccctgggagtgttcccgtgcctgggagagtggacctgtgctgtgagtgtgtggatgcgtgtgaacgcatgtggtaaggtgtgtactcagggcattctgttggcctaagtgcctcttctttttcttcttgtttctcatgaaaagtttgattaaaattcaggaagcagcaaaaccttcaaaacaagacatgtatgtgtgcttgagtgtgtgaacacgtgtgtgtgtgtgtgcacatctacatgccatgcctatgggccagagttgtctttattgtccaccatgctctctcacctgctcccagtcctgcctgaacagccctctctctcactcccctctcctccccttcctgtttctcgttgtcacacccatggcctcagccctgctccctgcctcctgcctatgtctcctctatggaaggaggcctccactccttccatctcttccttcagaagtttcgtctaatgggggcagtctccccttcctggcacattgcccctctgccttgccctcctgggccctgggctggcacagcccctggagcctcagaaatctgtttgattggatattctcctcggactgtgtgcaggttgcagaggaagagtagatgagccgggtccggcctctccctgcctgtggcccctcccctgcagacggatgcccattcctgcctggtccagtggggaacaggtcccacgccaggccagcaggcgggctcctttgtacagttcttacaataaaccctccttggtgcctctgg

SEQ ID NO: 3865 - DNA, 600 bp, Homo sapiens
aaaaagttactacacatgctaggctttctcagtggggaaaaaaatggctggatagaactgggacaaacacagacccatctttaggggtctggattttgtaggtccgactacacagcagtgttaactcatttctcatgccattagctctctacaaaataaagcaaagtagttctagtgtggtcgttataaaccaatattgtgaaaaatagcaactattcatttgttcacaacatgcgtatttatagagtagttaggtaccatttgtaaggtaaatcctttaaaattctataatacatactaaaatagtggttattggtctgatatatgctgctcttggttctataaactagataaaagcagtgctttgtgaaatgcagtgttctctcttaacgccactggtgataggaagtagttcccttcagttcaaatcctgtgcccttatttgctgcttgctgacgtaagcaataagtaaccctctaactaatggtatctacatatttctgtaacttgtatttaatgatggtgtacctggtgattgtaaaaatattagacagatataaaagtatctatataatatctataaactgttaatgctgaggt

SEQ ID NO: 3866 - DNA, 600 bp, Homo sapiens; identical to SEQ ID NO: 3865

SEQ ID NO: 3867 - DNA, 1400 bp, Homo sapiens
tgcccgttggagacaagctccaggccggaggagccattcctgaaggaggccgaagacttcaccattttcataaagaaccacatccgtttccccaaattcaacttctccaacaatgtgatggacgtcaaggacagatctttcctgaaatcatgccactttggccccaagaaccactactgccccatcttccgactgggctccgtgatccgctgggccgggagcgacttccaggatatagccctggagggtggcgtgataggaattaatattgaatggaactgtgatcttgataaagctgcctctgagtgccaccctcactattcttttagccgtctggacaataaactttcaaagtctgtctcctccgggtacaacttcagatttgccagatattaccgagacgcagccggggtggagttccgcaccctgatgaaagcctacgggatccgctttgacgtgatggtgaacggcaagggtgctttcttctgcgacctggtactcatctacctcatcaaaaagagagagttttaccgtgacaagaagtacgaggaagtgaggggcctagaagacagttcccaggaggccgaggacgaggcatcggggctggggctatctgagcagctcacatctgggccagggctgctggggatgccggagcagcaggagctgcaggagccacccgaggcgaagcgtggaagcagcagtcagaaggggaacggatctgtgtgcccacagctcctggagccccacaggagcacgtgaattgcctctgcttacgttcaggccctgtcctaaacccagccgtctagcacccagtgatcccatgcctttgggaatcccaggatgctgcccaacgggaaatttgtacattgggtgctatcaatgccacatcacagggaccagccatcacagagcaaagtgacctccacgtctgatgctggggtcatcaggacggacccatcatggctgtctttttgccccaccccctgccgtcagttcttcctttctccgtggctggcttcccgcactagggaacgggttgtaaatggggaacatgacttccttccggagtccttgagcacctcagctaaggaccgcagtgccctgtagagttcctagattacctcactgggaatagcattgtgcgtgtccggaaaagggctccatttggttccagcccactcccctctgcaagtgccacagcttccctcagagcatactctccagtggatccaagtactctctctcctaaagacaccaccttcctgccagctgtttgcccttaggccagtacacagaattaaagtgggggagatggcagacgctttctgggacctgcccaagatatgtattctctgacactcttatttggtcataaaacaataaatggtgtcaatttc

SEQ ID NO: 3868 - DNA, 600 bp, Homo sapiens
cttccggggagaagtgaggacgtcacgcagacagcactgtcaacactgggccttaggagaccccgttgccacggggggctgctgagggaacaccagtgctctgtcagcagcctggcctggtctgtgcctgcccagcatgttcccaaatctgtgctggacaagctgtgggaagcgttcttggaagcatggggagtgatgtacatccaaccgtcactgtccccaagtgaatctcctaacagactttcaggtttttactcactttactaaacagtttggatggtcagtctctactgggacatgttaggcccttgttttctttgattttattcttttttttgagacagaatttcactcttctcacccaggctggaatgcagtggcacaattttggctccctgcaacctccgcctcctggattccagcaattctcctgcctcggcttcccaagtagctgggattacaggcacgtgccaccatgtctggctaattttttgtatttttttaatagatatggggtttcgccatgttggccaggctggtctcgaactcctgacctcaggtgatccgcccacctcggcctcccaaagtgctgggattaca

SEQ ID NO: 3869 - DNA, 600 bp, Homo sapiens; identical to SEQ ID NO: 3868

SEQ ID NO: 3870 - DNA, 1400 bp, Homo sapiens
caaccgtgactgccagatcgaccagcaccaccggaaccagtgccagtactgccgtctcaagaagtgcttccgggtgggcatgaggaaggaggcggtgcagcgcggccgcatcccgcactcgctgcctggtgccgtggccgcctcctcgggcagccccccgggctcggcgctggcggcagtggcgagcggcggagacctcttcccggggcagccggtgtccgaactgatcgcgcagctgctgcgcgctgagccctaccctgcggcggccggacgcttcggcgcagggggcggcgcggcgggcgcggtgctgggcatcgacaacgtgtgcgagctggcggcgcggctgctcttcagcaccgtggagtgggcgcgccacgcgcccttcttccccgagctgccggtggccgaccaggtggcgctgctgcgcctgagctggagcgagctcttcgtgctgaacgcggcgcaggcggcgctgcccctgcacacggcgccgctactggccgccgccggcctccacgccgcgcctatggccgccgagcgcgccgtggctttcatggaccaggtgcgcgccttccaggagcaggtggacaagctgggccgcctgcaggtcgactcggccgagtatggctgcctcaaggccatcgcgctcttcacgcccgacgcctgtggcctctcagacccggcccacgttgagagcctgcaggagaaggcgcaggtggccctcaccgagtatgtgcgggcgcagtacccgtcccagccccagcgcttcgggcgcctgctgctgcggctccccgccctgcgcgcggtccctgcctccctcatctcccagctgttcttcatgcgcctggtggggaagacgcccattgagacactgatcagagacatgctgctgtcggggagtaccttcaactggccctacggctcgggccagtgaccatgacggggccacgtgtgctgtggccaggcctgcagacagacctcaagggacagggaatgctgaggcctcgaggggcctcccggggcccaggactctggcttctctcctcagacttctattttttaaagactgtgaaatgtttgtcttttctgttttttaaatgatcatgaaaccaaaaagagactgatcatccaggcctcagcctcatcctccccaggacccctgtccaggatggagggtccaatcctaggacagccttgttcctcagcacccctagcatgaacttgtgggatggtggggttggcttccctggcatgatggacaaaggcctggcgtcggccagaggggctgctccagtgggcaggggtagctagcgtgtgccaggcagatcctctggacacgtaacctatgtcagacactacatgatgactcaaggccaataataaagacatttcctacctgc

SEQ ID NO: 3871 - DNA, 600 bp, Homo sapiens
gcggctggtgggcgccaccgcctccaccctgggccgccgggcccctgccccgacgccgggcccgctgcgggtgcccgcggtcgcacccgcaccgcccgcgggcctcgcaccgcacgcccgccgccgccgcgccccaccaccacaggcaccggcgcgccgctgggggctgggacctcccgccgcccgcgcccacctcgcgctcgctcgaggacctcagctcgtgccctcgcgccgcccctgcgcgcaggcttaccgggccctcccgccacgctcgcaggtgtccgcacgccgcgcactgggggccgccgctgcccacagcttcccaccggagacaccggggcggggacctgggcacccgcaggggctcggcgcacttctctagcctcgagtccgaggtatgacgcggccccgggggccccaccgcccccttggtcagcgcaggccacggcccgagggggcgcccgcagtggacaggacccgcgtgggttgggaaggaaagcagtggaactggccggaccccgcctggagcagcgtcctgcgccccctggttctggaggaaccgcaagccggagaggatttggtccctcaactatcacccag

SEQ ID NO: 3872 - DNA, 600 bp, Homo sapiens
tttttcaccccccagtcttgtcttttttagggacttcaataacatgagtggcagatcttgttttacactcccatgggtccttcaggctctcatcttttttctttttccagtctattttctgtcttgttaatattgattaatttttattgaccttccatggtcctcactgattgttttctttgtcatacctaatctgttgagtttgtgcagtgagttttcattttggttttgtattttccagttgtttaatttccattgggtgggttcttttgtacaccttctgtttctttgcttattttttaacgccaaagaaagactctcagagaatagacaactatattccaaagtcatggttctctggtggtttgtcttgacatttgaatagaaatgttaaactatctgggggaatagaaagcccacagtcttctgagttgtgctacaccaatatttctatgaacagatcttacaactgagagtgatctgcagatttttcagagtcatgttctccatggaatgtttgtaaaattccctagctctctgcactgagctgagatcgtgccactgcactccagcctgggcaacagagcgagactccatctc

SEQ ID NO: 3873 - DNA, 600 bp, Homo sapiens; identical to SEQ ID NO: 3872

SEQ ID NO: 3874 - DNA, 1400 bp, Homo sapiens
ccaccctatgactaactggaagaggacacgccagagcttcagtgaggtttccgagcctctccctgcccatcctcaccactgaggccacgacaaagcacagctccagctcggacagcaccctcagtgccagccagcctctgccagacctctctttccctcttctccccagcctcctccagggctgcccaaggcagggtttccagccaggcctcggggtcatcttttcaccaggagcaaacccaagtcttagttgctacaagaaaatcccctggaagtactgggggccaggttccccagacagcaggaattgcccctgttcagagcagccggagtttgctggaccacaaggaagaagagaagagacttgcagtgaactgtttttgtgccaagaaaccctggacctggggccaagtatttcccaagccaagcatccacttgtctgtgtctgggaagggatggccaaggccgctagggtccttacccctcaggatcactccccagccctttcctcaggaggtaccgctctccaaggtgtgctagcagtgggccctgcccaacttcaggcagaacagggaggcccagagattacagatcccctcctgtaagtggccaggcattctctccctgccctctctggcctctggggtcatactcacttctttagccagccccatcccctccaccccacacctgagttcttgcctcctccttttggggacacccaaaacactgcttgtgagaaggaagatggaaggtaagttctgtcgttctttccccaatccccaggaatggacaagaagccaacttagaaagaagggtctcacgtggctggcctggctcctccgtagacccctgttcttttcaacctctgcccacccgtgcatgtcatcacaaacatttgctcttaagttacaagagaccacatccacccagggattagggttcaagtagcagctgctaacccttgcaccagcccttgtgggactcccaacacaagacaaagctcaggatgctggtgatgctaggaagatgtccctcccctcactgccccacattctcccagtggctctaccagcctcacccatcaaaccagtgaatttctcaatcttgcctcacagtgactgcagcgccaagcggcatccaccaagcatcaagttggagaaaagggaacccaagcagtagagagcgatattggagtcttttgttcattcaaatcttggatttttttttttccctaagagattctctttttagggggaatgggaaacggacacctcataaagggttcaaagatcatcaatttttctgactttttaaatcattatcattattatttttaattaaaaaaatgcctgtatgcctttttttggtcggattgtaaataaatataccattgtcct

SEQ ID NO: 3875 - DNA, 1400 bp, Homo sapiens
agctttgggcagagcccttgcttcctggctgcttcagggctcaggggctcccagccctccttcccaggctgatgctgggtcctctctctctttggggcttctccctcccgtttcaggggaaaggtctgagtctccacgtttcagaccagcttctgggggaaggcagtccggcagggagaccgggaggggtggccacacagtggggagctgggaggtggggggaatggtcccagactcctctcggggcccctatccacacagggcctggtgttctaccccatctggcccctggcccatctcttctgtgccttagtcacatatgaaagcgcccctccctggctccccatctgtcccacacgctccctggggctcttagttcagctgctggcactcgcaggatcctgcagtgctgggcccagagcccttggacaggcctcaggagtggtcaggaccaccaagcccctcctctccccctccacacctctagacctggggcctccggaacccccagcaggctgggcttatactagctcctgacttaggaagagcctcgtgtcacaacacgtgtccctacaggcaaagtgtcctggcatttaaaacccagattatccctgggtttgggctgcagtcacctggagaagctggtagggtaagggagagggaccctgccggtgttcactggggattctttcttttggtccttcctggaatgaacaggttccctccctgccacctgtgaggagagttggggcccagccgtcttcctggcctccttcctttcctcgtggcagaggcctgcatgtgggtgccagaggccagctctccccctccatcttgggggggcggagcagttgggcccaagctgcccgggagggtgggtgcagacacaggctgaggaccagccctggccctgccccgccatctgctttcaccaagctgtctctccaccgtggcttcccttctccctccaggccaaagtgctgctgattcccactcccttggttttcgcctgcccagcgttgctgtttgcgtggagggtggggggagctcagtggcagggaatcagcggtccgtggggtcgtggggacgggaacatgtgcccgaccgctccatcccctcctcctccttaggatgcataacctaccttgtcttttttttttttaattttctttccaggtagagtagctctttgtacataaagaatacttgaaaaattaattgtatgatgtatgagaagacagagtctcctagttttgtatcttgttgtatgactgccatgagttccaccagaaagccactctattttggtctctgtgacattttaaatgcgtgacagaagtgagcaaataaagtgaggaagaaatctatatatgagataatatagattgtattgaaatctc

SEQ ID NO: 3876 - DNA, 600 bp, Homo sapiens
atcaccacagtcttaacgatgaccacccagagttcaggctccagggcatctctgccaaaggtctcctatgtaaaagcgattgacatctggatggcggtgtgccttctgtttgtgtttgctgccttactggaatacgcagcggtgaacttcgtctccaggcaacacaaggagttcctgcgcctccgaagaagacagaagaggcagaataaggaagaagacgttactcgtgaaagtcgttttaattttagcggttatgggatgggtcactgcctccaagtgaaagatggaacagctgtcaaggccacacctgccaacccactcccacaaccgccaaaagatggagatgctatcaagaagaagtttgtggaccgggcaaaaaggattgacacgatatctcgagctgccttcccattggccttcctcattttcaacatcttttactggatcacatacaagatcattcggcatgaagatgtccacaagaaatagatgtgccctacagaccctgggaccttcttgcctcagtgttgtgcttgtaaatacacagtgaaattgtctttatatcactttgacagaggagaagattgagggaggggggag

SEQ ID NO: 3877 - DNA, 600 bp, Homo sapiens; identical to SEQ ID NO: 3876

SEQ ID NO: 3878 - DNA, 600 bp, Homo sapiens
atagccccattggggtcagctccacctccttcccgaccccgtacacaagttcaagcagttgctaaataaatctccccactccagaagcattacccataggtcttaagatgcaaatcaactctctcctggtcgctttgccatcaagaaacattcagaccagggaacggaaagaagagagaccgagctaattaactaactcatgttcattcagcgtgcttggtccgacatgccttgaaaccagaaatctaatctctgtttaggtgcctctacttgggagcgggaagaggagatgacaggaagcgacgcctctggcagggcccttgctgcagagttggtggagaacagaaatccacgctcaatctcaggtcttcacgcggggggtgggggtcagatgcactgaagtagccaacagcgaagccagtccagaagaggggtccgctgggagggagggttgtgtcaggcttgggggatgggctcttcgccatgggggtctttgaacacacctctctcctttccttttgtctacggaagcctctgggtgacaaaagtaaaagagagctgcccacaacttgccaaaacagatatactcgaatcagactg

SEQ ID NO: 3879 - DNA, 600 bp, Homo sapiens; identical to SEQ ID NO: 3878

SEQ ID NO: 3880 - DNA, 1400 bp, Homo sapiens
taaaaccaccaaagatcagttataggataaaatggcatctctaaccataacacaggagaattggaaggagccctaagttgtcactcagtttaatttcttttaatggttagtttagcctaaagatttatctgcatattctttttcccatgtggctctactcatttgcaactgaatttaatgttataactcatctagtgagaccaacttactaaatttttagtatgcactgaaagtttttatccaacaattatgttcattttaagcaaaattttaagaaagttttgaaattcataaagcatttggttttaaactattttaagaatatagtactcggtcaggtatgacggctcacgcctgtaatcccagcactttgggaggccgaaacaggcgaatcacttgagcccaggagttcaagaccaacatgggcaatgtggcgaaactccatctctacaaaaaatgcaaaaataaaaaatatagtactcaagtattcttgatcctgtgtttcaaaactagaatttgtaatgcaaatggagctcagtctaataaaaaagaggttttggtattaaaagttcatacattagacagtatcagccaaaatttgagttagcaacactgttttctttacgagagggtctcacccaaatttatggggagaaatctatttctcaaaaaaaaaaatcttcttttacagaaatgttgagtaaggtgacattttgagcgctaataagcaaaagagcatgcagtgctgttgaataaccctcacttggagaaccaagagaatcctgtcgtttaatgctatattttaatttcacaagttgttcatttaactggtagaatgtcagtccaatctccaatgagaacatgagcaaatagacctttccaggttgaaagtgaaacatactgggtttctgtaagtttttcctcatggcttcatctctatctttactttctcttgaatatgctacacaaagttctttattactacatactaaagtttgcattccagggatattgactgtacatatttatgtatatgtaccatgttgttacatgtaaacaaacttcaatttgaagtgcagctattatgtggtatccatgtgtatcgaccatgtgccatatatcaattatggtcactagaaagtctctttatgatactttttattgtactgtttttcatttcacttgcaaaattttgcagaattcctcctttctacccataaattacatatatttttcttctttagtcatggagaactccccccctcatctcttccctattatctttccctgtgtactggtattattaaaaagacattacatacgcaagtctttctcgacaatcaagaatgttattaatgtgtaatactgagcactttacttcttaataaaaacttgatata

SEQ ID NO: 3881 - DNA, 1400 bp, Homo sapiens
cccacagcatctgagtgcccagaaactggagatgctatacaatgaaatcaccaagacacagcctcattctcacccaaacccagactgccaagaaaagcctgagaggccatctgcatatgaagaagagattgaaatggaagaagtggtgtgtccacaggagcagctggccgtggcacagaccgaggtcattgtggacatgaagagcacctccagcatcgacagcttcaccagctgtgccaccgacttcacagagacagagagatcgccgctgccgccgccctccgcctctcacttgcagatgaagttcccaaccgacctcccagggacagaagagcaccaaagagctaggggccccccgtttctaactctatccagagagaaaggacctgctgccagggatggcacgctggagtatgccccagttgacataactgtgaacctcgatgccagtggctcccagtgtgggctacatagtcctttgcagtctgacaatgccaccgacagtcctaagagctctctaaaaggcagcaacccactaaagtccagatccctcaaagtgaactttaaggaaaatagaggcagtgcaccacagaccccgcccagcacagccaggccactgccagtcaccacagctgacttttcgctcactaccccgcagcacatcagtaccatcctcttagaagaaaccccctcccagggagacagacccttgctgggcactgaggtttcagcgccttgtcagggaccttccaaagggctgtcccccaggtttcccaagcagaaactgttccctttctcttcaagagagaggaggagcttcactgaaatagatactggtgacgacgaagacttcttagagctcccaggggcaagggaggagaagcaggtggactccagcccaaattgctttgcagataagcctagtgatgggagagaccctttaagagaagagggcagtgtgggctcttcctccccgcaggacacaggtcacaactgtaggcaagacatttaccatgctgtgagtgaagtcaaaaaggacagtagtcaagaagggtgcaagatggaaaatcacttgtttgccccagaaattcattccaacccaggagacacaggttattgtcccacacgtgaaaccagcatgtgactagttacaaaagcaataaattgaaacaaaacaaaacaaaacaaaacttgtttcttaaaaatgcggttaataatgcctgtgaactaaaaaaatgggaagccctccccaaaaaaagtgcataaaatgttatttttgcatggcatgaacagtttagcttaagtactgtttaaataatgagtcaagactgcattttgtaacaaaccaacaaaaatgactgaagaacagtgaacaaataaaaagagctctattaggaacc

SEQ ID NO: 3882 - DNA, 1400 bp, Homo sapiens; identical to SEQ ID NO: 3881

SEQ ID NO: 3883 - DNA, 600 bp, Homo sapiens
gttttccgggacgagtttgatctggccattctccagctgcaggagaacaaccgcctggagatcctgaagcgcaaatggtgggaaggagggaagtgccccaaggaggaagatcacagagctaaaggcctgggaatggagaatattggtggaatctttgtggttcttatttgtggcttaatcgtggccatttttatggctatgttggagtttttatggactctcagacactcagaagcaactgaggtgtccgtctgccaggagatggtgaccgagctgcgcagcattatcctgtgtcaggacagtatccacccccgccggcggcgcgccgcagtcccgccgccccggccccccatccccgaggagcgccgaccgcggggcacggcgacgctcagcaacgggaagctgtgcggggcaggggagcccgaccagctcgcgcagagactggcgcaggaggccgccctggtggcccgcggctgcacgcacatccgcgtctgccccgagtgccgccgcttccagggcctgcgggcacggccgtcgcccgcccgcagcgaggagagcctggagtgggagaaaaccaccaacagcagcgagcccgagtag

SEQ ID NO: 3884 - DNA, 1175 bp, Homo sapiens
gatccattttaagaagatttattcctctatgatggagaagtatgaaaaaattgggaaaattggagaaggatcctatggagttgttttcaaatgtagaaacagggacacgggtcagattgtggccatcaagaagtttctggaatcagaagatgaccctgtcataaagaaaattgcccttcgggaaatccgaatgctcaagcaactcaagcatcccaaccttgttaacctcctggaagtcttcaggaggaaacggaggcttcacctggtgtttgaatattgtgaccacacagttctccatgagttggacagataccaaagaggggtaccagaacatctcgtgaagagcataacttggcagacactgcaagctgtaaatttttgccataaacacaattgcatacatagagacgtgaagccagaaaatatcctcatcacgaaacattccgtgattaagctttgtgactttggatttgctcggcttttgactggaccgagtgactactatacagactacgtggctaccaggtggtaccgctcccctgagctgctggtgggggacacgcagtacggccccccggtggatgtttgggcaattggctgtgtctttgctgagctgctgtcaggagtgcctctgtggccaggaaaatcggatgtggatcagctgtatctgattaggaagaccttgggggatctcattcctaggcaccagcaagtgtttagcacgaatcagtacttcagtggagtgaaaattccagaccctgaagatatggaaccacttgaattaaaattcccaaacatctcttatcctgccctggggctcctaaagggctgtctccacatggaccctactcaaaggctgacatgtgaacagctgttgcatcacccatattttgaaaacatcagagaaatagaggatttggcaaaagaacacaacaaaccaacaaggaagaccctaagaaagagccgaaagcaccactgctttacagaaacatccaagttgcagtacctaccccagctaactggcagcagcatccttccagctttggataataagaagtactactgtgataccaagaaacttaactaccgttttccaaacatttaaaggagctaggagacatgattttaaaaaaggaatcaatagatgctttgaagaaaataaaacttatacagtt

SEQ ID NO: 3885 - DNA, 1175 bp, Homo sapiens; identical to SEQ ID NO: 3884

SEQ ID NO: 3886 - DNA, 600 bp, Homo sapiens
tcggactgcgggtgacggccctgcccgccaccagacccctaaatcttggccatcgtgtggccgccacctccgggaagccttgtacagtggcgcctcttggagttcaagaagccaacgctgagtcaggctgagtggactgaggcctgccccgcccagactgcccaggcagagggcagggctggaccatgggtgagggcaggggagcccggagcttcctctggtcacctggtcccccgactctccccaggcccccggtgggcatggagcagcccggggaggggtccgtgctggttctgaataaagcaggacccgcctagtggctgcctgtgtgcatggctggaaggcactggtgatgtcccaggaggtagacctccagccctgggtaccaagatgaatgtgggaatcagaaaaacctgttcccatcaccggcctagcctagaatcctagcctagaagccctctctccctctgggctggagctcagtgagggacaactctctagggacacctgtaccagccccacctggcgctgagatccctcagacagcatggcccagccctggccagaagcatcgctccccttcaaccaaccgcgttgatg

SEQ ID NO: 3887 - DNA, 408 bp, Homo sapiens
gtttctttctttccgcgccgatagcgctcacgcaagcatggttaacgtccctaaaacccgccggactttctgtaagaagtgtggcaagcaccaaccccataaagtgacacagtacaagaagggcaaggattctctgtacgcccagggaaagcggcgttatgacaggaagcagagtggctatggtgggcaaactaagccgattttccggaaaaaggctaaaactacaaagaagattgtgctaaggcttgagtgcgttgagcccaactgcagatctaagagaatgctggctattaaaagatgcaagcattttgaactgggaggagataagaagagaaagggccaagtgatccagttctaagtgtcatcttttattatgaagacaataaaatcttgagtttatgttcactt

SEQ ID NO: 3888 - DNA, 1400 bp, Homo sapiens
ccttcctttggattaggaaagatgagttttacctctggtacactgtcttggtaagcctggatgtgacagacacctcggctctccttgaataagaaagccagcagaactcttaaagccagttgtagtacggagttgtcagcactcactgaacctcactttacagggataagagtggtgtggcattttaaatacaatggtatgttattgccagggagtgaggtacaagacgatggctcatgtcacaggcctacctgatacggtgtcagagaaagtggtggggaaaggatctggttcatggaattctgatcttggcccataggtgaaccaccaaaatagtgctcgagtcttaggttactgtcatcaaagacttgggatgactccattatatcctggggttgtgggtattagaactaaatatggaggtcctgagcatggggactggcgtcctcagtaggtgtttgggaatatgggaagggtctcctatttattcaatagagttttctcagttattttcctcccttgcccttgcaatctccagcaaaaggtgggatctaggaagaaagaatccagtgtagaagttgagaagaacttgaacgttttggttctggataaggtcactgtcctaggtgctaggtggaccgagcaaaagactcagtggatgaactggtgcagtgcctgacagaataaagaacagtattaatccctttgagaaagcatagtccagcaggacagtggccatttggacagaagcccacttagtttcttgggagcaacagcacgtatcagaagccagacttgctcttcggtcatgcactttgggatacagcgtataggtgcagccctgtcacaacaccaacagaagtagcagcctctgggtgcagtcacccacaccccaaagctggaaggatctggttcaacatagcacaaacccttaggaaaaatgaaattaacatcactgatgtgtaatccagtaaaatctccctttttcgggtgtgtatgtgggcatgtgcccatttctatgtgtgtgtctacgtgcagctcactaccaacagcctcatgtgcacttgacctgacagtgctcgctgagaactctcaccaggttggcgcctgaatgccttactctcagcagtcagaggcttgcttgctctgtgcagatttttaattttcttttttggccctaggctggttgggacctctacagcttcattctttcaccattaaatagtggcctttttcagtattttccctcttcccctttataaattatgctaaagccacaaagcacatttttggggatcatagaaggttggggttccagaaaggcatctgtgtgatggttccattgatgtgggatttccctacttgctgtattctcagtttctaataaaaagaaccaaatg

SEQ ID NO: 3889 - DNA, 600 bp, Homo sapiens
tttcaaatttttagccaggtactctgctcatagaaatcttaaatcaaagaataaaataaaagcagacagatggctctagttaaagtgtgtatccatggggcggggaagagttaaggagtagggctgtgggtgctggagcccactctaggatactgcacagcagccccaaacccacctacctagcaaggctcaactttaattggaggacaagaaaggcctgagactcaaagtcaatttcctgtctttcaagtaagtttgccttcttatccctagatgaaaaactccagtgtcccatcttttagcaagcacatatggcaacccccaactcccagggggttcattttgcctttctgaataaatcttagaatctacaggtctccctctctgccaatgaatgtgcctctctttcagtctctgtctctctctcccagcacatgtgtatcagcctgtcctggctgatttcaggatgattacatgggccagggcaggaatgccactccaggggtacagtttttggcattgctagatgcagagaacccttaggtttccagcgtggattttgtggacagagccccagtcactgagctgcccaccctctcc

SEQ ID NO: 3890 - DNA, 600 bp, Homo sapiens; identical to SEQ ID NO: 3889

SEQ ID NO: 3891 - DNA, 1400 bp, Homo sapiens
ccagccctggagcgccggggaacgctggccggcgacgtctttagcttggccatcatcatgcaagaagtagtgtgccgcagtgccccttatgccatgctggagctcactcccgaggaagtggtgcagagggtgcggagcccccctccactgtgtcggcccttggtgtccatggaccaggcacctgtcgagtgtatcctcctgatgaagcagtgctgggcagagcagccggaacttcggccctccatggaccacaccttcgacctgttcaagaacatcaacaagggccggaagacgaacatcattgactcgatgcttcggatgctggagcagtactctagtaacctggaggatctgatccgggagcgcacggaggagctggagctggaaaagcagaagacagaccggctgcttacacagatgctgcctccgtctgtggctgaggccttgaagacggggacaccagtggagcccgagtactttgagcaagtgacactgtactttagtgacattgtgggcttcaccaccatctctgccatgagtgagcccattgaggttgtggacctgctcaacgatctctacacactctttgatgccatcattggttcccacgatgtctacaaggtggagacaataggggacgcctatatggtggcctcggggctgccccagcggaatgggcagcgacacgcggcagagatcgccaacatgtcactggacatcctcagtgccgtgggcactttccgcatgcgccatatgcctgaggttcccgtgcgcatccgcataggcctgcactcgggtccatgcgtggcaggcgtggtgggcctcaccatgccgcggtactgcctgtttggggacacggtcaacaccgcctcgcgcatggagtccaccgggctgccttaccgcatccacgtgaacttgagcactgtggggattctccgtgctctggactcgggctaccaggtggagctgcgaggccgcacggagctgaagggcaagggcgccgaggacactttctggctagtgggcagacgcggcttcaacaagcccatccccaaaccgcctgacctgcaaccggggtccagcaaccacggcatcagcctgcaggagatcccacccgagcggcgacggaagctggagaaggcgcggccgggccagttctcttgagaagtgaggcccggccccggacagggtctgggccctgctccctgtcccatctgcagtggaccccaggcacccccctttgaggaggtggggtgaactgctccttggcagggatttgtgacactgcattgctgggctgtgttcctcgggctcttctggaccttgcaccgtggataccaggccatgtgccatggtatttgggtcctgggagggtgggtgaaataaaggcatactgtctt

SEQ ID NO: 3892 - DNA, 1400 bp, Homo sapiens
gatctccttatttttacctttttacagggtttctaggacattgtcattattcttcctccatctatctgattccattccttccacacccagctaaagttagaggagatacatatagaatctattttagattattgttaactatttgcatcaaattaagatacacaaatggccatggatgttgccttagccttaaacattactaatagtttcacatcacctcactgcacgcatcgaaggatctgatttgaatttgtaaaggcaattcttttgagagcaggattctccaggctaaatcaaaggcagctaatcctgtccctgaaggagcagctaggggaacctgaggcttgttcttgaagtgggcaagctggccaaaatattggaacacacagaaccaaaccaggtgtgttctacacctgcatgagtgaaggatttccacgtagacacctaggaagagcccgcatgccctagactcactccagaggaaggattgatttgcaaccagaaagggagctgaaaaccacggagctccatggctcttcattcaaaagggaaaataatgattccacgttgctttttagagttcaaatcaacatctttctggataaatctattttttaacaatctttttattatttgtaaaagatataaaaacaactcccatcagtagcaatacaaggttatacattttaaccagattttctcaggccttttttggatacctttagtagttaactctcttttgtcaaaccctcttgtatataaccatcgcacaacatacagaaccctggggaatacagccaagggcactgctcactgtggcccgtgtattcattcccacaggctgcactgaaataacctggtaaacaacaccctcctccattttgcgtctatttcttctattgtgcttctttggggataggaagagaaacataactactgttccaggtaacgtctgtatcatacagttagtgttgccagtgaaacgttcccagatacaaagaattgtgcttttaattccatttcacaatctgttttgttttttttttttgtcattgtctgaccaaaattccttctgcacatgaggccagtataggcaacgtcacatttgtttgtttcaaatatgcagtgtggtattttgtttactttgcatttaccgtgagcaaagatacttcttggaatggctgcagtgaggccgtgtcattggctcacaaaagtgactcataggtaatttctgtgtttgcattccactgctctgctccctaaggtccttgactttctccccaggaattcacttaaaaagggactgagcattgtgtcaacctgttgcagtgtttttcatatatgtgttcactctaaaaatgcaaataaagactgcttccttagagggtgctcatacaaaa

SEQ ID NO: 3893 - DNA, 1400 bp, Homo sapiens
gaattgtaacaggaatgcttctctgtcaaaacaaaagtctttagagaatgatctatcactgacgttgaatttggatcagagactctctctgggttcagatgacgaagcagatcttgtcaaggaacttcagagcatgtgctccagcaagtctgagtctgatatcagcaagattgctgattccagggatgatttaaggatgtttgatagttctggaaacaaccctgtactttcagcaactattaataatctgagaatgccagtgtcacaaaaggaggtcagtcctctcagcagccatcaaactactgaatgcagcaacagtaaatcaaagactgagttgggtgtttcaagagttaaatcttttcttcctgttcctagaagtaaagtcacccagtgttcccagaacaccaaaagaagcagcagcagcagtaatacaaggcaaatagaaatcaacaacaactcaaaagaagtgaattggaacttacacaaaaatgaacacctagaaaaacctaacaaataggcctgcctacaatattctcattattaacttcctctatttcacacagaaaccaaggacaacaagatacaaatacctttaaattgataaaatgttttcactgtaatataaattatgagtgcgggaccactattcaatttttttttgtaaagaatgtatttataaccaacattttgttgcttttttttttaattctgtaggattgaacttcaataccaggaagttatgccaacttttcaagtagttttataatagaaaaattgtaatagttttaatcaagatgttcaggggtattaaaacagaactgtgtactgtatatctgtatatatgtatatatgtatgtatatttaaggaagtccagaaatcatactgcatacatgctacaaaaaagtagcaaaaaagtacaaagttggcttagataacttgtaccgttttaaatggagatcataattttatgttcacttgatggggaatgactagaatggggcaataacaaatcatttctaaacagttattttccattaaaagccatattaagtattttgcttgttaaattctagttttatgttttaaatctcttagtggttacattgccatttggtagcatcatgtatatatttatgcttataagtttgcattatgactcctgtaaaatatgaaattataatgcaataaaagtgttatctttcttacaaaagttttgtacctaagtggatatagataactgcataaatgaataaattcagaattaactccttcaatatttctagtagcacaactgataatattgatattttctacaaatgttacttctaaaattacagacaaaattacttacacaattcagttaagatgctttgacactgaataaaatattgatttcatg

SEQ ID NO: 3894 - DNA, 1400 bp, Homo sapiens; identical to SEQ ID NO: 3893

SEQ ID NO: 3895 - DNA, 600 bp, Homo sapiens
tctgccgcttacctagcttggcctagagtggcaaatggaacttctctgatctcccccaactagactggagcccccgaaggatggagaccatgtctgtgccatctctgtttcccctgttttcccacatactaggtgctcaattcatgcctgtgaatggcgtgagcccataatggatacacagaggttgcagcagatggtgtgggtacctcacccagatatcatccaggcccaaggcccctctccctgagtgaggccaggtgttggcagccaactgctccaatctgcctccttcccctaaatactgccctggtctagtgggagctgccttccccctgccccacctctcccaccaagaggccacctgtcactcatggccaggagagtgacaccatggagggtacaattgccagctcccccgtgtctgtgcaggattgtctgggttgaatgacactctcaaattgttcctgggatcgggctgaggccaggcctctcctggaaccacctctctgcttggtctgaccccttggcctatccagttttcctggttccctcacaggtttctccagaaagtactccctcagtaaagcatttgcacaagaa

SEQ ID NO: 3896 - DNA, 600 bp, Homo sapiens; identical to SEQ ID NO: 3895

SEQ ID NO: 3897 - DNA, 97 bp, Homo sapiens
tttttaacaaaatgatgtacaaactaaggactatttattgataatgttttgctactcttgtcagacaatggctataaactgaattaggcagtcttaa

SEQ ID NO: 3898 - DNA, 1400 bp, Homo sapiens
ccattggtttcagacttggttcaattaagattggttggggatttttctcttttccttattaaccatgttctggtatcagaatggtgttccttctccatcagaggctgggaaacgtattataattagtttttctcccacataccttcaccaagagcagtgaagaataactgaaggctggaccatgcatccttaaaagtattgcatgagcatctccacctcagtatggaagagggatggacaaccccctattcatacctctgagttcctgatggcattagtcatatagtaacaaattccaaagcccttaaataaacggaaaacagaccaaattcttctaaataagaactatcccagcttacttgtgagtctgcttctgcatatactcggacgacatcttctgtaccagagggccggacaaaagctcgagaaagcttgtacttcttcaccaggtcattgattgcctcctgtaatcctgggggtgtaactgcttgtctttcagcatcggtagtgctaataactctcctgtctgcaacctaagtgcaagcatttcatatttgttactctattacacttcctttcagaagcttaacctgttaaacatacattctacgaaaagtgccagactaaatataaaattacattaaaacttctttctccaaggtcagggtaattaatttcaacatttgtgcaacttttctctttttcttcagtctataaagaattacctttggcaaaaaatatttccacaaatgcttagagttaccactaagataatggccagtaaatacgatatgactaagtcccatatcacacacaaaaacaggataagtggtagcccattatataagaagaccgataagaatttcttaaatatgccaaaaataatctgaacaatcagccatttctgtgaactgtggctttagtacctccaattgtctttcacaaattctgttggtgaatgtgtaaactggcataaacatgtacagaaatcaattagcaatttatctgaattctctccctcaggaagtactctgtgaactaaacataatgcagagtaagtactttcacttgaaatgacagggcatctgagttttgcttcaaaataatgttggggccaggtgcagtagctcacacctgtaatcctagcactttgggaggccaagggagaaggatcacctgagctcaggagttcaagaccagcctaggcaacatagtgagatctcgtctctaaataaaatatacaaaagagtattgggagggggtatgaagaatgtatagggcaataattgaaatctgttgaagctgggtacacaaaagttcattatgttgtttctctacatttatatctatttttaatttttttatatctatttttaattttccataataaaatctcttta

SEQ ID NO: 3899 - DNA, 600 bp, Homo sapiens
tctcgatttgaagggatgagggtggttgtgaatgcccttttaggagcaattccatccatcatgaatgtgcttctggtttgtcttatattctggctaattttcagcatcatgggcgtaaatttgtttgctggcaaattctaccactgtattaacaccacaactggtgacaggtttgacatcgaagacgtgaataatcatactgattgcctaaaactaatagaaagaaatgagactgctcgatggaaaaatgtgaaagtaaactttgataatgtaggatttgggtatctctctttgcttcaagttgccacattcaaaggatggatggatataatgtatgcagcagttgattccagaaatgtggaactccagcctaagtatgaagaaagtctgtacatgtatctttactttgttattttcatcatctttgggtccttcttcaccttgaacctgtttattggtgtcatcatagataatttcaaccagcagaaaaagaagtttggaggtcaagacatctttatgacagaagaacagaagaaatactataatgcaatgaaaaaattaggatcgaaaaaaccgcaaaagcctatacctcgaccagga

SEQ ID NO: 3900 - DNA, 600 bp, Homo sapiens
gaggagcagctcaccaagaatatgcacttgcacaaggatatggaagttctgtcccaggaaattgtgcggctcagcaaggagtgcgtggggcctcctgacccagacctagagccaggagaaaccagctaaagacctgcaggctgcacccacctcctccccttcctaccccctaggatgctattcccttgggctgtggtggaaaaatgagggctggagccaaaatcaaatagcttgggagactggacattaaaggggctagaggcctgatggttagtgttaatgatcctgtcttagggcagaggccaccagggagtggggatcctgagggaaggggcagggatttctccttcttcttggtcctggctcccaagggcttctgtcttcatctctgcatgagctctccttcccagagaccaactcttttttattttattttattttattttttaatttatgtctggagcctggctactctgcatttgggattggggatgctgggtgggtgtgtggtccatgttcagcgttctagcaacacgtgtgtgtgtgtgtgtgtaaaggctatgcagccaaaataccatctggccagacgggcccacccac

SEQ ID NO: 3901 - DNA, 1275 bp, Homo sapiens
gtgtcctcagcctgcgggggctgcgtggaggtggactcggagaccgaggccgtgtatgggatgaccttcaaaattctttgcatctcctgcaagcgccgcagcgagaccaacgctgagaccttcaccgagtggaccttccgccagaagggcactgaggagtttgtcaagatcctgcgctatgagaatgaggtgttgcagctggaggaggatgagcgcttcgagggccgcgtggtgtggaatggcagccggggcaccaaagacctgcaggatctgtctatcttcatcaccaatgtcacctacaaccactcgggcgactacgagtgccacgtctaccgcctgctcttcttcgaaaactacgagcacaacaccagcgtcgtcaagaagatccacattgaggtagtggacaaagccaacagagacatggcatccatcgtgtctgagatcatgatgtatgtgctcattgtggtgttgaccatatggctcgtggcagagatgatttactgctacaagaagatcgctgccgccacggagactgctgcacaggagaatgcctcggaatacctggccatcacctctgaaagcaaagagaactgcacgggcgtccaggtggccgaatagccctggccctgggccccgcctcaaggaagagccagccgtaatggggactctccaggcaccgcctgcccccagcgtgggggtggccactcctgggccccagaaagcctcagagtcctgccgacggagccactggggtgggagggggcagggggcttggctcgcacccccactttcgcctcctccagctcctgccccgccggccgcgcaccgccatgcatgatgggtaaagcaatactgccgctgcccccaccctgcttctgctgcctgtttggggaggggggcggtgaggtgggggcagcggccccgcacccctcctccttgctgatttgcacacattggccgcttcagacacgcacttctggggccagcccctccccgcctcctccctgcctggcggcaggggtcgcgatgatgggctggagcagtttggggcagggggttctgggacccactccgactccccctccccggcatcatttcccctcccgcttcctccggctggacctggggtcccccctccctgtaatgcactcctgccccggcccaacctcgccctctctcaccagccttgaactgtggccacctagaaaggggcccattcagcctcgtctctttacagaagtagttttgttcatgaaataaagactcttggacttg

SEQ ID NO: 3902 - DNA, 600 bp, Homo sapiens
gcccccatcatcgtctttgtcaaagtgtcctcaccaaaggtactccagcgtctcattcgctcccgggggaagtcacagatgaagcacctgaccgtacagatgatggcatatgataagctggttcagtgcccaccggagtcatttgatgtgattctggatgagaaccagctggaggatgcctgtgagcacctggctgagtacctggaggtttactggcgggccacgcaccacccagcccctggccccggacttctgggtcctcccagtgccatccccggacttcagaaccagcagctgctgggggagcgtggcgaggagcactccccccttgagcgggacagcttgatgccctctgatgaggccagcgagagctcccgccaagcctggacaggatcttcacagcgtagctcccgccacctggaggaggactatgcagatgcctaccaggacctgtaccagcctcaccgccaacacacctcggggctgcctagtgctaacgggcatgacccccaagaccggcttctagcccaggactcagaacacaaccacagtgaccggaactggcagcgcaaccggccttggcccaaggatagctactga

SEQ ID NO: 3903 - DNA, 600 bp, Homo sapiens
gtcccaggagctggatgaacaaatataccaagaagatgaatgctgaaggaaccaacagtccacctcagcgggccagcagcccagggaacccctgcccaccaggattgctggaagtgtgacggagcaggcgggctgaggagagtggaaaaggaagcgacccagaaatggcagggacacttctcttgcagaccaagagggaccctggagcaccttagacaaactacccagcacaggcggggctggaattctggcggagggcatgagcctgggactccatgtcacgtttccttctgatttggaatctctccatctgtaattcctcaccctcacccttccaccgttgttagtatcatggtgtttttgtttttgtttttgttttaagaacctgcagtttgactcttcatcgttcatctaggggaagacatctgatgttgttttcctatggaaatatatatctattatatatatattttttgcaaatctcacaaagtgcggcaagcccagctggtcaggaaagagaatacttgcagaggggttcaggttcctctttttcctgccacgtggatcaggtctgttcctgttactgttgggtcttggctg

SEQ ID NO: 3904 - DNA, 600 bp, Homo sapiens; identical to SEQ ID NO: 3903

SEQ ID NO: 3905 - DNA, 600 bp, Homo sapiens
tgctatttgtaacttggggatggtctcccctgccccagggcacataagagcaaaggctccaatggtcagtggatgactctgcaaaagtgaccccctgtgccagaagctatagccctctccccaacaggtctctcttgttggccagagggcctgcttcccatgggcattgcaagtgccaccgtgcggggcctggctctgcacacccaggaaaagtctgcagacccccagccctccgcaataattcaccagaccagaagccactggtgtacagagaacacttaaaaaaatgtattttatgtgaaaaaaaattaaaactctgtatactgtatcagcagctttgtgtaaaaatggcaatcaagagagtctaatatatttaaaacttttttaaaaaaaatcttcgcagatctttgatatcgtactgaggtaacttccacgtagccccttgccacgcggcaccggtgggccttgggtccaaaactgtggctcagccacatcccaaagggggcacatgtccctggagttgcttccagctgccaaggcctgtgacagaattcgctgttaagagtttttaattaaaattattaaattccttttaataac

SEQ ID NO: 3906 - DNA, 776 bp, Homo sapiens
ctctgtcgtggcgcggcttcccgcggtcttctctgcaaatgggctccgtggcctagcgcccccgtccccgccacccgtgatcgtgcgccgaggcccgcgaggggtcgccgcccagatcccaccagccagcaagctaaagcatggcggccatcccctccagcggctcgctcgtggccacccacgactactaccggcgccgcctgggttccacttccagcaacagctcctgcagcagtaccgagtgccccggggaagccattccccaccccccaggtctccccaaggctgacccgggtcattggtgggccagcttctttttcgggaagtccaccctcccgttcatggccacggtgttggagtccgcagagcactcggaacctccccaggcctccagcagcatgaccgcctgtggcctggctcgggacgccccgaggaagcagcccggcggtcagtccagcacagccagcgctgggcccccgtcctgacctgagcggttaccaccagccccaggcctgcggaggcgctagtccaccagagcccctccccgcccctctccccactccgcatccctcgcccccctccccacctcccaccccccaccctgtaaactaggcggctgcagcaagcagaccttcgcatcaacacagcagacaccaaaaaccagtgagagccccgctctctaccgcccggccccagcactcgctagctttcctgacacctggaactgtgcacctggcaccaagcggaaaataaactccaagcagccagtagccccg

SEQ ID NO: 3907 - DNA, 776 bp, Homo sapiens; identical to SEQ ID NO: 3906

SEQ ID NO: 3908 - DNA, 600 bp, Homo sapiens
aacaaggtgacaacttcttatctttcagcgcagcttgtgagactgatgtatcttcagtgaccccagaaaaggaatttgaagaaacttcagccacaggaagtagcatgcagtctggatctgaactgttgcttaaagagagagagatattgactgctgggaaacagcctagctctgatagtgaattttcagccagtcttgctggcagtggaaagtcagtggcaaagactggtccagagagtaatcagtgcttaccacaccacgaagaacaagcttatgctcaaacacagagttcactcttctattcgccatcttccccaatgagcagtgatgatgaatcagaaatagaggatgaggacttgaaggtggagcttcaaagattacgagaaaaacacattcaggaggtggtaaatcttcaaacccagcagaataaggagctgcaggagctctatgaacgccttcggtcaattaaagatagcaaaacccaatctactgagattcctttgccacctgcatcaccacgtcgaccaagatctttcaaaagcaaacttcgaagccgcccccagtccttgacacatgtggacaatggcatagttgctacag

SEQ ID NO: 3909 - DNA, 600 bp, Homo sapiens; identical to SEQ ID NO: 3908

SEQ ID NO: 3910 - DNA, 600 bp, Homo sapiens
tatgtaggagtgaatataaaaggacttcatctcctcaacatggaaactaaggctttactcatcagtcttaagtatggttgttttatgtggcaattgggagatactgatacttgttttcagatccatagcatggaaaataaaatgagctttatagtacatacaaaacaggctggtctcgtggtaaaactgttaatgaagctaaatggacagttaatgcccactgaaagaaattcatgaaagagaagtaactgttactcaagccaccacattttgtaatgcagagttttttttccgtgaaagatttcttaaaatattacttttggccgagcatggtggctcacccctgtaattccagcactttgggaggctggggcaggcggatcacctgaagtcagagttcaagaccagcctggccaacatggtgaaaccctgtctctacaaaaatacaaaaattagctgggtgtggtggcgggcgcctataatcctagctactagggaggccaaggtgggagatcgcttaaacccaggaggtggaggttgtagtgagccaagattgcaccacggcacgctagcctgggtgacacagcaagactccatctc

SEQ ID NO: 3911 - DNA, 600 bp, Homo sapiens
gaagacaacttgacttcacttttaaaacaagacagtgatctctctttagagcttcacctgcggcaaagaaaaacttacgttcatccaattaggcatccttctttgccagattcatccctaagcactgtaggaatcgtgggtcttcataggcatgtttctgatcctggtcttccagggaaataatcattttgtactatttactccacatacaatgtaagtgcttttaatggctgttttcctttttctatttaaatcctctctacttgactcaggggctcacaaggtaccattatatgcaaaagtactgtatattttcctaaattgaagcttgtaaggtaaaactgagcagttaggatgtaaatatacataagaacttttggttccaaatgttaaaactgccagcatctcacggcaccttattttttatttttattttttaaatcacatgcatgttaggaaactccaatttctcttgcatggagactcctatttactgcttttactaaaccagtacttcgttatgaaaatgccttccacgcaaataagaaaccaagggataaaactgttcatggatgcaactcaaattcagatgatcctcaa

SEQ ID NO: 3912 - DNA, 600 bp, Homo sapiens
cacagaatgttagagctgacaggacccttgaaggtcacttagccttcttaggcaaacgcctgcaaaacagaagcctggagaggggagtgacctgctcagagtcattgcagagccgggatggggaccaggtctcccatctcctactttatgacgccctcttccctcttgatgatgtcttttcaaagcaaatgaagtgccttttcccgaggctggggctgggggtggctgggaggggaagggaagggagaggcaagctggctgtgaactgtcctgttgtggggctggagctgctcccacctccctgacctacccctgctgcaccattcccccagctgggctggaaggttccataactggccagctgcccccataactggcagcattcccagacccagggtactctaataggggcggctcaggcactgagactaccgctcaaccccagggtggttttcaggagtccgaggtagccttcaatcactggactccatggccttcccttcgtgttgaccggaccttccttccagggcttttcctttgggggaggcggagaggggagaagaaggaagggaagggcagaaggaaggagggaagaaaaga

SEQ ID NO: 3913 - DNA, 600 bp, Homo sapiens
cgttggtggcatttacgtgctttatatgatttttacctctgtaacaaacacaagaaataaacagaatggtccttaacagagtttgggggagagagcaagatgggttccttggagaagctgatttgccaagatgcacatcgctattaacagccagagtcataaatgaaatgaaattgaagaattcattcaaatgctcttttccctataacctcttttctcaccaaaaaggagataaatttgaaaacagataaatgtaacaaccagtcaaagaagcaggggaaaagtaagctcctccaaagttgcttgcagtgctggaaatagatctcatttttaggttttctcttcgttccagataccaaataaatgggacagagaataaaatttttgttaaaatatgtgctcatctcctaagtagctcttcagagtctgaccgtaagtaaaaacacacagaattgtgttgactgggggaggtgaatcacaaaaaagttacgaggagtttaagagttaaatattatttgatcgtggctgtcaaatttagtgaacaacatagattggatttggagttggtagtaggtatggttctcataccagaattctctt

SEQ ID NO: 3914 - DNA, 600 bp, Homo sapiens; identical to SEQ ID NO: 3913

SEQ ID NO: 3915 - DNA, 1400 bp, Homo sapiens
gccccagggcagtctggaggcttagagggcagagtggtgtcattccatgtaaagttaggcttctgaggggtcaggcagaatatggtgtccatatcttccatagctctgcagattcttggatgaagtcaagcacagtttgctagacccaggtcactcctctgagtataactaggacccatgagtgaaacttaatagctgtaaggaagaacctgctgtctgccagagaggataagctgcccatctcagcagctgtctaaaagaaggcaggtgtctctttaaagggaagagaagcattggtgaaatggatttcaggtcacttccattccagatgggtgagatcttgtggagctgggatcatgtttgaactcattcatacctgtagagcacgaatccaagtagattgtgtttggtctgtacaggctgaagccccctgctctcccacccaagtgcccccactgagcaggccaacatgctgttgtggccacatatactgggctgatccaggctggttatcaccaaacagcaaaccatagggaacagctgctttgccatagacccaatacccatgtagatctctcatgagagcagccataactcagacccactgaccaacagggccatgagtgacagccagaaccagtgaaggtccaagtaggacacagagcagggcttttcttaccatacacattatctccagaggttatttctaccccactccctattcaaggcctgttggagcacactgcaaaagcaaaagcacagtaactcaatttacacatgattataatcatttccagtgcacacatttcatcaccaggtggatcctgagctagcccatgtaaatccgggttaacccatattggtaatcatactcaaaagcacttttcaccctacattctactagccaatcaaagacaaagagttgtggcctctaccattgccttggcttctggacaccctcacaagctatcccaaggttcccgctcaactccagggaggctgacatcttcacatccactgggcatataatattgcatgagaccaaagtctccacactctttgcagcctcctccatgaatcccaatggcctgcacttgtacagtttgggtgtttgatagataaagcacgtatgagaagagaaaacaaaataaatcaactttttaaaaaagccagcactgtgctgtcaatgttttttttttcttttcaattctagctcagaaaagcagaaggtaaataatgtcaggtcaatgaatatcagatatattttttgactgtacattacagtgaagtgtaatctttttacacctgcaagtccatcttatttattcttgtaaatgttccctgacaatgtttgtaacatggctgtgttaaaaaatctatacaataaagctgtgaccctg

SEQ ID NO: 3916 - DNA, 1400 bp, Homo sapiens
ttattttatttcatcttcacataacacatatttggtatctgatcaattattgggaccaagtgacctttggggatatgtaagtgcccttgtgaaaggatgccgttgtttggagattgactgctgggatggagcacaaaatgaacctgttgtatatcatggctacacactcacaagcaaacttctgtttaaaactgttatccaagctatacacaagtatgcattcatgacatctgactacccagtggtgctctctttagaaaatcactgctccactgcccaacaagaagtaatggcagacaatttgcaggctacttttggagagtccttgctttctgatatgcttgatgattttcctgatactctaccatcaccagaggcactaaaattcaaaatattagttaaaaataagaaaataggaaccttaaaggaaacccatgaaagaaaaggttctgataagcgtggagacaatcaagacaaggaaacaggggtaaaaaagttacctggagtaatgcttttcaagaaaaagaagaccaggaagctaaaaattgctctggccttatctgatcttgtcatttatacgaaagctgagaaattcaaaagctttcaacattcaagattatatcagcaatttaatgaaaataattctattggggagacacaagcccgaaaactttcaaaattgcgagtccatgagtttatttttcacaccaggaagttcattaccagaatatatcccaaagcaacaagagcagactcttctaattttaatccccaagaattttggaatataggttgtcaaatggtggctttaaatttccagacccctggtctgcccatggatctgcaaaatgggaaatttttggataatggtggttctggatatattttgaaaccacatttcttaagagagagtaaatcatactttaacccaagtaacataaaagagggtatgccaattacacttacaataaggctcatcagtggtatccagttgcctcttactcattcatcatctaacaaaggtgattcattagtaattatagaagtttttggtgttccaaatgatcaaatgaagcagcagactcgtgtaattaaaaaaaatgcttttagtccaagatggaatgaaacattcacatttattattcatgtcccagaattggcattgatacgttttgttgttgaaggtcaaggtttaatagcaggaaatgaatttcttgggcaatatactttgccacttctatgcatgaacaaaggttatcgtcgtattcctctgttttccagaatgggtgagagccttgagcctgcttcactgtttgtttatgtttggtacgtcagataacagctaatgataaatgacatatcattagctatgcatcgcaataaaacagccaaaatgaatg

SEQ ID NO: 3917 - DNA, 600 bp, Homo sapiens
acggttgctcagaaacagcagtggtgcggtggaaagggcatcaaccctgcgatccggacaagtcactccatccctctgatcatgcgtgcccacctaccacatgaggatatcacttcatagacttgctggaagggttcattgtgttagcctgttccctgagctctcttcgtgatcaagaagactgatcagataaatcaagagacttgcccaaaattacctaggaaatctgtagcagcagcagaaccaaactccggtccttgctaaatctagataccaggctagcttttctatggacccagaattaacccatacaaatgtacaagcttttccagaccagctggggtgagatgaatgaaaatggcagcaacatcaatacctcagcttcttcagcaacttcatcaagtaaggctgccatgaggaagtgggcctaaaggagagttttctagaacaaagaagggggcaaaggagtggcttgaaactgcaaaaagtgcagacaaaaaaaaaaaaaaaaagaatgaaatctggagaggatgtgaggagaggtctagcaaaatgattaaaaatttggacttagcatcaaagtcaaacagatccatattc

SEQ ID NO: 3918 - DNA, 600 bp, Homo sapiens
cccaagcgcaagatgagaagacgctccagctgcagctcggagcccaacacccccaagagtgccaagtgcgagggggacatcttcacctttgaccgtacaggtacagaagccgaggacgtgcttggggagctagagtatgacaaggtgccatactcctccctgcggcgcaccctggaccagcgccgggccctggtcatgcagctctttcaggaccatggcttcttcccgtcagcccaggccacagccgccttccaggcccgctatgcagacatctttccctccaaggtttgtctgcagttgaagatccgtgaggtgcgccagaagatcatgcaggctgccactcccacggagcagccccctggagctgaggctcctctccctgtaccgccccccactggcaccgctgctgcccctgcccccactcccagccccgcagggggccctgaccccacctcacccagctcggactctggcacggcccaggctgccccgccactgcctccacccccagagtcggggcctggacagcctggctgggagggggctccccagccctcccccccacccccaggtccctccacagctgccacaggcaggtga

SEQ ID NO: 3919 - DNA, 1400 bp, Homo sapiens
ctatgtcaaggtgtacatgtaccagctcttccgcagcttggcctacatccactcccagggcgtgtgtcaccgcgacatcaagccccagaacctgctggtggaccctgacactgctgtcctcaagctctgcgattttggcagtgcaaagcagttggtccgaggggagcccaatgtctcctacatctgttctcgctactaccgggccccagagctcatctttggagccactgattacacctcatccatcgatgtttggtcagctggctgtgtactggcagagctcctcttgggccagcccatcttccctggggacagtggggtggaccagctggtggagatcatcaaggtgctgggaacaccaacccgggaacaaatccgagagatgaaccccaactacacggagttcaagttccctcagattaaagctcacccctggacaaaggtgttcaaatctcgaacgccgccagaggccatcgcgctctgctctagcctgctggagtacaccccatcctcaaggctctccccactagaggcctgtgcgcacagcttctttgatgaactgcgatgtctgggaacccagctgcctaacaaccgcccacttccccctctcttcaacttcagtgctggtgaactctccatccaaccgtctctcaacgccattcttatccctcctcacttgaggtccccagcgggcactaccaccctcaccccgtcctcacaagctttaactgagactccgaccagctcagactggcagtcgaccgatgccacacctaccctcactaactcctcctgagggccccaccaagcacccttccacttccatctgggagccccaagaggggctgggaaggggggccatagcccatcaagctcctgccctggctgggcccctagactagagggcagaggtaaatgagtccctgtccccacctccagtccctccctcaccagcctcacccctgtggtgggctttttaagaggattttaactggttgtggggagggaagagaaggacagggtgttggggggatgaggacctcctacccccttggccccctcccctcccccagacctccacctcctccagaccccctcccctcctgtgtcccttgtaaatagaaccagcccagcccgtctcctcttcccttccctggcccccgggtgtaaatagattgttataatttttttcttaaagaaaacgtcgattcgcaccgtccaacctggccccgcccctcctacagctgtaactcccctcctgtcctctgcccccaaggtctactccctcctcaccccaccctggagggccaggggagtggagagagctcctgatgtcttagtttccacagtaaggtttgcctgtgtacagacctccgttcaataaattattggcatgaaaa

SEQ ID NO: 3920 - DNA, 1400 bp, Homo sapiens; identical to SEQ ID NO: 3919

SEQ ID NO: 3921 - DNA, 600 bp, Homo sapiens
tggtgggaggggggccggtgccccaaggaggaggaccatcgagctaaaggtttgggcatggagaacattggtggcatttttatcgtgctcatctgtggcctcatcattgctgtcttcgtggcggtcatggaattcatatggtccacacggaggtcagctgagtccgaggaggtgtcggtgtgccaggagatgctgcaggagctgcgccacgccgtttcttgccgcaagacgtcgcgttcccgccggcgccgacgcccgggcggcccgagccgggccctgctgtcactgcgcgcggtccgcgagatgcgcctcagcaacggcaagctctactcggccggcgcgggcggggatgcgggcagcgcgcacgggggcccgcagcgcctcctggacgacccggggccccccagcggagcccgacccgccgcccccaccccctgcacccacgtgcgcgtctgccaggagtgccggcgcatccaggcgctgcgggcctcgggggccggcgcgcctccgcgtggcctgggcgtccccgccgaagccaccagcccgccccggccgcggcctggccccgccggcccccgggagctggcggagcacgagtga

SEQ ID NO: 3922 - DNA, 600 bp, Homo sapiens
gcagttccgcgccaaggacagctactctctggctctttccaaactagaaaagagggagcgagagaatggctccaacctggccttcatgttccgcctgccgttcgccgccggccgcgtcttcagcatcagcatgttggacacactgctctaccagtccttcgtgaaggactacatgatcaccatcacccggctgctgctgggcctggacaccacgccgggctcggggtacctctgtgccatgaaaatcaccgagggcgacctgtggatccgcacgtacggccgcctcttccagaagctctgctcctccagcgccgagatccccattggcatctaccggacagagagccacgtcttctccacctcggagccccacgacctcagagcccagtcccagatctcggtgaacgtggaggactgtgaggacacacgggaagtgaaggggccctggggctcccgcgctggcaccggaggcagctcccagggccgccacacgggcggcggtgaccccgcagagcacccactgctacggcgcaagagcctgcagtgggcccggaggctgagccgcaaggcgcccaagcaggcaggccgggcggcggccgc

SEQ ID NO: 3923 - DNA, 600 bp, Homo sapiens; identical to SEQ ID NO: 3922

SEQ ID NO: 3924 - DNA, 1400 bp, Homo sapiens
tccctgaacctcagtttcctcatctgcagaatggggataattatgtcccaggggtatatttagaccctgtttcctttcaggagggtccccagctggtccagggcctgggaaatttctacttatcctcattacccaggtccctcctttggaccctgtaaagggtcagggtgaatcagatgggggactgagcaagtagctatgactgcagatcatgtaaggaagggactgacaagaagctcccagatgctggggagaatgaagagctaaaatagatcctaggtgctggatgctttgtcatccatgcgtgcacatatgggtgctggcagagcccccaaggactctggcctctcgagttctcctatcttctccattctagatgcttcccttgtatccagtgatgtgctggagctggctttgccaagcttgtgagagctggttgctacattttcaggatttttacaagttggtaaacacagccattataaaaaattaaatgatttaaatttataattaagtaaattacattaaaacaaaaaaattatactcaaaattcattacttaattttactacctgttactattatctgtgcttttgaggctatttctacatagtaactcttatggagacctaggggagacaccgcgcatctcttcctgattccccactcaatgacatcatgttagtctttggttgcttaactggctgtggggagtgtttttgtatcacaaagattagagaggactacacatcagggcttgatttattgtttgttgattttctagacttcagaacatgctggataaaatgtcagtaatgcaaattaaactttaaagtatgtcttgtttgtagccaatacatggtgtatagcaccaaaaaatggagggattattcttccagtagttgaacactgtcatccgtttcagctgacagctgctcaaatcatttaagaaggagttctgacattcattttcattgttttacttttgtcttcctcactagtgtaaacaaaaatttcaaccagcattcatgccgaacctatacccattcttcagtgcctagctgtacagttatcagggatttttatttgtagtctaattttgtcaaatcatggccaaatcgcagtgatagttgactttggatacaaggtttggcaaaaaaaaaaatattaacaaaatattctgtaagaatcaattgtctatatggaatttaggataaagaatatttacaataaagaatatttacaataaagagtttattattatttgtaagttgtgtgcaacaaacataccctttatctctgtaaaatttatacacacaaaaattaacaaaagattctgtaagaattaattggctatatggaatttaggatagaatatttacaataaagagtatttacaat

SEQ ID NO: 3925 - DNA, 1400 bp, Homo sapiens
gggctgtatggatccatccacgggcccaccgactaccaagtgaacatccagattattcacaccgatagcaacaccgtcttgggccagaacgacacgggcttcagctgcgacggctcagccagcaccttccgcgtcatgttcaaggagccggtggaggtgctgcccaacgtcaactacacggcctgtgccacgctcaagggcccagactcccactacggcaccaaaggcctgcgcaaggtgacacacgagtcgcccaccacgggcgccaagacctgcttcaccttttgctacgcggccgggaacaacaatggcacatccgtggaggacggccagatccccgaggtcatcttctacacctaggctgcccgacaccgacaccgccctccctccgtggggatagccgcagccccaggccatcatctgctgctggggcccccccaccacgcggtgccaggcccagtgtcccccaggccgtctgtccactccatgccacctttctcagcatcaggacggggttgccctgtgttcaccacgagtgtggctgctggatcagggcagccggggaggtggccaggccagtggccaggccctgtggagacaatccctcaggactagggacagggctgtgccggcctgggccagggcccacggacccgcagctcagggcgcctgcccacgtcgtctgccggcggtgcgccgcgggcgtccctcgcgtctcttcactgcacattgcaatgcatttgcgattcccatttctctgctaggagccagcctgggtggcgctgctcccagagccgtgggtcccagaccttgcgttccttttgttcctgtccgtttatcaggacacgggccccacctgtcacgtgcccgaggccacccaagcccagcctgcggggcgttcccactgcctggatgccggcttgagttctgcgcacgcaggattcagtgtggggacggcccctgccggataggcctagccctggcccaggtggtgagcggtttgcagtgtccgttctcatccacctgatgggcccagataaaggcccccgctgtccagcctccctggacggccctcgcggtccctgcagcccaagatgggactcagaccctgtgccccagagctcccctgccgcagaatggggccccagccggccccgaccgggtccaggagcactgctcgcctgtacatactgttgccctagcccacctggtgccgtgggagccacccccaggtgctgggggcacagcccctccccactccggccacgcccccacccaccccgcgtgtttctgccctgtgactcctggaacctgcgtcctccccaaagccatgggaggggtgtcctcctcagaccatgcccccagatgatttttttaaataaagaaacaaatgcacctgc

SEQ ID NO: 3926 - DNA, 600 bp, Homo sapiens
tctgtgtcctactacaggaaaataattgaaggcactgaagttgtccaggaaattcagaataagcagaaagtaggaccaagtgatgacacccctcgaaggggcccagagtccctgcccgtgggacatcatgacatcatcactgatgtcgccacattccagaccacacagggcttcatcgtaactgcttctagagatgggattgtgaaggtgtggaaataaaacctactgatttgtataaattttaatagttataaatataatactataactcgagaaaaggcatttctagagaacagattcatttgcttaattttcaaaattatgtctccatattactgtttcatgactgactgactaaatgacacccaaaatggttaagatgtacttgactagtttacttatgcatctctttgcaagaatcagccagccaacaatgtctgggatttttattgtatatgttatagaggtgagaaatgtaaaatatgaaaatgaatatgtttattttgtattgaaaaagatggttgaaaagatggttgtaagctattatagtataaacacatttttgctattaaaaatgctattcaaagcagttaaactgta

SEQ ID NO: 3927 - DNA, 600 bp, Homo sapiens; identical to SEQ ID NO: 3926

SEQ ID NO: 3928 - DNA, 1400 bp, Homo sapiens
atttcagttctgaagtgatctaggcatgtttggtaaaaatgtttttgtgagagttctttttttaagaaagcattatgcaaaaagtcacttttaagggcatttaaaaatttttaagtaaagccattctttggcttttttggactatttgtggatactttgtttacattttgaatattaaaatgtgcatcatcttgtcggccatgcagtcctgcaggcatcagtgccctggctgtcctgtgagtcctcatgcagagcagggccatcatggtcagcccttgtgagtaagtgggtatacgctgaagctgacttccgtctgtgtcctgccctcccatccagcactctctatggaaatagttgtcatttcctcagtgatggtgtgtcttatagtgatggttgtaatggtgaatggctagtgtcattttgtttaattttgttttgctttttgatggtggataagatgaaattttagctgtttcagcatcaatccaacttaaaagcatcttggactttgttttcccttccaaactaaaagatcaaggcatgtattagacacaagcatatttgctgcctcaactcctctgacacccatattaggaaaaggcctgccaccaaagcaggaagctgcacactcctaacccttctcccagggtgtggggtcccttgacgtcatgaagagctattgcaaggtgcttctgtacttttccagcctggaaatggagggtgactggccctggctcctgctatgagaagataaccagcctcattttctcagtgccccagaggtctaggataggatttctaaactggaatcatccttaatcaccttgaagatcccttaagaggcatttgactggtgctgccgtctgtgtcctcaaagcaatgctggtggcagcgtcctgtgtacacatgcagagctaatacccaaactaaaaactgggtaactggccctgaagtgcttcccaatcagtaagcccacagggaaatgtttgatttttatgttctgttggattttggtttgcttggcatatctaaaggtgcctttacttttctttttttttttttttctttctgctttgttttgtaggacttgttctaacatggaaaacaagtccagaagactctcctctgactgttacctttgccccaagccaccccaaacttttatgctcatgttttattaaagcaggtgctccctggaatctctgggacatttttgaggcatttgaagcagaatatagagtggtctcatctccttccttaatcttcctggtggttgggatgttccacttgtatcatagatttttttattacagatatgctccactgtttttaaatgtgaacttgtgcgcaaatgtgcagattcaatgttcttgttacagattgaataaatttttattttg

SEQ ID NO: 3929 - DNA, 600 bp, Homo sapiens
tggtagaggagtacaagtttcccgtggacctgctgaccaacaatagccagacacccctgcacctcgtcatccacagggacaacaccaccgtggccctcccctgcatctactacctgctggagaaaggcgcagacctcaatgcgtgagtccagcctgcttcaggagggaggcttcgggcacaggcacgggcacagccctacttccaggcaggcaaatccatgcaggacaagcagaggggttgctggaggtgacaaggattgggtcccacataaagcagtcaggaatccacatggtgtaataaagagactgggctttagccgggcatggtggctcatgcctataatcccaacactttggaaggccgaggcaggcggatcacctgaggtcaggagttcaacaccagcatgaccaacatggagaaaccccatctctactaaaaatacaaaattagcagggcatggtggcgcatgcctgtaatcccagctattcgggaggctgaggcaggagaattgcttgaacccaggagatggaggttgcggtgagctgagatggtgccattgcacttcagcccgggcaacaagagcgagactccgtctcaac

SEQ ID NO: 3930 - DNA, 1400 bp, Homo sapiens
ctctaaccgctgtgtttcgggcgcctctctgccccagggatccaagatcaggtcgcagacgaacctgagagaatcgggggacctgaggtcacaagttgccatctaccttgggatcaaacggaaaccgccccccggctgctccgattcccctggagtgtgaagctgaccagctcgcgccctcctgaggccctgatggcagctctgcgccaggccacagcagccgcccgctgccgctgccgccagccacagccgttcctgctggcctgcctgcacgggggtgcgggcgggcccgagcccctgtcccacttcgaagtggaggtctgccagctgccccggccaggcttgcggggagttctcttccgccgtgtggcgggcaccgccctggccttccgcaccctcgtcacccgcatctccaacgacctcgagctctgagccaccacggtcccagggcccttactcttcctctcccttgtcgccttcacttctacaggaggggaaggggccagggaggggattctccctttatcatcacctcagtttccctgaattatatttgggggcaaagattgtcccctctgctgttctctggggccgctcagcacagaagaaggatgagggggctcagcggggggagctggcaccttcctggagcctccagccagtcctgtcctccctcgccctaccaagagggcacctgaggagactttggggacagggcaggggcagggagggaaactgaggaaatcttccattcctcccaacagctcaaaattaggccttgggcaggggcagggagagctgctgagcctaaagactggagaatctgggggactgggagtgggggtcagagaggcagattccttcccctcccgtcccctcacgctcaaacccccacttcctgccccaggctggcgcggggcactttgtacaaatccttgtaaataccccacaccctcccctctgcaaaggtctcttgaggagctgccgctgtcacctacggtttttaagttattacaccccgaccctcctcctgtcagccccctcacctgcagcctgttgcccaataaatttaagagagtccccccctccccaatgctgaccctaggattttccttccctgccctcacctgcaaatgagttaaagaagaggcgtgggaatccaggcagtggtttttcctttcggagcctcggttttctcatctgcagaatgggagcggtgggggtgggaaggtaaggatggtcgtggaagaaggcaggatggaactcggcctcatccccgaggccccagttcctatatcgggccccccattcatccactcacactcccagccaccatgttacactggactctaagccacttcttactccagtagtaaatttattcaataaacaatcattga

SEQ ID NO: 3931 - DNA, 1400 bp, Homo sapiens
tttcatccacccctgtgaccaagaggagcttcaggacgccctgaccccccagcagaccctgtccaggaggaaggtggaggcccccacggagcggtgcttctccttgcgcatgaagagtacactcaccagccgcgggcgcaccctcaacctcaaggcggccacctggaaggtgctgaactgctctggacatatgagggcctacaagccacctgcgcagacttctccagctgggagccctgactcagagcccccgctgcagtgcctggtgctcatctgcgaagccatcccccacccaggcagcctggagcccccactgggccgaggggccttcctcagccgccacagcctggacatgaagttcacctactgtgacgacaggattgcagaagtggctggctatagtcccgatgacctgatcggctgttccgcctacgagtacatccacgcgctggactccgatgcggtcagcaagagcatccacaccttgctgagcaagggccaggcagtaacagggcagtatcgcttcctggcccggagtggtggctacctgtggacccagacccaggccacagtggtgtcagggggacggggcccccagtcggagagtatcgtctgtgtccattttttaatcagccaggtggaagagaccggagtggtgctgtccctggagcaaacggagcaacactctcgcagacccattcagcggggcgccccctctcagaaggacacccctaaccctggggacagccttgacacccctggcccccggatccttgccttcctgcacccgccttccctgagcgaggctgccctggccgctgacccccgccgtttctgcagccctgacctccgtcgcctcctgggacccatcctggatggggcttcagtagcagccactcccagcaccccgctggccacacggcacccccaaagtcctctttcggctgatctcccagatgaactacctgtgggcaccgagaatgtgcacagactcttcacctccgggaaagacactgaggcagtggagacagatttagatatagctcaggaccccagcaccccactcctgaacctgaatgagcccctgggttttcactttgtcacccagtctggagtgcagtggcacaaacacagctcaccgcagcctcgacctcctgggctcaagtgatcctcctacttcagctcccacaagtagctgggactgcagctatgtgccatcatgcctggctgatgtttatatgttttgtagagacgaggtttcaccatgttgcccaggctggtcttgaactcctgagttcaagcgatccacctgccttggcctcccaaagtgctgggattactggtatgaaccaccacgcccgacagtaaatatgttttgaatgaataaactctcataaatg

SEQ ID NO: 3932 - DNA, 1400 bp, Homo sapiens; identical to SEQ ID NO: 3931

SEQ ID NO: 3933 - DNA, 600 bp, Homo sapiens
aggcagagtccattctggatgccctctccaagcatttggtcatgaagctttcctatggtcctgaagaaaaagatatgattgtgatgagagacagctttggaatcagacatccttctggacatttagaacataaaacgattgatcttgtggcttatggggacatcaatggcttttcagccatggctaaaaccgtggggttacccaccgccatggcagccaaaatgttgcttgatggtgaaattggagccaaaggcctaatggggcccttttcaaaggagatctatggaccaatattggagcgaattaaagcagaaggcattatatatactacacagagtacaattaaaccataattgggaattatattttgtttttttcttcccaggcaatacacctctgaacatgtgtgtgataaatgggtttgctaatgtgctgttttaaagtataaagcataatatgttttggttaacacaatgtactttttgaactataaatctttattttaatatggaaatgtttggaacaggagatgcaagccactaacagagaactttaataattctaccctgtattttataaatacgtatgtgaaagtgatga

SEQ ID NO: 3934 - DNA, 600 bp, Homo sapiens; identical to SEQ ID NO: 3933

SEQ ID NO: 3935 - DNA, 504 bp, Homo sapiens
ttataccagtgactttgagcctgtcaccaatcccaaatttgatgacactttcgagaagaacctcagttctgtccgacaggttaaagaaattattcatcagttcattttggaacagcagaaaggaaacagagtgcctctctgcatcaaccctcagtctgctgcttttaagagctttattagttccactgttgctcagccatctgagatgcccccatctcctctggtgtgggagtgatggtggaagataatgtactactgaagatgtaatgtagctttccactggagtctgggatttgcaattctggaggctcctgagaatcaacccaactgaagcatttcaattcacttgaatgagaaacgtgtttagtatcaaaagagcccaagaagacactggtgtgaaaggtacaatctcagaggttggtcaattaccgtggcacactttctggtcactttgtacaatgtagatttgaagtacagtggtgaaaacattaaatgtgacatttg

SEQ ID NO: 3936 - DNA, 504 bp, Homo sapiens; identical to SEQ ID NO: 3935

SEQ ID NO: 3937 - DNA, 1400 bp, Homo sapiens
cctcccttgtgtttgtgctttgtgcagagttgtttgagtcatttcctgcctgtcgacatggttaaaaacgagagaaacaacaacacagtcacatttgtgaagatgtgaggctggttctgaaatggaggggaaataagcctgatgaacagacctgccataacactaatggaaggtaacagaaggcgaacctccaaacacagagacggaacctgcaagtgaagctgagccagaggaatgttccaaagagccagaagcattcagctctccttaactggaagagagaaaaatctgctcacccagagactggaatgtggcacatgcagatacaaatgtgtgcattgaagatttcgctttgtttcttagcggtacctggataccacagttgctgtatggaactcatgttatgctctaaacgatgcatctcagaatttctaagtaaaggattatttttctactatttattgaactttcaaacattctcaaactttggggaaaaggaaaggaaacacaggagaagttttcagcagttgccccgagctgttttgtgtgtaatgaagtggttctttgattaaggagctctatttcttatttaactgatatcccactgccccactccacaaaataggaaaatgaagaaatctttctctctgacttgtttacatcatttcacggaaacacatctttgtttgtaatgcagtattctttctctgtgtttgacagagatggggaggggcagaggaatttaagaggttttaaaagaaatgttatgtttcttatgacttgtttccactcctcgtacaatgctattcttaggtttctacgaaacctaatgttagaaccgcatcctttcagctaagggagggttggatttattttccttgttttagagactacaaatttttaaatatcccattttgactgagaatattgacatataagggaagaagttttctaaattgtgaaagtctggttcttaattaaagaattttttttttaatatcacggttaaaagctgctgccagttagccaagacattatccaccaaattgctttgtgatttatacagggattaatcaaatctggctactataacatggggcattgtaactttaaagtagtgttttaattacagtgatgtattttagactcacattttgtgattcaaatatgttataaaggcattcttgcaccatggtaaagaatgtgtgtggtaaatctccgtttatatgtagttggaaaaaattcactgaataatgttttaatgatagggtattatgatacaatgtaaaaaacaattggttcttcagcagtacagaaagtaaactatatatgtgctatcaggaaaccccttcatactgtgtataaaattgcaatctagtgaaataaaccgtatgcaatgg

SEQ ID NO: 3938 - DNA, 600 bp, Homo sapiens
cctgtatcagcgacatgattaaacattaccaaaagcaggcagatggcttgtgcagaagattggagaaggcttgtattagtcccaagccacagaagccatgggataaagatgcctgggagatcccccgggagtccatcaagttggtgaaaaggcttggcgctgggcagtttggggaagtctggatgggttactataacaacagtaccaaggtggctgtgaaaaccctgaagccaggaactatgtctgtgcaagccttcctggaagaagccaacctcatgaagaccctgcagcatgacaagctcgtgaggctctacgctgtggtcaccagggaggagcccatttacatcatcaccgagtacatggccaagggcagtttgctggatttcctgaagagcgatgaaggtggcaaagtgctgcttccaaagctcattgacttttctgctcagattgcagagggaatggcatacatcgagcggaagaactacattcaccgggacctgcgagcagctaatgttctggtctccgagtcactcatgtgcaaaattgcagattttggccttgctagagtaattgaagataatgagtacacagcaagggaag

SEQ ID NO: 3939 - DNA, 600 bp, Homo sapiens
cccccagtatccagcgggaactcagggtgagcagctggaggtgccagagagactgctggtggttctggacatggaggagggaactctgggctacgctattgggggcacctacctggggccagcattccgcggactgaagggcaggaccctctatccggcagtaagcgctgtctggggccagtgccaggtccgcatccgctacctgggcgaaaggagagcggagccacactcccttctgcacctgagccgcctgtgtgtgcgccacaacctgggggatacccggctcggccaggtgtctgccctgcccttgccccctgccatgaagcgctacctgctctaccagtgagccctgtgataccacagactgtgctgaggtcttgccaccacccctccccttggggaggtggggaggcactgctggcctagaccagctgctgaaagctggtgaggctgagcccctaccccaacccaagctctgcggaaatcaacagccccagagccacttggagggaggaagaaagggagccggcgttcaaggctatgacagtctgctacgcaaaacattttttcaagtaaaaatagtaagagatgttgttatag

SEQ ID NO: 3940 - DNA, 600 bp, Homo sapiens
tccaaatatcatctgaagaaaaggatcacttctctgtctttgccaatagtttcatcttccgaggccaataaagtgctcacgagagcgcccatcttacaatcaacacctgtcacacccccaccactctcgccagcctttggaggcaccagtaaaatagaccagtattctcgaattctcttcccagttgcatttgcaggattcaaccttgtgtactgggtagtttatctttccaaagatacaatggaagtcagtagcagtgttgaatagcttgcggccaggacaacctgaattctataagttcttgttttctgtttcctatgttttcttaaaaaatagcattgagacttgtgtagatgcttctcagaacatgaaatcaaattggaaatctgtaacgcagcttccgtaagcatgtgtgggcaaaaaagcaataatcctactcctcaaaatagaaagttgaagattgctgaaaaatatgacttttctgtatgttagagaaaaactttatgaggatgaaatgggttcaagatgaatttgtcaacttttgtcttccattgttcagtatttttaattgtcactgtaaataacatttaccacaaggca

SEQ ID NO: 3941 - DNA, 600 bp, Homo sapiens; identical to SEQ ID NO: 3940

SEQ ID NO: 3942 - DNA, 600 bp, Homo sapiens
aacatggatgctgcacctgctcgtgtgggcctaggcatcaccactgtgctcaccatgaccacccagagctccggctctcgagcatctctgcccaaggtgtcctatgtgaaagccattgacatttggatggcagtttgcctgctctttgtgttctcagccctattagaatatgctgccgttaactttgtgtctcggcaacataaggagctgctccgattcaggaggaagcggagacatcacaaggaggatgaagctggagaaggccgctttaacttctctgcctatgggatgggcccagcctgtctacaggccaaggatggcatctcagtcaagggcgccaacaacagtaacaccaccaacccccctcctgcaccatctaagtccccagaggagatgcgaaaactcttcatccagagggccaagaagatcgacaaaatatcccgcattggcttccccatggccttcctcattttcaacatgttctactggatcatctacaagattgtccgtagagaggacgtccacaaccagtgaagggtctgaaaggttgggggaggctgggagaggggaacgtgggaatagcacaggaatctgagagac

SEQ ID NO: 3943 - DNA, 600 bp, Homo sapiens; identical to SEQ ID NO: 3942

SEQ ID NO: 3944 - DNA, 600 bp, Homo sapiens
gctgtgtttctcctgtacttgaccacattgaatttaaggatttatgtacagtaggaacacataactctagctgccccgtttcttgtgaagaaatagaatacccggccactatttcttattcctcttttccaagtcaaaaagctttgaaatatctttccaagaagttgaatcaaagccggaaatacatcagggagaatcttgtaaaaattgaaattaactatagtgacctaaactataagataacccagcagcaaaaggcggtgagtgtgtctgagttacttgcagatcttggtggtcagctgggtctattttgtggggccagtctgatcacgatcatagaaattattgaatatctattcaccaatttctactggatatgcattttctttttgctgaagatatctgaaatgacccagtggactcctccacctcagaatcatctgggaaataaaaataggatagaggagtgttaatggtcacttagaataaaatagtttccttttcatgataccttcagatttatcttgactaattcattgttacgtcacttttctatagttttgagagttcgataaaagccattaaagatatgtatctctt

SEQ ID NO: 3945 - DNA, 600 bp, Homo sapiens; identical to SEQ ID NO: 3944

SEQ ID NO: 3946 - DNA, 1400 bp, Homo sapiens
gcagagtggaggagtcggctctgagagctctgagggagaagctgtttgctcattcttcagatcttctcagtgaatttaagaagcatgatgcagataaagtcggtttaatcaccttgagtgactgggcagcagcggtggagtctgtgttgcacctaggactgccatggcggatgctgaggccacagctggtgaacagctcagcagacaacatgctggagtacaagtcttggctgaagaacttggccaaggaacaactgagtcgcgagaacatacaatcaagtttgctggaaacattgtatcgaaaccgatccaacctagagaccatttttaggatcatagacagtgatcattcagggttcatctcactggacgagttcaggcagacctggaagctgttcagctctcacatgaatatcgacattacagatgactgcatctgtgaccttgctcggagcattgatttcaacaaagatggccacattgatatcaatgagttcctggaggccttccgccttgtggagaaatcctgcccagagggcgatgcctcagaatgcccacaagctacaaatgctaaagacagtggctgcagcagtccaggtgcacactaagaacagcctggtcttcatcacccaaagtgcctcataggcaatgctcagcttctcactagactatctcccttattctccatgtgaaactttatgctgaaaatttacctatccatatgcatcagaatcacctgtgtatttcagtgtggaggggtgggttggggtgttgtgtatgtatgtgttttaagtatatgagtgccccaaccccacctcacaatcttcacaaagtagaacttaggtatagtgttttcaaattctaaagtccacttcagttaagaaccactgacaatgtaactctctcattgttttcattttatacgtttttttgagatggagtttctctcttgttgcccaggctggagtgcattggcgcgatctcggctcaccgcaaagtccgcctcccaggcgattctcctgcctcagcctcctgagtagctgggattacaggcatgcaccaccacaccaggctaattttgtatttttagtagacacagggtttctccatgttggtcaggctggtcttgaactcccaacctcaggtgatccaccctcctcagcctcccaaagtgctgggattacaggcatgagccaccgcacccagcctattttatactttttatttattgtctttaacaatgtctattggtaaaggaaagttatttttaaaaattgtattgtaattccatgacccaagcatatggattttcttcattatttactttttcttacttgttactgtagtgtttatataattttatgttctacttttaaaaaaataaattaatatctaattgt

SEQ ID NO: 3947 - DNA, 600 bp, Homo sapiens
caccgcggtcactgcctaccagaaccatcggatcacgcagctcaagattgccagcaatcccttcgcgaaaggcttccgggactgtgaccctgaggactggccccggaaccaccggcccggcgcactgccgctcatgagcgccttcgcgcgctcgcggaaccccgtggcttccccgacgcagcccagcggcacggagaaagggctggtcacagaaggctctgggctccaacctggcttgctggacgtgctcttgaagcccccaagtaagaagtctgagtccctgagaccaccacactgcaaggacacttgaaggtactcaggtttcagagcccaagtcaggaggtcaagtgtgcatgcaagaggtggcaggggacagatgtgctgctgttcccaggccacctgcacagctggatggtggaagcagttcacttaaaggccatgagttactcgggaggctgaggcaggaggatcacttgagcctattagttggaggctgcagtaagctatgatcatgccactgcactccagcctgggtgacagagtgagacccccactgtccctggtctcttaaaagaaaaaacaaacaaacaaaccaaaaaa

SEQ ID NO: 3948 - DNA, 600 bp, Homo sapiens; identical to SEQ ID NO: 3947

SEQ ID NO: 3949 - DNA, 600 bp, Homo sapiens
ggatcagtgcctggcaccagacacttctggggatggtacagggtgtgacaacatgacctgcatcatcatttgcttcaagccccgaaacacagcagagctccagccagagagtggcaagcgaaaactagaggaggtgctctctactgagggggctgaagaaaatggcaacagcgacaagaagaagaaggccaagcgagactagcagtcatccagacccctgcccacctagactgttttctgagccctccggacctgagactgagttttgtctttttcctttagccttagcagtgggtatgaggtgtgcagggggagctgggtggcttcactccgcccattccaaagagggctctccctccacactgcagccgggagcctctgctgtccttcccagccgcctctgctcctcgggctcatcaccggttctgtgcctgtgctctgttgtgttggagggaaggactggcggttctggtttttactctgtgaactttatttaaggacattcttttttattggcggctccatggccctcggccgcttgcacccgctctctgttgtacactttcaatcaacactttttcagactaaaggccaaaacct

SEQ ID NO: 3950 - DNA, 1400 bp, Homo sapiens
ggtgttttcttagtgtctggatgttcttacgtgaaatctgctccccagccctggtccttggcattttctgcttgaagctgggctgattttcttgtaatttacagcaggacgctttcagcagcagtctcttgggattttatctaagatgtttgaggatgagagggcaagaactataaacactcattaattctagtagtctccccatggccagacaatggcgattgttatttaatgagcttttcctttcaatggaattcagctctcacattagtatgatttcatttgatgtttcaaatagcaaagatgctaggtgcggtggctcccgcctgtaatctcagcactttgaggagggccaaggtgggaggattgcttgagctcaggacttcaagaccagcctgggtaaacatggcgagaccctgtctctaccaaaacaacaaaaaaaagacagactgctttgatcaaccctaaatgcaaaagcagcctatttttctttgtttaaaagtcaaaacataaaaaagcagagtataacatacaaaccattcttaactattcattaaaatgggtccttcaacaccttagtggggtttgttgttgttgcttatgcagagagattattttctttttattattttataatttttgaaatagagatggggtctcactgtgttgcccaggctggtctcgaactcctggacttaagtgagcctcccgcctcagtctcccaaagcgctgggattacaggcaggagccactgagcccagccaagacttcagtgttgactgctttggaggcacaaacccatgcaagcgttagttccaaagttcagtgtgtacccttaaatgaacaatgaagcaggtaaaattacccttgaaaaaaatcccttggaccacccataaatgacagtgactttttcaatatggactcatcatagccagttttccttttgaagttggaactgatcacccttttgtcatctgtaccagatcagtagttggcttgtgttacattttgtgtgtgtgtgtgcgtgttttaaaccagtgcatataaattgtatgttaaatgtaagtaactttaagttgacttatctcttcacagtaatcaagcctcacgtaattcatgctttttaaattcagccagccccccctctctgaaattttattatgtaaataatttgtgttccctgatcactcgtttaagttcttagttgtatgtcatctcttctctagcaggaattggcaaacttttttgtaaaggggtagaaagtgaagattttaggctttgcaggccatatagcctctgctgcaaatgctcagccctgctgttgtaatgtaaaagctgccacagacactacatgaacacgaatgagtgtggctggtgttccaataaaactttatttacac

SEQ ID NO: 3951 - DNA, 1400 bp, Homo sapiens
cactattctaagaagggggatggtctatgccagaggctgaccctgccctgtgtgcgcccggccccgcagaatccctgggcccaggatgaatgggagatcccccggcagtctctcaggctggtcaggaaactcgggtctggacaattcggcgaagtctggatgggttactacaaaaacaacatgaaggtggccattaagacgctgaaggagggaaccatgtctccagaagcctttctgggtgaggccaacgtgatgaaggctctgcagcacgagcggctggtccgactctacgcagtggtcaccaaggagcccatctacattgtcaccgagtacatggccagaggatgcctgctggatttcctgaagacagatgaagggagcagattgtcactcccaaggctgattgacatgtcggcgcagattgctgaagggatggcatacattgagcgcatgaattccatccaccgcgacctgcgggcggccaacatcctggtgtctgaggccttgtgctgcaaaattgctgattttggcttggctcgaatcatcgacagtgaatacacggcccaagagggggccaagttccccatcaagtggacagccccggaagccatccacttcggggtcttcaccatcaaagcagacgtgtggtcgtttggagtcctcctgatggaagttgtcacttatgggcgggtgccatacccagggatgagcaaccccgaggtcatccgcaacctggagcgcggctaccgcatgccgcgccccgacacctgcccgcccgagctgtaccgcggcgtcatcgccgagtgctggcgcagccggcccgaggagcggcccaccttcgagttcctgcagtcggtgctggaggacttctacacggccaccgagcggcagtacgagctgcagccctagccggccgcgcccgcctgcgccccgtgcccacctctgcgcggacgaccccgacttccgtgccatcccagacgggccgcgaaggcggggtgtcgcctgtgcccttttctcagacccggaatccagtgggcagaggcagcttcgcagggggtccccggacggactccttcaccgactgcacccccgggcgagttacgcggcctctctgtgccgcttcatttgtagagggctgtaacagtgacctcgcacggtcatccggagtactaagccccagtaaggtgttcaggactggtaagcgactgtcatcaagtaaggcccccgtgctgggcaccccccgtgctggccgcgtccccgcctctgcgccctgcgtggaccccgccctgccccgctacagaagccagactgggtcccgcggacgccagcaggggcagccccagcctaggctgcgctccagcactgcggggcttttctgcaataaagtcacgagcgttcga

SEQ ID NO: 3952 - DNA, 600 bp, Homo sapiens
cactgtccccttcagcaacggccaagaggatcaacagaacttctttgtcttcgggtgccactgtaagaagcttttccataaactcccggctagccagttctctagggaacttgaatgctgcaacagatgatccagagaacaaaaagacctcctcatcctctaaggcaggcttcacagccagcccgtttaccaacctcttgaatggcagctcccagccaactaccagaaattaccctgagctcaacaataatcagtacaacagaagcagcaacagcaacgggggcaacctgaacagccccccaggcccccacagcgccaagacagaggagcacaccaccatcctccgaccctcctacaccgggctttcttcttcttcagcgagattcctgagccgttctatccctgtaagtgcgcagacaccacctcctggtcctcagaaccctgaatgcaacttctgtgccttgccttcccagccgaggctgccaccaaagaaatttaatagtgccaaggaagccttctgagcgatgccttccctctgtgctgtgaaactgtctatgcactacattctgctagctcctcttcaagtaaacgccaagtcac

SEQ ID NO: 3953 - DNA, 600 bp, Homo sapiens; identical to SEQ ID NO: 3952

SEQ ID NO: 3954 - DNA, 600 bp, Homo sapiens
tcagccataccccattgaaatcgtgccagggaaggtcttcgttggcaatttcagtcaagcctgtgaccccaagattcagaaggacttgaaaatcaaagcccatgtcaatgtctccatggatacagggcccttttttgcaggcgatgctgacaagcttctgcacatccggatagaagattccccggaagcccagattcttcccttcttacgccacatgtgtcacttcattgaaattcaccatcaccttggctctgtcattctgatcttttccacccaaggtatcagccgcagttgtgccgccatcatagcctacctcatgcatagtaacgagcagaccttgcagaggtcctgggcctatgtcaagaagtgcaaaaacaacatgtgtccaaatcggggattggtgagccagctgctggaatgggagaagactatccttggagattccatcacaaacatcatggatccgctctactgatcttctccgaggcccaccgaagggtactgaagagcctcacctgggggcattttgtgggtggagggccagagtgtgtatacccaggcttgtctggaaggagaaggcctttgctgcctgaaagtctc

SEQ ID NO: 3955 - DNA, 1400 bp, Homo sapiens
gagacagatggggagcagggccccacggtctccccagccccagctgatgagccctccagccccctgctgtcccctggctgcacctcctcatcctcagctgccaagctgctatccccacgtcgaacagcaccccggcctcgtctaggtggcagagggaggccaggcagggcaggggctttgaaggctgaggctggcccctctgctcccccacgggccctagaggggctacggctgccccccatgccatggaatgtgcccccagatctgagccccagggtagtagatggcattgaagacggctgtggctcggaccagcccaagttctctttccgcgtgggccagtctggcccggaatgtagcagcagcccctcccctggaccagagagcggcctgctcactgttccccatgggcccagcgaggcaaggaacacagacacactggacaagcttcggcaggcggtgacagagctgtcagagcaggtgctgcagatgcgggaaggactgcagtcacttcgccaggctgtgcagcttgtcctggcgccccacagggagggtccgtgccctcgggcatcgggagaggggccgtgcccagccagcacctccgggcttctgcagcctctgtgtgtggacactggggcatcctcctactgcctgcagcccccagctggctctgtcttgagtgggacttggccccaccctcgtccggggcctcctcccctcatggcaccctggccctggggtcccccagcgtctcagagctccccctggcctcgagccacagctttctggacctccacctcagactcagagccccctgcctcaggagacctctgctctgagcccagcacccctgcctcccctcctccttctgaggaaggggctaggactgggcccgcagagcctgtgagccaggctgaggctaccagcactggagagcccccaccagggtcagggggcctggccttgccctgggacccccacagcctggagatggtgcttattggctgccatggctctggcacagtccagtggacccaggaagaaggcacaggggtctgagtaccagccctagaactcagcgttgccaggtgtgctgccatctgctgttcggcccaacctcagagtgaaggcagggtggcagcctccccacggactccatgcggcccgctggctcagggcagggagcctggaagcaaaggaggacctggctcctgactctcagagaggataggctggatccctggggcaggcctctcctcggcctgctcctctgacctcccggtctccctctgcaggctgggggcagaggcctgaggacaaggaagagctttgccatcccctgcatgtgcccctgcctctacctgtccccaaatttttatattaaaaaaaaaaaataaaat

SEQ ID NO: 3956 - DNA, 1006 bp, Homo sapiens
cttagattgcctccatctcaatgtgaatgcaccaggctgagggttccctagcgccttgagtcaaggccacttttcagcccatcgagccctgagttctacttggtgtttgttctctggagctgattgcacttgagctctgtggtgggcaggcgcactttagcctaagttgggtgccccagggcaccccctcctctctgctccttgccagcttcattcactcccagcctctcgctgtcctcactttgcaggggctcctcctcaacatttgcatgcacctgcaagaattgggaagaaagagcatttattaggcactgtagcaatttgcattttaaaatgcctgagcatttattaagcttcttggtattcacttgggtttgataattgatctgagctacctcattgaatgtttttggaaaggtgttttttggtatgcaagtcagctttgcctcacagttgaaaatgttcggtcatgattgcttttgaaaccaaaggggaaggtaccgatatcattgagctatttaaagttgccagtttgggctccagtaatgctttctggtgggtaaaattccacattcaggccacgagagcatctacagtttgtactctggggctgcaggcatcctgggacgctgtacgcaattcagtggtctagtcctttataccgactcagattccttaagcatgcagagtcactcgaatgaaaaaacatactcgacctctccctaaaaagatgttgcaacccagtttctctgaattccaccacaaaaagagaccctgaataagaagagcagttttcctgtgcatatagagggtgtgtcaaaggtgagctttttggggaccgggaaaaacaaagttgcctgattccgcgcaggtgcacaggccccggatgtacacccggaaaggggagtgtggctgtagaatcatccatccgtctacagctaaaacaatttgccaataaagtacatgtttttcctaagccaaaaataaatacgttaacagaaaaatg

SEQ ID NO: 3957 - DNA, 600 bp, Homo sapiens
catgagagcaggggaaacaaggggcttcgagcacgctccatgccaggaggcatctgttgatttctgaccattatcaagagttgtaggatgcagggctaaattgcaaaataaaataaaatagccagcgtacacaatgagatattctaaacttccattctgttttcttttcacattggctccatcactggtgactgatgaagagcatcctctttattcagtataagccggcagcaagcagttctacctaacgtcccacatccttctcatgccaacacttctgtaattgatcattataaagaaaaaacaaggtaacagtcatagttcacctgtctcttatctattcacttctggtgccacaactgtttatccttttttgaagaaaataagggaacagaaatgcctttttgtattgcaatcgaaatgaaagaagagttgatgttaaaaaaacaaaagtcaagtgatttattatatacagtgggcgttcaagtctagtcgagcaagctcaggagaatgtaattaaataattttatattttttaatttattttgtatctcacctgtcatggatgaattcattcactgaatatgtaatattgaactt

SEQ ID NO: 3958 - DNA, 1400 bp, Homo sapiens
caacatgagcggaagagcgaaccccaggggtcatcagcctgtatcgcttcctttcttagattctcagctgatgaaaatttgggtctggcccatttcaggccatcttcagttgaagaaacaccctcttaggctgtgcaaggcatgggttatcaggggattgaggtcacctgggacttcagggaggctcagcttgctccctgccccagacctgtttcttctaagggaggaggacatggtggagaccagggacaggagagccagcagggtggatgcaaggggcctctacccacacctggacctccgtgccctcaccccagccctaggtgtgcacctaggcctcattccttaccccccagcccctgcccaccttcagcaggatgaggccctgggttgccgtgctctcgctgttcccctctcggggctgggctggggccgctcttggccccaaggttgccccgggccagcagcccagccagcagcacagtctctatggtgctgaggaagagcagcagcagcaggatggtgaagtagtaaactgggggaggcagggcacagggagatgctcaggggccagtccctgtgtctctggtgcccagcgagctgagcaccagtgggtgaccggggagaaacagggcagactgggtaagggagcagggcttactgagcagtgggttgcaggaggaggagctgggcagggcctgcaccagggaggagtggaggacgaggtaactcagcagcaatgtcaccttgtagcctatgcgctcaatggcccggaggggcagcaaccccccgcacacgtcagccaacagcagtgcctctgcaggcaccaagagagcgatgatggacttgagcgccgtgttcttcagcctcagctggaaggggaaaagtcagggccttcccggcgggggggaaggaggtgggcatcgggggcatggggcctggcctctggccgtgcatcctcactcccacccgcctccagcagccctctgtcggcctcctcgcgacttgactcaccgtcacctggaagcagggcaccagctgctggggtgggacttgggtcttcagatcataaactacgtattccctcttgacactcacaatctcgttcaccacgtgggcctggaactctaactccatcgctgaggggtgggaatgagaactatgaaccaggaaggagagatcccagctgccaagtctgggggtagcagactggagcccaggggtgatggagacttttgatggcttttggcagggacagacttggacacaaaaccgatccatagaagggcttcccaaaccttgttttgcaacatcccaaattgtctccagttgaaggaaggcctttatcagattcatagatgagctttcattgtaaaaataaatgtactttgcaccacttc

SEQ ID NO: 3959 - DNA, 1400 bp, Homo sapiens
gattgtgaagctgctgttagatgccgatgtgtgtaatgtggatcaccagaacaaggcaggctacacccccatcatgttggcggccctcgccgctgtggaagcagagaaggacatgcggattgtggaagaactcttcggctgtggggatgtgaatgccaaagctagtcaggcgggacagacggccctcatgctggcggtcagtcacggacggatagacatggtgaagggccttctggcctgtggggctgatgtcaacatccaggatgacgagggctccacggccctcatgtgtgccagcgagcacggacacgtggagattgtcaagctgctgctggcccagcccggctgcaacggtcacctagaggacaacgatggcagcactgcgctctcaatcgccctggaagcaggacacaaggacatcgctgttcttctgtatgcccatgtcaactttgcaaaagcccagtctccgggcacccctaggcttggaaggaagacgtctcctggccccacccaccgaggttcatttgattgattgtatgcaaatagccctttatttacatgccactattaagctgctaattgttcctgttggggtgacagatactgaatgtatacgtattgtgcctgagctcaccagcaaacagaagcatcaagcccaggggtaaaggctgaagctttcacagtgcagagactgctagcctgggcacacacacctcctttctggccgtcttctgtgtagggcacactttaacccagtctctgttgctgttgagtctctgctccgttttgtacagtcacagggaattctgatctgaaggggcaccttctgttcactcccacaaagtggtgtctggttctcactgagacgttttaagatttttccacaaatatttatatgtactaaatgtggaaccattagaaagttcttccaaaatctcattccagcatagttttggatttttcttttgtcttattttaaaataaggaagtcgagatgactttgatcattggtaacttgggcctgggccagacaaagtataaaacttacaaaagaatattctcatttggtcttaactaggtagatgtaatatatgactttttataaaaagggtatctatatgaacttgacacagtattttcagcttttgtattccatactaaagccatgaagaactacacgtaacatcatcatttgtattaattgcacaactccaatgctaaaggttggattgtgttagaggaatcggctctgtatttgcctctagagaaacacagtgttctctttgtatttatggattcctttttaccgtgtcacatttactttggtcctctatgtatttaaatgtttgaagtgccttagactcttgccatattttcaaaataaaattccattaagctct

SEQ ID NO: 3960 - DNA, 600 bp, Homo sapiens
ggcgtaagcttaaggcagcggtgaaggctgtggtggcctcttcgcgcctgggaagtgccagcagcagccatggcagcatccaggagagccacaaggctagccgagacccttctccaatccaagatggcaacgaggacatgaaagctattccagaaggagagaaaattcaaggcgatggggcccaagccgcagttaagggggcacaggctgagctgatgaaggtgcaagccttagagaaagttaaaggtgcagatataaatgctgaagaggcccccaaaatggtgcccaaggcagtggaggatgggataaaggtggctgacctggaactagaggagggcctagcagaggagaagctgaagactgtggaggaggcagcagctcccagagaagggcaaggaagctctgctgtgggttttgaagttccacagcaagatgtgatcctgccagagtactaaacagcttccttcagatctggaagccaaacaccggcattttatgtactttgtccttcagcaagaaaggtgtggaagcatgatatgtactatagtgattctgtttttgaggtgcaaaaaacatacatatataccagttggtaattct

SEQ ID NO: 3961 - DNA, 1400 bp, Homo sapiens
tacttataatttaaaggattggtgtcttagtacacttgtggtcacagggatcaacgaatagtaaataatgaactcgtgcaagacaaaactgaaaccctctttccaggacctcagtaggcaccgttgaggtgtcctttgtttttgtgtgtgtgtgttcttttttaattttcgcattgttgacagatacaaacagttatactcaatgtactgtaataatcgcaaaggaaaaagttttgggataacttatttgtatgttggtagctgagaaaaatatcatcagtctagaattgatatttgagtatagtagagctttggggctttgaaggcaggttcaagaaagcatatgtcgatggttgagatatttattttccatatggttcatgttcaaatgttcacaaccacaatgcatctgactgcaataatgtgctaataatttatgtcagtagtcaccttgctcacagcaaagccagaaatgctctctccagggagtagatgtaaagtacttgtacatagaattcagaactgaagatatttattaaaagttgattttttttcttgatagtatttttatgtactaaatatttacactaatatcaattacatattttggtaaactagagagacataattagagatgcatgctttgttctgtgcatagagacctttaagcaaactactacagccaactcaaaagctaaaactgaacaaatttgatgttatgcaaacatcttgcatttttagtagttgatattaagttgatgacttgtttcccttcaaggaaacattaaattgtatggactcagctagctgttcaatgaaattgtgaattagaaacatttttaaaagtttttgaaagagataagtgcatcatgaattacatgtacatgagaggagatagtgatatcagcataatgattttgaggtcagtacctgagctgtctaaaaatatattatacaaactaaaatgtagatgaattaacctctcaaagcacagaatgtgcaagaacttttgcattttaatcgttgtaaactaacagcttaaactattgactctatacctctaaagaattgctgctactttgtgcaagaactttgaaggtcaaattaggcaaattccagatagtaaaacaatccctaagccttaagtcttttttttttcctaaaaattcccatagaataaaattctctctagtttacttgtgtgtgcatacatctcatccacaggggaagataaagatggtcacacaaacagtttccataaagatgtacatattcattatacttctgacctttgggctttcttttctactaagctaaaaattcctttttatcaaagtgtacactactgatgctgtttgttgtactgagagcacgtaccaataaaaatgttaacaaaatat

SEQ ID NO: 3962 - DNA, 109 bp, Homo sapiens
atgaagaaactccaagggtttgagtaaatacaaagactgaagaaatttcacagcagtttattaatgtatataaacttataaatatttctccagcaaatttgaggaagca

SEQ ID NO: 3963 - DNA, 1400 bp, Homo sapiens
gacccaggtgcggggctggctacggaagctcagtgctgtagtccaactgtcccttgtgggcactgcgaccgtggccttgttcctgattagcctggtgccgtactcctacgtggagcccgggacccacgggcgcctctggaccggggcccaccgcctgtttggtgccgtggagcacctacagctggccaactcctacggcctcttccgccgcatgactgggcttggtggacggcctgaggtggtgctggagggcagttacgacggccaccactggacggagatcgagttcatgtacaagcctgggaacctgagccggccgcccccggttgtggtgccccaccagccacgcctggactggcagatgtggtttgcagccctgggcccacacacgcacagcccgtggttcacaagcctggtcttgcgcctgctgcagggcaaggagccagtgatccgccttgtccagagccaagtggccaggtatcccttccacaagcagccgcccacctacgtccgagcccagcgctacaagtactggttctcccagcctggggagcagggccagtggtggcggcgccagtgggtggaggagttcttcccatccgtgtccctgggggaccccacgctggagacgctgctcaggcagtttggactacaggagaaaagcccacctcgcacccgcagcgccaacagcaccctggcccaggccctccactggactcgctctcagctgtctcccctggaggcccccgccctgctctgggggctcctcatggccgtgggggctgtcagatttgtgcaagccctgctagcaccctgttctctccggtcctccccgctggcaccagtcagcggggagaagcgcaggccagcctcccagaaagactccggagctgcctccgaacaggccaccgcagcccccaacccctgctccagtagttcgaggaccacccggcgaaagaagtagctgtgttctcccagctgcacgtcctgagagggccaggtcgccgggagtgctctggcctccggcaggacaggacccagccactgtgccttagctgaccctgcagggccaggcacaggttggggggctgcccctggggtttgcagggtgctgcattgagggctccaggccccacccccacgccagccatgcccctccccaggactcccactattgcctctgtgattggcccaggaggaaaacacgaccaagctcaagacccttcccctgccctgggctgtgggggtctgagtctagagcccccaaccctaggccccgtgccagaggggaagaggctgactcccaggggaagaggggaagcactgtcatcttccacgtcatcttcacaccagcccatcctgccctttagatctgggcaccaataaaggcgtcttttgtg

SEQ ID NO: 3964 - DNA, 1400 bp, Homo sapiens
cactggtcccactgcagctgcccagtcttccatctccggcccctcactgccactgccaccccacaacggggcaggggacgctccagctggtctggggttggccagggccctagtggcccgccctggggccccagctcggcccctcgcctcgctgagctctagtgtgccccaccgacccttcaggtgctgctcgtggtgggaggggcggcaggccgcgggtcctgctgtgcacccgcgggaccagccggcctgggagaccatcggccgggggggatgagggcagggccctgccgctccaccgcagccatcttcctcacagggtctctccccaaggagggggctagcttggtccccatgctcttgggcaactacagcagagaagcctccctgccttggaccccaaagtctcctgtcctgccctttatgtgtgtgggtgaaactgggtgcgtctgagcacgtgggagccgtgtgtgtgcctgattactgagtggccaccaggggccgctctggactagcgcggggccgtggaggcgtgcaccgtgtgcatgcgtggggtgtacctgtgagagcaccctgtctcctcttccaaagaaagtcagaggccatcctgcaccctgggtccagctgtttgcccagcctgtccttccagagcctcacccagcctgagcggggttccctggtgaatccctgctgcttggggaggccccaagggccccttggaggcagcgcccccaccttgggcttctgagggcatcatagggggacccctagagtcagttcaccacaggccctggggagagtcaaagacccccgagggtgcccagccccccacactgtgactcctcacactcagcgatgacctgtggggtggggggccctgggacgtttttaaacctagggtttggagtctggactaagctccatccacgtcactcacaagtttctgtttatatttctagctttttttaataaaataaaaaaaaaaagaaaacagaagttttcacaacccaggggcctggcacgccggtctgtgcctgcccgccccgccctggcccaccggccccactccctgggcacagagtcacacccactcatccttccgccaacagtccaggtcacacagcagcagtcactgtaacagactgccacatacacactcggtctcacactcacctgtgggttttggttccgttcaatttgggtttttaactttacagggtcagttccgcttcacctccttttgtatggagttccatccggggggtttcaccccctgctccagtcctgaggcctcctgaccctgacgttgtgatacgccccacagagatctatgtttcttatattattattattgataataattattataatattattatgtaataaatttataagaaatg

SEQ ID NO: 3965 - DNA, 746 bp, Homo sapiens
ccaagctccagctgtttgtcaaggcgagtgaggacggggagagcgtgggtcactgcccctcctgccagcggctcttcatggtcctgctcctcaagggcgtacctttcaccctcaccacggtggacacgcgcaggtccccggacgtgctgaaggacttcgcccccggctcgcagctgcccatcctgctctatgacagcgacgccaagacagacacgctgcagatcgaggactttctggaggagacgctggggccgcccgacttccccagcctggcgcctcgttacagggagtccaacaccgccggcaacgacgttttccacaagttctccgcgttcatcaagaacccggtgcccgcgcaggacgaagccctgtaccagcagctgctgcgcgccctcgccaggctggacagctacctgcgcgcgcccctggagcacgagctggcgggggagccgcagctgcgcgagtcccgccgccgcttcctggacggcgacaggctcacgctggccgactgcagcctcctgcccaagctgcacatcgtcgacacggtgtgcgcgcacttccgccaggcgcccatccccgcggagctgcgcggcgtacgccgctacctggacagcgcgatgcaggagaaagagttcaaatacacgtgtccgcacagcgccgagatcctggcggcctaccggcccgccgtgcacccccgctagcgccccaccccgcgtctgtcgcccaataaaggcatctttgtcggg

SEQ ID NO: 3966 - DNA, 1400 bp, Homo sapiens
ctaatttattactttttataagcgatagccgtactgagccgccccctgaaggcggctgccaggtcttgccccaggcacctgggactctgtttgcaggccctgccctctgggctgagaaggatgcactttggacaagtcatctgtgtttgtgttttccagtttttctgtactttttaagtgttttgtgttacctggtctcattcccctccccacacctacccatttgaggggatggagttgaagtcacctggtcacctgtaccggcccagttcggctacaacctggagtgtccgtaaacaattcctctcacccacaaaacaatgtaatcccagcgatggactggattctgaaggccacttcccaccatcatagctgccatgcccaggcagtgcctgctctatatatagagtctgcctccaatcctgctggcttcagcctggagaagggatatgggagctggagctttgatggatgaataggtgttcaccggatctgggcagaggggtcatccgctccccaggtgggcactgataaaggaaggtacaggcctcacctggaactgccaaggcagcctccagaaatgctcggctgtctcggggcacgctccagtatgccagtcctgcgggattacgtccagctacttccagaaacactcagtgtcccctcccctcaggctctgccttggcctggccttgtccagtctaccctggacaagatgccgtgtgtttgaggcccagcagagtaagcccttggccgtgatgtgtctgaaacacctgttaggggttccctccatatgtcagagcctctctgggatgaagttcaagccagaaaacccagtcgaggctcaagtttgaatttcagcttcactgtgtggctctgggaaaatggctttcccactctgtgcctcagtttccttgtgtttacaagactaatcccattgactgtttattaagcacctactgtgtgccaagcgcttttacgtggcttctccctcagccagccttgagaaggctggaggtggtgtcatcacctccattttacagacaaagcagctgagaccccagcgaggggcggagacctgtcccacgatcacccagcaggagtcgtggcagaacggagcatcagccagaccctgttgtgggcgttgtcatcaagggagcttgaatggagggtctggtgtcagatacagccgactccagccccagctcatcccccatgatgctgtgtgacccactgggcactctggtgagggagctttccagacatcaacagcccactctgcttccctttctgagtcccctgtccagcactgcctagtgttggagggtagaccaaggctgtgcatgattcaccccctccttccatcctggagctggcagtgaataaaagcccgtatttac

SEQ ID NO: 3967 - DNA, 1400 bp, Homo sapiens
gtgattgatcgtatttttctgtgggttttcaccctggtgtgcattctagggacagcaggattgtttctgcaacccctgatggccagggaagatgcataagcactaagctgtgtgcctgcctgggagacttccttgtgtcagggcaggaggaggctgcttcctagtaagaacgtactttctgttatcaagctaccagctttgtttttggcatttcgaggtttacttattttccacttatcttggaatcatgcaaaaaaaaaatgtcaagagtatttattaccgataaatgaacatttaactagcctttttggtatggtaaagagatgtcaaaatgtgattctatgtgattagtatgctatgctatggaatatacatgtaaaaatgtttccttttagttgttgaaacaaaactggatagaaaaatgctgttcagaaatatgaaaagtcattcagttatcactacagatctcccagtaatttttcttatttagcccataatctctttgaaggtttatactaattcagcaatcccccatcgttacccatttcttaccatgcatttctcgttctttactgggtctaaagggctatgcctccatttcagagagcttcaactacttctcttgcatacttctaaattatactatgagaaatcatgcctagttattcattgttaatataactgtcttagtacaccataaactgggtggattataaacaacagaaacttctcagttttggaggttgggaggtccaaggtcaaggcaccagcaaatttggtgtctggtgagggtcctcttcctcaaagggggggtgccttctagctgtgtcctcacatgactgaagggactagctatctctgtggggtctattttataagggcactaaccccattcatgagagcagagcccccatggcctaatcacctttccaaggccccaccttctatctaagacaatcacgctgggaataggtttcaacatatgaattgggggaggacacatttggaccacagcatgaacctttagaacagggtttctcagccttagcactacggacattttgggctggataaatatgtgttggtacagaatgggggtatcctgtgcattgtaggatctttagcagtaccctagcctcaactcactagatgccaatgacataccttgcttcttcaccagttatgataaccaagaatgtctccattgttaaatgtccccttaggagcaaaattgcccctggttgagaaacattgctttagacaaattgttaagagtatcatgtactacacttctgaaacttaacgtgatcatcaccactgacagatgattcacagagagagactgtttgaatcttgtctcactagtttttcctgtgcaaaaataaaatggacagaattgc

SEQ ID NO: 3968 - DNA, 600 bp, Homo sapiens
cctgtcttccttccctgcaccgggcaatggggataaagatgacttcgtagcagcacctactatgcttcaggcatggtgccggcctgcctctccatcaccatctctctccacttccccttgtccagttcctcacacacttctagattcttcccagctcagaggcttggcatttgccatatcatcatctttttttttttcttttaaacggagtcttgctatatcgcccaggctcaagtgattctcctgcctcaacctcccaagtagctgggattacagaaagccgccaccgtgcccagctaatttttgtatttttgttggccaggctgatttcgaactcctgacctcaaatgacccacctgcctcggcctcccaaagtgctaggattacaagtgtgagccactatgcctggccttccctatcttctacctgaaccttcttcctcttcccccagggcttcccaagctctttccacagccacatcagtcagggcatggctccaatccattctttgctccaatgtcacctcctctgagaggccttccctaaccacccaatcattctaaagcagcctccctacagtcacgttaccctgcctccttc

SEQ ID NO: 3969 - DNA, 600 bp, Homo sapiens; identical to SEQ ID NO: 3968

SEQ ID NO: 3970 - DNA, 600 bp, Homo sapiens
ggagaggactattcacacaggaggtattcttggaatgtgaagcccaatgccagtcgggcagcccaggatagaagaaggtggtatccttataattactccagactctcctatccagcctgttgggaatggacccagtgatacaaacctgtcctggaattctacctggagaccagagctggcctgaaaattactggtgtgacttttaattagttcaggtctaatcaggtttctttattgttcccttatgtattcaagcttaaggaaaaattgcattgctgtttacctctttgctgataaatttgcagtaattacagcattgcaggaaaaacaatctgttattccagtcttaaatttttctaaaagaagacaatattttagaactgaagcattgagaacttcccttgcaaattatttttaaaattctatcttgtttttctatgtatttctttctgactagacttgtgatatgcgtgtgtttatgtacagaaatttttagtgtttttgttatgttctgttattgacccaaaggccatctttattttctataactgttcaaaatttatattaaaatctacttaggagataatttctttagaacct

SEQ ID NO: 3971 - DNA, 600 bp, Homo sapiens
ccatcctggcccatcagtgtaccccctggccagccccacagcccacgtcctgtcagtgccgccgcctcgcccaccgcatgccccctcgtgccagtcgcgctgcctgtgtggtgtcgcgccttctcccccccggggctgggttggcgcaccctcccctcccgtctactcattccccggggcgtttctttgccgatttttgaatgtgattttaaagagtgaaaaatgagactatgcgtttttataaaaaatggtgcctgattcggctgtctcagactctttttgtacctggtgaccccttttcagcttctgctgggctggggcctgatggggagggtctcggtggtaccaggtctcctccaccgccatggcttccaaggtggtctgctcgggcccaggccatcttccaggtggggtgaggcagtgggtcccacttcccctcctacccctcccagctgacagtcctctccacctagtggctgtccagtgcccattcctcaccttttcccggggaggagagagcagcttctgccacttcccaggtaagcaggaggaggtgccaacagtgttaggcctggcacagtgtctgggctgactgggacc

SEQ ID NO: 3972 - DNA, 600 bp, Homo sapiens; identical to SEQ ID NO: 3971

SEQ ID NO: 3973 - DNA, 1400 bp, Homo sapiens
ccatgaccggcaggtggtgcatgtggagacactggggctcactctgcaggagcccgaaacactgctggccgccatgcggcccagcgaggagcatgtggccagtcgcctcacctctcctatcgtctccacccacctggacactcgtaatgtggcctttgagaggaacaaatgtggtatctggggctggcggtctgagaagatggaaactgttagcggctacgaggccaaggtgtacagtgccaccaacgtggagctggtgacacgcacacgcacggagcacctctctgatcaggacaagtcgaggagcaaagcggggaagactccattccagtccttcctggggatggcgcagcagcattcctcccacaccggggcccccgtgcagcaggcagccagccccaccaaccccacagccatctcccctgaggagtacttcgaccccaacttcagcctggagtcacggaacattggccgccccatcgagatgtccagcaaagtacagaggttcaaggcaacactgtggctgagtgaagagcacccgctctccctgggtgaccaggtgacccccatcatcgacctaatggccatcagcaacgctcactttgccaagctgcgcgacttcatcactctgcgccttccacctggcttccccgtcaaaattgagattccccttttccacgtgctcaatgcccgcatcaccttcagcaacctgtgtggctgtgatgagcccctgagctccgtgtgggtgccggcccccagctctgctgttgccgcatcagggaaccctttcccgtgcgaggtggaccccaccgtgtttgaagtgcccaacgggtacagcgtgctgggcatggagcgcaacgagcccctccgggacgaggacgatgacctcctgcagttcgccatccagcagagcctgcttgaagcgggcactgaggcggagcaggtgaccgtctgggaagccctgaccaacacccggcccggtgcccgccctcctccccaggccacggtttatgaggaacagcttcagctggagcgggccctccaggaaagcctgcagctgtccacagagcccaggggcccaggatcccctcccaggacacccccagcccccggtccacccagctttgaagagcagctgcgcctggccctggagttgtcttcacgggagcaggaggagcgggagcggcgcgggcagcaggaggaggaggacttacagcggatcctgcagctgtcactcactgagcactgagccatagccccgggagggctggccaggccactccctgcccgcttttgtaatttatttatttataaactctctgctgctgagcttggggcctggagccccaggaatgagcaggcaggggagactgagatggaaataaagagactgtcgcagc

SEQ ID NO: 3974 - DNA, 1400 bp, Homo sapiens
gtaacgaatgaatctgtatcatttttcctacctgagtggcccaaagccagcaccaaaccctgggagtccctgaagcctaacagaacaggtagaacttgcaaaaggaatttggctgagagctcacttctaatcctgtactcactgtgtctttgtagatagaaacaagctagctttaccaaagagaaatagtgtcatagaagaacaaaacttcatatagaaagttctaggcaagtatttgatggtttccttaaggatgtgagctttgtatttccacctagccttgtaaaatgttcctgtggtattttgtgtcacacatcctacctttgatgagtctcacatcccaccttcctataaacagctaaattaattttgtttcatcttccccagaccaaaatgtttgataatcttatcaacattgtgggaggtcttgtgcaatggaaattttgccatttctccaaaactggtggcataaaggctgatgcttggggagaaccccattgctcgggacaggcaactctgttcaatgggatcttctttggtttgatgttcccattgttttctcagttctgggaagcctagtacattagtactaatgtaatcactgaaaccttttcttgaaataagggaagcagccaaactttgattaaagttgcaagttctggggacttgcgggggttgtcataaactgtaacagtgggttttggttcagcatgtaaatgcaactttgattttcttgaggaccgattgacctgtcatgtccctgtatcctcatgctcatcatctcagcaggcctgagaggctgggtcagtttgggtgttcatcatgaggattgcttctgccatggagctgatggacatgggcaggttgctgagaaggtggggtgaaagtgagtgccgggggtgggtgagtgccctggtcttgttcataggggagcctttccctagcagtggaacgctgtggtcattttctctagcatattcccttgggaagtctagatttgctattaatctggctgagaatctaagttctgtgccttagagacagtttgcactttcccatattgtgcctgggacagccatatgattttttttcccaccaaacaagtatgcaaacagaaaccagttcaaagggggatggagtaaaagatgaggcagtagaaatgcctttgaatggttttctgtagctaattctctttaaattttgtcctgctttttttctttatgcagtgctaggtgttttaagttttctagtagtattgcttttgagttacagtataacctgagttactcctctgctctaacattgttgcagaagaactagtttattgttagccaggttgcttgaaaggttgagagtggagtggtttggcatttctgttttaaataaacatttaagctctt

SEQ ID NO: 3975 - DNA, 1400 bp, Homo sapiens
tttggggtggccacagttctctgtgacctgctgctgcttcacatcctgcctaagaggcactactacaagcagaagaagttcaaatacgctgaggacatggggccaggggcggctgagcgtgacctcgcagctaccagctccaccctgggcctgcaggagaacatgaggacatcctgatgctcgggccccaactcctgactgggtgcagcgtgaggcttcagcctggagccctggtgggtcccagccagggcagaggggcctccccaggaagtctcctaccctctcagccaggcagagagcagtttgccagaagctcagggtgcatagtaggagagacctgtgcaaatctgagctccggctccgaccccacacaccctgagggagccctaccctagcctcagccgctcctggtggggaatggctggggctgggcaggaccctcccacacacctgcaccctagcttcgtgcttctctctccggactctcattatccaacccgctgcctccatttctctagatctgtgctctccgatgtggcagtcagtaaccataggtgactaaattaaactaaaataaaatagaatgaaacacaaaattcaattcctcggctgaactagccacatttcaactgctcagtagatacgtgtggttagtggctgccatactggacagctcggggcattttcactgtcaaagaaagttctattagacagccctgcttgagccctgtttcttcctggccttcggtttccctggggaacttatcgacaatgcaagctcctgggcccacccccagacctcctgaaccaaaagctccagggctggccgtatgatctgtgtggatggcaaactccccaggccattctgggacctaagtttaagaagtgccgtcctcgaactttctgactctaagctcctgagcgggagtcagacttagccctgagcctgcacttcctgttcaggtgcagacactgaacagggtctcaaacaccttcagcatgtgtgttgtgtgctcacgtgccacacagtgtctcatgcacacaacccagtgtacacaccacctacgtgcacacagcatccttccacactgtgtatgtgaacagcttgggccctgcaaacacaaccatctacacacatctacacccccaagcacacacacatggtccgtgccatgtcacctccatagggaaaggcttctctccaagtgtgccaggccaggacagccctcccagccatgaatccttactcagctacctcgggttggggtgggagccccagccaaatcctgggctccctgcctgtggctcagccccagctcccaaggcctgcctggctctgtctgaacagaaggtctgggggaagcgacgggtggagtacaataaagggaatgaggacaaac

SEQ ID NO: 3976 - DNA, 1400 bp, Homo sapiens; identical to SEQ ID NO: 3975

SEQ ID NO: 3977 - DNA, 600 bp, Homo sapiens
cctgattctggagaacttccttcacaagtgggacccccgcagccacctgcagccccttgctgggaccccagaggccacctaccagatgactgtggagctcctgttcagggatattctggaggagcccggggaggatgagctcacagagaggctgagccagcacccgcacctgtggctgtgcaggtgacgtccgggctgccgtcccagcaggggcggcaggagagagaggctggcctacacaggtgcccgtcatggaagaggcggccatgctgtggccagccaggcaggaagagacctttcctctgacggaccactaagctggggacaggaaccaagtcctttgcgtgtggcccaacaaccatctacagaacagctgctggtgcttcagggaggcgccgtgccctccgctttcttttatagctgcttcagtgagaattccctcgtcgactccacagggacctttcagacaaaaatgcaagaagcagcggcctcccctgtcccctgcagcttccgtggtgcctttgctgccggcagcccttggggaccacaggcctgaccagggcctgcacaggttaaccgtcagacttccggggcattcag

SEQ ID NO: 3978 - DNA, 600 bp, Homo sapiens; identical to SEQ ID NO: 3977

SEQ ID NO: 3979 - DNA, 1400 bp, Homo sapiens
atacattttgtggtttctctgatggttctgggcagtcagttcaaaaccttctggaaaggattcaccattctagatgccatcaagagcattcaattcacgggaggaggtcaaaatatcaacattaattggaatttggaagaaatagattccaatcctcatggaggacttggagggtttcaagacttcagaggaggaaggaactgtagatgggctgaaaatagcaagagaactagaagtggaggggcctagagatgtgaccgaattgctgtaacctcaggatcaaacttgtatggatgagaagttccttctcatggacgagcaaagaaggtgatttcttgaaatggaatctactcctggtgaagatgctatgaacattgttgaaatgacaaaagatttagaatattccataaacttagctgtggccagggtttgagaggattgactcctaattttgaagttctactgtgggtaaatgctgtcaaacagcattgcatgccacagaggaatctctcatgaaagagttaataaatgcagcaaacttcactgttgtcttactttaagaaactgccacagtcactgcaggcttcagcaacttatcttttcctaccctcctctcgcatttaaaagtacttttaaattaatgtatgtacattatttttaggcataacactgctgctcatttaaaaaaactacagtatgaaccatgttatatgcagtggaaaggcaaaaaattcatgtgacttacttgcttgtatttggtttattgcagtggtctggaactgaaagtgatgcgtatttctgagttatgcctgtatttaagaagctgagtgaaacccaaagaagtccatgataggacagacttctgaaaactaaagacagaaaaaagcttgaaagcatcaagaaagaagtgaaatcttagctagagggaaaagtaactcagatgacagtggatttctctctggaaaccatggaggccagaaggaagtgagacaagttcttttagtgccagaagaactatcaacttgtggctgggcacggtggctcacacctgtaatcccagcactttgggagaccaaggtgggcagatcacttgaagtcaggagtttgagaccagcctggccaacatggcaaaaccctgtctctactaaaaatacaaaaattagccaggcatggtggcacatgcctgtaatctcagctacttgggaggctgaggcacgagaattacttgaacccgggaggtggaggttgcagtgagccaagatcctgccactgcactccagcctgggcaacagagcaagactgcctcaaaacaaaactctgtcaactccaaattcctatttggtgaaatgatccttcaggattgatggggtaataaaaacattctcggttgatagaaaact

SEQ ID NO: 3980 - DNA, 1400 bp, Homo sapiens
aacaaaagtccagtttgtgtctcttaatcgctcacttcaactcatttcttctaaataaactatttaatatcctggtcaggaaatgacatgttaatgctttgctccctgaagggggaaaaaatctgtcctttaacaagctattctgttttgtgtcaattggttcgtggcaggaagctattagaagtcaaacgtccagatgcattactgctatcttagtttaaagggggaaagaaaagggaagaagaaaggaaaagagaaatccaactcctttttcatgttttgcttttgaacaatgagggtttgtgtgacaggcattcctctttgctgagatgatagcaatggcctgagattttagcaagctcctggagtctgatgcttttgcagtactctgatcgcaactaaacatttgtctttgttttattagaaactagtgaaacaaagcaggttgtcccacatgtataaaatacagggcagctatttagttttctttacagagaatgatccttttaaggcttgtaaggccctctggtttggacaaaaaccctcagtagagacaagcgggaaggataattagctgaaagctatgatgatataaataaaaacagctctctatcccaatacgcacctttgtattttcaagaactcttctatttattaaggaaaatgtcacattgtgatgtattaagccagtacttcaattacgggttgacttgggatgacatattacatgctgtagttaacatttataattctttttccttgtttgagtatttctgtctctgaaataaccttttacttggcttttctagatagctttatttgatttcgagtggcaaaatgttttttattacggcttttctattgctgtatgatacagaactcttttggcataaatatttgtgttcccagtacctcacttgttcggatttgactgcctgtatatgttttgtgaaatggtcctgtttttgggtaggtgacacgtggactctagtatgtaaatgttacttgaatctgtgcttcataatagtgtgtggcatgtatgtgcagactcttggatgctttatgcctgcgcagcaggagccctgtcctcacgttcccaggagggcggcttcacccttcgtaaccaggagacaaggcggccatggatttgcccttgattctattttgctaatggaagatagaaaggagagaaggttttttttttttttaacattctgaagatggtgctgtgtcaagaaggaccttttttttcccctctcccctattttttaagtaccttggaggaggagaggttggtgacatgcatggtggggatctatggcctctggtgctttgtcctgtatttggtttaatgtttttgtcctaatctcttcaatcaataaaattgtgcgtatttaact

SEQ ID NO: 3981 - DNA, 1400 bp, Homo sapiens
cttgtttaggccctagggttgagcaattttaaggttgagactccaagtctcctaaaattctaggagagaaataaagagtctgtttttgctcaaaccatcaggatggaaacagtcaggcactgactggggtgcttccaagaggcatgagagtgcctactctggcttgagcacttctatatgcaaggtgaatatgtactgagctaggagacttccctgcaaaatctctgttcaccctgggttcacatccccatgaggtaatattattattcccattttacaaataatgtaactgaggctttaaaaagccaagacatctgcccaaagtgatggaactagaaagtctagagctggtattctagcccaaatctgtctgaccgcaatacacagattctttattcctattcgacactggcttctactgaaaatgaaacggattgcagagggaataaatacaaagatggaaagccagtaaagaagtcagtatagaaccactagcgaatagtgttgctctggcacagaccactgtggttgatggcatggccctccaacttggaataggattttccttttcctattctgtatccttaccttggtcatgttaatgactttggagttattcagttaatgaccctttaattctcacaaccaaccagtcatgttgcttgaagccatttatagacgagcttcaaagcaactttaaaagattcttctgtagaagtatgagttcttcctttaattatcattccaactttcagctgtagtcttcttgaacacttcatgaggagggacattccctgatataagagaggatggtgttgcaattggctctttctaaatcatgtgacgttttgactggcttgagattcagatgcataatttttaattataattattgtgaagtggagagcctcaagataaaactctgtcattcagaagatgattttactcagcttatccaaaattatctctgtttactttttagaattttgtacattatcttttgggatccttaattagagatgatttctggaacattcagtctagaaagaaaacattggaattgactgatctctgtggtttggtttagaaaattcccctgtgcatggtattacctttttcaagctcagattcatctaatcctcaactgtacatgtgtacattcttcacctcctggtgccctatcccgcaaaatgggcttcctgcctggtttttctcttctcacattttttaaatggtcccctgtgtttgtagagaactcccttatacagagttttggttctagttttatttcgtagattttgcattttgtaccttttgagactatgtatttatatttggatcagatgcatatttattaatgtacagtcactgctagtgttcaaaataaaaatgttacaaat

SEQ ID NO: 3982 - DNA, 1400 bp, Homo sapiens
gagctctccccaatcaccagctgtctgctgggttcttttctcaagtcctgctgcccaggcccaggtgagacaggcaacgccaggtctgcaggccaggagagatgctgcccaggcctcctggtttccaagctggtccatcactggcctctgtccttggcagagaccttgctgcccaggcccaggggcaggctcttggcctgccccaggcccagagggcttcccagtaaggcccagtgatcccattatcccaggggcaaaaccacctgtccccttttgagctgccagttccctacagccatccccagtcaagggtgagggtgtggccttcaccaggggctgctgtaattaccgagcaaggtctgagctcttcttcagcctcagttccctcattggttaaaagggttctttgttcccatccagccgatgaaggagcaaacgtctggctatgtgaagcctaatttacctgcaggaactggcagggatagtcactggctggactcctgtttacttctagacctggtcaggctccatcccctcccccacctgcccctgattcccctcgtcggtgcctgtcaactgcttttcagcagtggactgcaggggaaagagcagtgatttggggtgagtaggcttcaattcccagctctgaccagacttgctgtgtgaccttgggcaagttcctttccctctttggagcttggtttccctgccagaggaaactgagctggaggagcctgaggtcctgcctttcattggctgacacacctcctgtccactgtgtcactctccaagtgccagagaagtggaggcagatcgctaccccaggctgagatggcccccactgtgaaggccacgcctgtgggtgggcagccacctggtgccaccacagggcaccagggatgatcctgatgtggcaggcaggggagactcacagaaaaatctgcccagagcctaccctcaccagacaaactctgtgctcctccaaaacatcctttagatgcaaaataataataataataataataaataaataaataaaaatccaaacccaagtcaaaaccttggctccagcatgaaaacacgtttacaggaaagtgttctcctgggtttgtgcccaccatggtgcgaatcctgacccaaggcctcctgtctcccttcaaagggagacccttttgggggatgagtttgccagactccccgtgctggtttctttgttactatttgtttggggttttgttttagttctttttttttttcttttcttttttaaaaatatgtggctgtgaacttgaatgaacactgctcaaactttctgctattggggggggcgggtgggatgggaagaaggggcgtttgttttattcttggtgttttcagtgcaataaatagctacaaacttc

SEQ ID NO: 3983 - DNA, 600 bp, Homo sapiens
ccaacaatcaggctctcacagttgtttctcatcttcataataccagtgtgatgtcaggccattgtcccttgcctagcctgggcctaaaaatgcccatcaagcatggtttttgcaagggaaaatccaagtcttccttcctgtgctcatctccggagctgatagcactctcgagttctgagaccaccaaacatgcaacgaacacagtttatgaaactacctgcactcccatctctaaaaccaaaccagatgatgacctttctagtaaggccaagacagcggccttagaaagcaacctgcctggatcccctaatacttctcgtggctggttaccaaaaagtcctaccaagggagaagactgggaaacactgaagagctgcagccctgcctcttcccctgatttgaccctggaggatgtaatagctgatcccactctctgtttcaattctggggagagcagccttgtggaaattgatggagaatcagaaaatctttctctaacaacctgtgaatataggagagagggcacaagtcaacttgcttctcctttaaaactcaagtacaatcagggtgtggtagaacactttcaaagaggtttgagaa

SEQ ID NO: 3984 - DNA, 600 bp, Homo sapiens
cccatcaccaacctcaccaccacccccggagctgatggatgtgagcctggtgggcggccctgctgactgctccccacctcacccagcgcctgccccccagcacccggctgcctcagccctccggactcggatgactggaggtcgtccacccctcccgcctcctgatgaccctgccactctggggcctcacctgggcctccgtggtgtaccccagagcacagcagccagctcgtgaccctgccccctccctggggcccctcctgaagccataccctcccccatctgggggccctgggctcccatcctcatctctctccttgactggaattgctgctacccagctggggtgggtgaggcctgcactgattggggcctggggcaggggggtcaaggagagggttttggccgctccctccccactaaggactggacccttgggcccctctccccctttttttctatttattgtaccaaagacagtggtggtccggtggagggaagaccccccctcaccccaggaccctaggagggggtgggggcaggtagggggagatggccttgctcctcctcgctgtacccccagtaaagagctttctcaca

SEQ ID NO: 3985 - DNA, 1400 bp, Homo sapiens
gtggatggagacaccccggcaacgctccgaatctctcagcagccgctccacgatggtcaccagctcgggggccccccagaccaccccacaccggacgtttgggggagggaaagcagcagtggttctcctggctgtggggggacagttcctgctctgttggttgccctacttctctttccacctctatgttgccctgagtgctcagcccatttcaactgggcaggtggagagtgtggtcacctggattggctacttttgcttcacttccaaccctttcttctatggatgtctcaaccggcagatccggggggagctcagcaagcagtttgtctgcttcttcaagccagctccagaggaggagctgaggctgcctagccgggagggctccattgaggagaacttcctgcagttccttcaggggactggctgtccttctgagtcctgggtttcccgacccctacccagccccaagcaggagccacctgctgttgactttcgaatcccaggccagatagctgaggagacctctgagttcctggagcagcaactcaccagcgacatcatcatgtcagacagctacctccgtcctgccgcctcaccccggctggagtcatgatgggccgctggacactcggagggatatggggctggggccagttatgattgcaaggaccaccttgtgggatcaccttttcccagctggctagggctgaggctggggtctctgcacacagcttttgcttagtgtttcctgggtcaggaacagagccaacaggatgaacgtgtgcaaaagccttggacttggctgtgatctttgactgctaggggagggaacctgggtatggtgagacggtgacgagagaaaagggtcacaaaggactggcctccctgatctctctcctcatggcagcgacccacctccagtcccctggacaatcgggtacaagagacttaaggttgggcatgggaagggtggggtttccatgatccattaaatgccttcctactcccattcatcgctctcaaaattagcttcagtgacaaagacttaaatctctctcctatctgcagcactgggttggagagagggcacgggagttggtcttggctgttcattgattgagactgtaggaactgtgttggttggtattggtggtggtattttcaacaaacagggaataactgcaaactggacaggacacccatctgggaccacctgtccatcctacttccctcaattgaatcaggtaacactaacggatcaaggcagggccagagggtggtgtggtctctatttgaacaaattcctggctcactgagcatcaaaaggggaaatgggctggtgggagtgggatagtctcccatttaagcagctaataaataatttttatgataaaagg

SEQ ID NO: 3986 - DNA, 1400 bp, Homo sapiens
ggaaactgtggctatgtcctccggccagccatcatgagggaggaggtctccttcttcagcgccaatacaaaagactctgtcccaggggtctcacctcaacttcttcacattaaaatcatcagtgggcagaactttcccaagcccaaaggatcaggtgccaaaggtgatgtggtagatccttatgtctatgttgaaatccatggaatccctgctgattgtgcagaacaaaggacaaaaacagtgcaccagaatggagacgctcccatttttgatgaaagctttgaatttcaaatcaacctgcctgaactggccatggtgcgctttgtagtgctggatgatgactacattggggatgaattcatcggccagtacacaattccctttgaatgtttacagacgggctaccgccatgtccccctgcagtccttaactggagaggtccttgcacatgcttctttatttgtccacgtggctattactaaccgaagaggaggaggaaagcctcataaaaggggcctttctgtgagaaaagggaagaaatccagggaatatgcatctttgagaacactgtggattaaaaccgtggatgaggtattcaagaatgcccagccccctatacgggatgccacagatctgagagaaaacatgcagaatgcggtggtgtcattcaaggagctgtgtggcctctcctctgtggccaatctcatgcagtgcatgttggcggtgtctccccgctttctggggcccgataacacacccctagtggtcctaaatctcagcgagcagtaccccacaatggagctgcagggaattgtgccggaggttctgaagaagatcgtaacaacttatgacatgatgattcagtccctcaaggcgttgattgaaaatgcagatgctgtatatgaaaagatcgtacattgtcagaaggcagccatggaattccatgaacacttgcacagcataggcaccaaggaaggtttgaaggaaagaaaactacaaaaagcagtggagagctttacctggaatattaccatcttaaagataagaaagacaggaaggaggagtatttttgtgcctcagactcccataatggtatgagtaccctcctccttctcctccctcacactgcatgtgatttggaagaaaagtgtctgctggcccccagggaatggaaggtgctaatctttgctgtcttcaacatccaagcatgtggccattacacaggtggcagagggcaggggaagtcttagctgccgcactggatccctcacctcagaagtaagacaactgtttttctctaatagatagttggacaaaaggactttgaaaaaattagccagatgtagaatccctgttgttttgcccctacgtctgaataaaagcaatgacttgtgattgtt

SEQ ID NO: 3987 - DNA, 1400 bp, Homo sapiens; identical to SEQ ID NO: 3986

SEQ ID NO: 3988 - DNA, 600 bp, Homo sapiens
cctttagggggacagagtagaaactggagatgacttgtttccagctgtgagcttgagagaagtgtcactcccagcatttgaaggttattgttttcaatgccagtgggccaaatatatgggccaggctttgatatctgtgatgtgcattttggaagtgctgggttgggaagtgacacgtctgttgcacaaatgcatattggttataggtttgtgttttctgccaaacccccacatttctcgggtttgtgagtgaggaagggcatgttgtaatgccaagctgatttgtagctcgtaaggtagtaattggtatttaacatttgcatttgttatttctacttatcttagcactcaaataattgaactacctgctaattcttgccgcatttcaaagaaaataagttgttatgcactttgggatagtggtgatctgtacaggctgtgtgttagctacttgaaggcgtaactggtatttcttgtgtgttttaacagcatgacttcttacagagctgtaatttttaaaattgaggatgccatatttgagatgtcagttttaacactcattaacacactactgtgcaagcattgacacaggctgcactg

SEQ ID NO: 3989 - DNA, 600 bp, Homo sapiens; identical to SEQ ID NO: 3988

SEQ ID NO: 3990 - DNA, 767 bp, Homo sapiens
ctgccctggagttgtggtggaacagcaaccggtgccaccaggagacccccaaggaggacaaagaagtgaacttggagcaggtccaccggcgcatgaacagcctcatggatgaagacattgctcacaagcagatttccccagcgtcgattgagctctcggccctggagatggggggcctggctcccacccagaccttggagccgacacgggagtaccagaacacccagctctcggtcagcacctttctgccagagcagagcagccatggcaccagccggacactctcatcagggcccagcagcaacctgccgctgccgctgagcagctcggcgaccatgccctccatgcagtgcaaacacaggtcacccaacggggggctgttccggcagagcccggtgaagacccccatccccatgtccttccagcccgtgcctggaggcgtccttccagaggctctggacacctcccacgggacctccatctgactgcgccgcctgccctcctgcccaccctcccacccacccgaccagcagagctttttaatacaagaaaacaacaacacaaaccacacacactcgcacacacacacatacacagagactctttcatttttcttgtacatatgtgtaaataatgacagaatggagtggggtaaaagtgtattttgaatattcccaattttcgaagtcagtaaaaaaacacaaaaactgtatgaatgactttgtaaattttgttctatatgaataaaaaggcaaattacttgtgat

SEQ ID NO: 3991 - DNA, 767 bp, Homo sapiens; identical to SEQ ID NO: 3990

SEQ ID NO: 3992 - DNA, 600 bp, Homo sapiens
accaacagttttatttgcctctactacgtcaggcagaattcttcaattaagttgaactacatttgttgatcccttttctcatcttacccctttatgccacctactgaaaagaaaaacaaatagctaggtttggtttcctgttttttgtctatgtcccagctgacattcagtcaaatgttgggatacttctaatttggtggtgtttctttgtacatttttcagtgcaactgtttagtcatgtgttttcatctaagaaattatcttttgaatatttaagccttgatccttttattctgaaaccattaatattccttcttggctgggtgcagtagtttacgcctgtaatcccagcactgtgggaggccgaggcggatggatcacctgaggtcgggaattcgagaccagcctgaccaacatggagaaactccatctctactaaaaatacaaaattagccaggtgtggtggtgcatgcctgtaatcccagctactcggggaggctgaggcaggaaaatcacttgaacccgggaggcggaggttgcggtgagccaagatcgcaccattgcactccagactgggcaacaagagtgaaactctgtctc

SEQ ID NO: 3993 - DNA, 1400 bp, Homo sapiens
ctccctgtagccgtggaccgaatacgcactcttgaaagctgcatcgagaacccgcccaagcgccacctgctagacggccagccccacacttcgcttcagcctccggaccattccggagcagcctcacatacctcactgtctcgtctgtctatgtgacattaagtagaaatattggttttttttttttttttttaaataagtcacagtcctgttgtcaaaactctaatagacagcaaagagggtctgtaccgtagacttcacagttttcagtttttaatgattgccagtggaggggcttcttcagcacagagaccccccactgtgtccagggaccccctctgccaggtggaggtgtgtccaggggctggggaagccgagacgggcactccctctgccggccggcagcgtggccctgagcatggcaagggggtctgtctctgccgatgctccttccgcggcactgactctgcgccgtgtcacatggtttttgaatcacactgcagctgctttccatttttatatatatataaatatatataaatatatactttttaaaaataatttataaatcttaccaaaacttatgctaaatatactttccagtatgaacgcacaggagagtcccatcagcaggcggcattggagtctaggagctcagctgtgtgtccatcaacacacaaattcgtaaaaaacacacatggcctcgccatcgtgggtaaaatcggccccacagcacgtctgcaccagcgggccgttactcccatgccgttcttctgtgtaatattaagaactgaatgtgaagtttatagctagcctgggtgtaccttttaagaattttgtaaaccgtttgtctgtcttttgttactgttttatggtgccaagtatcctacgttacaacaataatatcatgggagaaatagaaatagcctagtttgcttccaatagaaactgcttttaacatgggctgtatataaaaatattaaagagaaacaaaactgtacatttcctcattgctccgctacagacaacccatgtcataaccttgttgcaaatatttttctcctatagcagtaagtacagcattagaaggtgattagagagtctgttgatgaaacacaaatgtatgttttattgattttactttagaacactacagagttcctggaccgggtgaaggcattagctgggtgtttgtgtgggataaatactaccactgcaagtgactgctgtccgctgcggaatctgttcttggtggaagcacaggtccgtgtcgctgctgtggttgccgctgtccgcggttcaacacggagtccgccccgcgggtttcagctgttggtcgttctgaggggcctttggaagtgaccggtctggttcctaagcaataaaattgaccgtggtga

SEQ ID NO: 3994 - DNA, 1400 bp, Homo sapiens
tccccaatggagaatgggacctagtgggaatccccggcaagaggagtgaaaggttctatgagtgctgcaaagagccctaccctgatgtcaccttcacagtgaccatgcgccgcaggacgctctactatggcctcaacctgctgatcccctgtgtgctcatctccgccctcgccctgctggtgttcctgcttcctgcagattccggggagaagatttccctggggataacagtcttactctctcttaccgtcttcatgctgctcgtggctgagatcatgcccgcaacatccgattcggtaccattgatagcccagtacttcgccagcaccatgatcatcgtgggcctctcggtggtggtgacggtgatcgtgctgcagtaccaccaccacgaccccgacgggggcaagatgcccaagtggaccagagtcatccttctgaactggtgcgcgtggttcctgcgaatgaagaggcccggggaggacaaggtgcgcccggcctgccagcacaagcagcggcgctgcagcctggccagtgtggagatgagtgccgtggcgccgccgcccgccagcaacgggaacctgctgtacatcggcttccgcggcctggacggcgtgcactgtgtcccgacccccgactctggggtagtgtgtggccgcatggcctgctcccccacgcacgatgagcacctcctgcacggcgggcaaccccccgagggggacccggacttggccaagatcctggaggaggtccgctacattgccaaccgcttccgctgccaggacgaaagcgaggcggtctgcagcgagtggaagttcgccgcctgtgtggtggaccgcctgtgcctcatggccttctcggtcttcaccatcatctgcaccatcggcatcctgatgtcggctcccaacttcgtggaggccgtgtccaaagactttgcgtaaccacgcctggttctgtacatgtggaaaactcacagatgggcaaggcctttggcttggcgagatttgggggtgctaatccaggacagcattacacgccacaactccagtgttcccttctggctgtcagtcgtgttgcttacggtttctttgttactttaggtagtagaatctcagcactttgtttcatattctcagatgggctgatagatatccttggcacatccgtaccatcggtcagcagggccactgagtagtcattttgcccattagcccactgcctggaaagcccttcggagagctccccatggctcctcaccaccgagacagttggttttgcatgtctgcatgaaggtctacctgaaaattcaacatttgctttttgcttgtgtacaaacccagattgaagctaaaataaaccagactcactaaatcctttccaataattgactggtggaaggaaaa

SEQ ID NO: 3995 - DNA, 1400 bp, Homo sapiens; identical to SEQ ID NO: 3994

SEQ ID NO: 3996 - DNA, 377 bp, Homo sapiens
cacaacgctacagatgggatcaagggctccacagagagctgcaacaccaccacagaagatgaggacctcaaagctcggtgcctgaaggacggagctcccgggacagaacagccccctctgcaggcatgcagccccagccttctctctgctcctcagccatgcgaaaacaggagatcattaagattacagaacagctgattgaagccatcaacaatggggactttgaggcctacacgaagatttgtgatccaggcctcacttcctttgagcctgaggcccttggtaacctcgtggaggggatggatttccataagttttactttgagaatctcctgtccaagaacagcaagcctatccataccaccatcctaaaccca

SEQ ID NO: 3997 - DNA, 600 bp, Homo sapiens
agctcacatggatggcaaacctaatcttatcttccaagtggccaacacccgacctagccctctaaccagtgtccgggtctcagctgtactctatcaggaaagagaaaatggcaaactctaccagaccagtgtggatttccaccttgatggcatcagttctgacgaatgtccattcttcatctttccactaacgtactatcactccattacaccatcaagtcctctggctactctgctccagcatgaaaatccttctcactttgaattagttgtattcctttcagcaatgcaggagggcactggagaaatatgccaaaggaggacatcctacctaccgtctgaaatcatgttacatcactgttttgcatctctgttgacccgaggttccaaaggtgaatatcaaatcaagatggagaattttgacaagactgtccctgaatttccaactcctctggtttctaaaagcccaaacaggactgacctggatatccacatcaatggacaaagcattgacaattttcagatctctgaaacaggactgacagaataagacttatccattttttaatgtattaaatacacccagccagttatgcagct

SEQ ID NO: 3998 - DNA, 600 bp, Homo sapiens; identical to SEQ ID NO: 3997

SEQ ID NO: 3999 - DNA, 600 bp, Homo sapiens
ggatgtagatatgatggatcagaatggaatgacgcctttaatgtgggcagcatatagaacacatagtgtggatccaactagattgcttttaacattcaatgtttcagttaaccttggtgacaagtatcacaaaaacactgctctgcattgggcagtgctagcagggaataccacagtcattagccttcttctggaagctggagctaatgttgatgcccagaatatcaaggcgaatcagcgcttgatttggcaaaacagagaaaaaatgtgtggatgatcaaccacttacaagaggcaaggcaagcaaaaggatatgacaatccgtccttccttagaaagctgaaagctgataaggaatttcggcagaaagtaatgttaggaactcctttcctagttatttggctggttgggtttatagcagacctaaatattgattcttggctcattaaagggctaatgtatggtggtgtttgggctacagtacagtttctttcaaaatcctttttcgatcattcaatgcatagtgcattgccccttgggatatatttggcaaccaaattctggatgtatgtgacgtggttcttctggttttggaatgat

SEQ ID NO: 4000 - DNA, 600 bp, Homo sapiens; identical to SEQ ID NO: 3999

SEQ ID NO: 4001 - DNA, 1293 bp, Homo sapiens
gggattacagagcccaataaaggatttaaaatatattcattaagattttatttggaaaggtggctggagagagctgaggatttccaggactttgtaagttcttattctgggagaacataaggccaataatcatgacctcttccaggcatttttaagacagatgtctattcatgttctttagctagagcctgtactttttgctggcatttgaataacccagtttaaaaagagtccagttagggtggactaactttggacacaaattggcttccatttcctacattttcatactgctgccttcctacagctgctagaccaagacctgttggtctgggaagcatttcatggatagggagagctcctctcggtgaacagtccaaaactaaaatagatgtttatatagaaagcccaagaggagacttttgccatgcctgagttctttcctatcccaccctaacacttaacatattacttagtctgctttgttaaaagcaagtattacctttaacttgcctcttactctttgccctttagctaactaataaagtttgatataggcattattatataattctgagtcattcatggtatctctcatgtttgatgtatttttcaaactaagatctatgatagttttttttccagagttccattaaatcatttatttcctttactttctcacctctgttgaaacatttagaaactggatttgggaacccaattttggaaaaccagattcatagtcatgaaaatggaaacttccatattctgtttttgaaaagatgtggccattattacagtaattttattataggactttgcctcgtacaattaatagtgatattttggacaaggagttctggtgacaagctatacctaattataagctataaaacaatagatatgagtgtttgtacagtttaactcaatggagatcagaatattctatgtattgagaaaatgtttaatatcaatctataaatcttgaatttctaagaggcttattttgttcttttggctgaatgagtatatttgaattggttgaataattaataattctcattgtaaaaataattatatgccaaaaatatatttgatgttaaatcaaatagatgattctgtttacattgttcatatgaataataatctgtgttaatttcattttgataattggcctttaatatttgtatctctaattttattttctctctgttactgtaaaataatagctataatgtataacaattttcttcagaagaattctatgctattattaaaataaaatatttactg

SEQ ID NO: 4002 - DNA, 600 bp, Homo sapiens
gtccaccatacgatctgtgtaagtaagattatcccacttgccctttctctttagtctttgtcccttccttttcactaagtgcccctcatccttttcaatctcattgtcactggatagtgctgtatcacttaggtgtgcattcggctgcaaataacagaaaacccagcaaacactgaagggctggataagaaccctgagagggggtactccaggactgtctccataacatcattgggatccccatcccgttgctatttctttttcaccgtttttaccttttgtcctctggcttattgcctcagagttgcaagatggttcctgaactgtcaggtatcatgtctgctttctaagtgggaagaggaagggagaggcaagcaactaggtacaatgtctatcaggaaagcaaagcttccccagagacgctcagcttgtatccattgactggaagtctgtcacgtggctccccctagccgcacactagtgtgggaaggaaaatattgagctaggcacattactctctgaacgaaattcatattatcttattaaggaagagtgttggtcttcaggaggggaagtttgctgtattggatgccatcatcg

SEQ ID NO: 4003 - DNA, 600 bp, Homo sapiens; identical to SEQ ID NO: 4002

SEQ ID NO: 4004 - DNA, 600 bp, Homo sapiens
aatttctctattaaaggaacttcgtcatccaaatatagtcagtcttcaggatgtgcttatgcaggattccaggttatatctcatctttgagtttctttccatggatctgaagaaatacttggattctatccctcctggtcagtacatggattcttcacttgttaaggtagtaacactctggtacagatctccagaagtattgctggggtcagctcgttactcaactccagttgacatttggagtataggcaccatatttgctgaactagcaactaagaaaccacttttccatggggattcagaaattgatcaactcttcaggattttcagagctttgggcactcccaataatgaagtgtggccagaagtggaatctttacaggactataagaatacatttcccaaatggaaaccaggaagcctagcatcccatgtcaaaaacttggatgaaaatggcttggatttgctctcgaaaatgttaatctatgatccagccaaacgaatttctggcaaaatggcactgaatcatccatattttaatgatttggacaatcagattaagaagatgtagctttctgacaaaaagtttccatatgttat

SEQ ID NO: 4005 - DNA, 600 bp, Homo sapiens; identical to SEQ ID NO: 4004

SEQ ID NO: 4006 - DNA, 1400 bp, Homo sapiens
gtagacatctgtaggaactaaatatcaaggaaatcaagacatttattttcaaagcgagaattctatctacattctattctgcggatgttatttctgttatacatctgaattttaaaatgtttactgatagataatggatttaaagggcggctaattgattgtctgccattgttgataaactgttctaattggtttgtgaaagaactctgagaattagctaaatggaggctagtgtatttatttttagaggtacatgttttaagtaaatgtatttaaaacaaattttcatggtctgaattgtatatgtaaatgcatatctgtgtaagtatatgcaagtgtatattcttctactgattcagtcagacacgaaatccaactgaattacccggtagactgaatatctgacgggatttctatatggacatagcacagatgaaccaaaaatgtatttatattcacctgagttttaatgtttttaaacaaagttttctcctgcagtgcttttctatatgaaatagttgagtcaagcttgggcttttttcttcgttgttcccaagtcatgtaatgtatagtgaatttatccaaaacgccattgtaacgttttttactagagtgtttttgcacatttgggcgctaaagggattaaaacaactgatgccacaatgactattgaaggagggaaaattctcaaggttccatagtatcttttacaaaatggattaaaaaaaaaatgcctatgcaacttcaaatagtctgatgcctgcttccccaggacgagtgactcttccacggtgtgctgctttccctccgagcctgtggaaaggcagagcccttttgcagatacgaaagcaagcttttgccaatgatctttaatggagttaaaatgtttatggtaattgtaacctttcaaatgagttacgtgaaaagagcatctcacttttaatacacccagatattttcttcaagtctttgtgcattttagcaggacttaattttcttaatttattctttcctttcaattatagtgacatagagtagttggccttataagtagatcccatttagcccctgaacataataccatctgcagtattataaaagtcatttagaaggtcagggggataatctagaggcaggattttggacattgtgaaggaaatgtgctccttctcagctcacttcaataactattttctgagactgaagttttttagacaagaataagaaaactttgctttcttcagttatcacatgtgaaagcttttgctttttgttaggaaaaggtgtggatgactctactgcgtggatggttacatttgctttccgtgaaatgctcagaaaatgtcaggacattccttttccaattgtgtgtcagtgcgtattgtaataaaactactgat

SEQ ID NO: 4007 - DNA, 1400 bp, Homo sapiens
ttgccctgaataccattttctaccccttgcccctccattctcctggcccttctgggggtcagctggtctctatgaatatgctgggggtgcttccccataggtctctcccttcatttgtctctggtgggacaaaatactgactcagtccttagatgtagtttcacccaagagcatcttggccctgggaagaggtccctaggctgcagatgctactgactgcttgctaggtagcctctggaaagcattccccatccatcactccccacttctttctgctgtgctgcttccctcccaaactccatttctgtcaccctttttataagacttttcctcattctgtggggccataaacctatttagtctggagccaaagggatgccctatctgaaggaaaggggcatggggtgggggattccatcaaaactgttgttttttgccccatgatttttctttggtcagtaggaggctggattggagtggtgattattcccctggagctaagctcaggagcccgaagggagagactgagactgactcccttatctcttcatattctttattccctaccagatggatttttttttttttttttggagacggagtctcgccctgtcgccaggctggagtgtagtggcatgatctcgactcactgcaaaatctgcctcccgggttcaagcgattctcctacctcagcctcccgagtagctgggattacaggcatgtgccaccacgccaagctaatttttgtatttttagtagagacggggtttcaccatgttggccaggatggtctcgatctcttgacctcgtgatctgcctgccttggcctcccaaagtgctgggattacaggcgtgagccaccatgccccgccccagatggattttacatttgctcttttgtgtttcgctccaaagggttgtcttcctcgccaaaaggagggagggactttgaatttgatatgaatctttaaaaccagaattggctggatatttcccatgattgggaaaagagtgaaatgaggacattctgtaaactgtccctccctaattccaaggatcagaaactccccgttttgctgactcattccataactggagaaagaagctccattgaccgaagccacagggcagcatggaagtttaaattttctctaaaattaaaatgccaaggataaagctggctgcttccaggagggggaagaggagtggggagtgggcggtgaaacttttccagatgaacggaccataaatgtgttactggctttgtgcctgtagctcattttattatgacctatatgctcctgatttaaagagatctgtgtactgtttacttcccacttcccagaatcccttgtatctcctttctcgggaattgtattttctaataaatgacatttgag

SEQ ID NO: 4008 - DNA, 1400 bp, Homo sapiens
caatactgaagggccatccaactacggacctgcccatgggggttggctgaactgttggttgagactgcatcatagcccactttctcccttgcccaatcctgcttctttcctttcccttccagaggtaatgatcctgagaccactccctaataagccttttggatgctaatctggattttagagttggcttctcgggaaaccaaaccgttgacaccccctagaaacttgaaaccacatcaaagaagtaccagctggtgctttaacctcagaagcttggagaaggggccctgtggagcagggactcagacccctgaggagtgggtgctgcccagcaggcagtgtaatgggactcattctgaacacgtgaaagaggctggaagctggattcagttgctactagaacatattttgataaagacaccagtaaccttcatttcactaaatccaaaagagaattttcaatcctcaaattagcatcacttgaccctattgaccactttctctttgaataatttctcctgttgactaccatgatgtcacatttttctggtttttttttctcctatacctttggatctcttgtatagattcagtcttcttccagttgctaaaagctgtagttgcatccttagtggctagggaaatgcaaattaaaatcacaatgaaatatcactatacacccattagaatagctaaaattaaatggctaaaatgagaagactgaccttaccaactactagcgaggatgcagagtgactggaacttcccgtacattgctgctgggagtataaaatgggacttctcctttggagaatggtttggtagttcctttaaaagttaaacatgtacctaccatatgatattccacttctagatgtttacccagcagaaattcaagcatatgtcctatgaagacttcacaatatttataggtgctttatttgtagtagccccaaagtggaaacatcttgaatgggcatgatttggtgcatggataaacagattgtatatccacacaatgaataacagccacaaaaaagggatgaactattcatacacgaacaacatggatggactgccaaagaattaggctgaatgaaagaagaaaaaaaagactacattttgattatttcatttacatactattccagaaaatacaagtgaatctatagtgacagaaagtgatcagggggtttgctggagatggaaatggggagaggagggacagaaggattgcaagggaacacttggtaactttggggaagagggacgtgttcattttcttgaatgtaataatggatttatgggggtatatatgtcaaaacttaccaaattgtacacttttgttatgtgcagtttattgtgtgtcaattatacctcaataaagttgttaaaaatat

SEQ ID NO: 4009 - DNA, 600 bp, Homo sapiens
ctgttgggaaccaccacgcagaccaccagcatcgacatgtgggctgtgggctgcatactggccgagctgctggcgcacaggcctcttctccccggcacttccgagatccaccagatcgacttgatcgtgcagctgctgggcacgcccagtgagaacatctggccgggcttttccaagctgccactggtcggccagtacagcctccggaagcagccctacaacaacctgaagcacaagttcccatggctgtcggaggccgggctgcgcctgctgcacttcctgttcatgtacgaccctaagaaaagggcgacggccggggactgcctggagagctcctatttcaaggagaagcccctaccctgtgagccggagctcatgccgacctttccccaccaccgcaacaagcgggccgccccagccacctccgagggccagagcaagcgctgtaaaccctgacggtgggcctggcacacgcctgtattcccacaccaggtcttccgatcagtggtgtctgtgaagggtgccgcgagccaggctgaccaggcgcccgggatccagctcatccccttggctgggaacatcctccactgacttcctccc

SEQ ID NO: 4010 - DNA, 600 bp, Homo sapiens; identical to SEQ ID NO: 4009

SEQ ID NO: 4011 - DNA, 1400 bp, Homo sapiens
gactctgctccgtttttggagcagactgttttaagttgctcaggagcctgatggaaccatgaaccgagactcttctctgtttcctgccaagacctcatctgcactaatgccttctccctgaccttgacacttccccctttagctataaaagcacttaccagccgaacgtggaacagtatcacaaaagattccatctcccaacgatttcagaactctgagctcagagagactccagattttaaaaaataatttgagtgcttggaaactattagctttttaagttccttccaaatatgttagtacctaccctttactttttccccaagaccatctcagggtggagcattctgtctaagagaagaaagataaggaggctcccacccacctctcccaagagcagacattaaacatctttgtgctttgaagagagtgaattttggatagtcttgtgattctcagactaacttccagaattatactttaacccctcccagatatggtccgcctttggcattgtgtgtacatctgcagttttgcatggtgggttgttaatatttcaaatgtgtggtttatgaatacgtctgtataatcggcttctggagtgaaacagcaaaccccaaatcttcaaagttggaaggaactttaaaaatcatccggtccaatctctttcctctttctgccacctcccaaggcagaaatcccctcttcagcttcttttgtaggtgggaatccagcctctgttagatatgtccagagatggaaactcactcccctacaaaagatggagcttaatggagaaattgcaactttcattaaaaaacaaattcagatgaaatatcagtaactgtcttggacagtgctgaaatcaggtggttaaacgggtaaacaaaatatactgtattttgagaaatggcacaaaaacaggcagtcatctttaagggctatgcctaggcaaactactaacatgcattgtgagaatgccgtgtatacctcacgtactgtgtactttgtacatatattttaccttttatacctatgttcgattttgttttgttttgttttgttctggctttgaggcttgttttgttgtctgtgtctgtctgaataacctgcgtgtctaaaaccacgtgaaatgtgaatgattattggcaatattaccttgacagaatcatgggactttgagaagagggaggacagaggcctctgtcgcactaacgctctcgtggttgctcgactgttgtatctgtgatacattatccgactaaggactctgggctggcagggccttctgccgggaaagctagaaacactaggttcttcctgtacatacgtgtatatatgtgaacagtgagatggccgtttctgacttgtagagaaattttaataaacctggtttcgta

SEQ ID NO: 4012 - DNA, 866 bp, Homo sapiens
cggtcccagccccggccgtcccggcgtcgcttcggagcgcggcggcagctgactgcgccttcacgatccgctgggacccgcgagccccgccgccgttatgaacatccgcaatgcgaggccagaggacctaatgaacatgcagcactgcaacctcctctgcctgcccgagaactaccagatgaaatactacttctaccatggcctttcctggccccagctctcttacattgctgaggacgagaatgggaagattgtggggtatgtcctggccaaaatggaagaggacccagatgatgtgccccatggacatatcacctcattggctgtgaagcgttcccaccggcgcctcggtctggctcagaaactgatggaccaggcctctcgagccatgatagagaacttcaatgccaaatatgtctccctgcatgtcaggaagagtaaccgggccgccctgcacctctattccaacaccctcaactttcagatcagtgaagtggagcccaaatactatgcagatggggaggacgcctatgccatgaagcgggacctcactcagatggccgacgagctgaggcggcacctggagctgaaagagaagggcaggcacgtggtgctgggtgccatcgagaacaaggtggagagcaaaggcaattcacctccgagctcaggagaggcctgtcgcgaggagaagggcctggctgccgaggatagtggtggggacagcaaggacctcagcgaggtcagcgagaccacagagagcacagatgtcaaggacagctcagaggcctccgactcagcctcctagagcctgccccatcccctcctcaccccacgagctttcacaataaattcgctccgtggcactg

SEQ ID NO: 4013 - DNA, 600 bp, Homo sapiens
gcacctcccctcccgcccaaacctttcccccatgtggtcgttagagacagagcgacagagcagttgagaggacactcccgttttcggtgccatcagtgccccgtctacagctcccccagctccccccacctcccccactcccaaccacgttgggacagggaggtgtgaggcaggagagacagttggattctttagagaagatggatatgaccagtggctatggcctgtgcgatcccacccgtggtggctcaagtctggccccacaccagccccaatccaaaactggcaaggacgcttcacaggacaggaaagtggcacctgtctgctccagctctggcatggctaggaggggggagtcccttgaactactgggtgtagactggcctgaaccacaggagaggatggcccagggtgaggtggcatggtccattctcaagggacgtcctccaacgggtggcgctagaggccatggaggcagtaggacaaggtgcaggcaggctggcctggggtcaggccgggcagagcacagcggggtgagagggattcctaatcactcagagcagtctgtgacttagtggacaggggagggggcaaaggggg

SEQ ID NO: 4014 - DNA, 1400 bp, Homo sapiens
tggcattgtcatgtgggaggtgatgacctatggcgagcggccctactgggagttgtccaaccacgaggtgatgaaagccatcaatgatggcttccggctccccacacccatggactgcccctccgccatctaccagctcatgatgcagtgctggcagcaggagcgtgcccgccgccccaagttcgctgacatcgtcagcatcctggacaagctcattcgtgcccctgactccctcaagaccctggctgactttgacccccgcgtgtctatccggctccccagcacgagcggctcggagggggtgcccttccgcacggtgtccgagtggctggagtccatcaagatgcagcagtatacggagcacttcatggcggccggctacactgccatcgagaaggtggtgcagatgaccaacgacgacatcaagaggattggggtgcggctgcccggccaccagaagcgcatcgcctacagcctgctgggactcaaggaccaggtgaacactgtggggatccccatctgagcctcgacagggcctggagccccatcggccaagaatacttgaagaaacagagtggcctccctgctgtgccatgctgggccactggggactttatttatttctagttctttcctccccctgcaacttccgctgaggggtctcggatgacaccctggcctgaactgaggagatgaccagggatgctgggctgggccctctttccctgcgagacgcacacagctgagcacttagcaggcaccgccacgtcccagcatccctggagcaggagccccgccacagccttcggacagacatatgggatattcccaagccgaccttccctccgccttctcccacatgaggccatctcaggagatggagggcttggcccagcgccaagtaaacagggtacctcaagccccatttcctcacactaagagggcagactgtgaacttgactgggtgagacccaaagcggtccctgtccctctagtgccttctttagaccctcgggccccatcctcatccctgactggccaaacccttgctttcctgggcctttgcaagatgcttggttgtgttgaggtttttaaatatatattttgtactttgtggagagaatgtgtgtgtgtggcagggggccccgccagggctggggacagagggtgtcaaacattcgtgagctggggactcagggaccggtgctgcaggagtgtcctgcccatgccccagtcggccccatctctcatccttttggataagtttctattctgtcagtgttaaagattttgttttgttggacatttttttcgaatcttaatttattattttttttatatttattgttagaaaatgacttatttctgctctggaataaagttgcagatgattcaaaccg

SEQ ID NO: 4015 - DNA, 600 bp, Homo sapiens
cccgagatgtttatgaagaggattcctacgtgaagaggagccagggtcggattccagttaaatggatggcaattgaatccctttttgatcatatctacaccacgcaaagtgatgtatggtcttttggtgtcctgctgtgggagatcgtgaccctagggggaaacccctatcctgggattcctcctgagcggctcttcaaccttctgaagaccggccaccggatggagaggccagacaactgcagcgaggagatgtaccgcctgatgctgcaatgctggaagcaggagccggacaaaaggccggtgtttgcggacatcagcaaagacctggagaagatgatggttaagaggagagactacttggaccttgcggcgtccactccatctgactccctgatttatgacgacggcctctcagaggaggagacaccgctggtggactgtaataatgcccccctccctcgagccctcccttccacatggattgaaaacaaactctatggtagaatttcccatgcatttactagattctagcaccgctgtcccctttgcactatccttcctctctgtgatgctttttaaaaatgtttctggtctgaac

SEQ ID NO: 4016 - DNA, 600 bp, Homo sapiens; identical to SEQ ID NO: 4015

SEQ ID NO: 4017 - DNA, 1400 bp, Homo sapiens
ccatatcggtgttcggaagataattgtactaagtctttcaaaacttcaggagatctacagaaacacatcagaactcatacaggagaaaggccctttaagtgtcccttcgaaggctgcggtcggtcctttacaacatcaaatatcagaaaagtgcacgttaggacacacacaggagaaagaccttattactgcacagagccaggatgtgggagggcatttgccagtgcaacaaattataaaaaccatgtgaggatacacacaggagaaaagccatatgtttgtacagttcctgggtgtgacaaaaggtttacagaatattccagtttgtacaaacatcatgttgtccacactcattccaaaccttacaactgtaaccactgtgggaagacatacaagcagatctccacgctggccatgcacaaacggacagcccacaacgacactgagcccatcgaggaggagcaggaagccttctttgagccgcccccaggtcaaggtgaagatgttcttaaagggtcccagattacgtatgttacaggtgtagaaggggacgacgttgtttctacacaagtagccacagtaacccaatctggactgagtcaacaagttacactcatatcccaggatgggactcagcatgtcaacatatctcaagctgacatgcaggccattggcaacaccatcacaatggtaacgcaggatggcacgcccatcacagtccccgcccatgatgcagtcatctcctcagcaggaacgcactctgttgctatggttactgctgagggtacagaagggcaacaggttgcaattgtagctcaagacttggcagcattccatactgcctcatcagaaatggggcaccagcagcatagccatcacttagtaaccacagaaaccagacctctgaccttagtagcaacatccaatggcacccagattgcagttcagcttggagaacagccatctctggaagaagccatcagaatagcgtctagaatccaacaaggagaaacgccagggttggatgattaatcctcagaacaatggagcaataaagcagaaggagtctttcatcttctggcagcagaaatccatgaagcccgggcccaggaaaattagaagttttccattcctgatacactgtacacatttttatgcgagagtggagaacattttattcttgacacttttgtgtatataacccttggaatagattctcagagtgattcattgtgtacaaggaagtatgaaattagggcaatacagtaaattttcatgttactcttttatcagatcacaaactcctagagtctacatgcaagactagtaaagtcttatggagtcttatgatggatttttaacttcccgtggaaaaaaaaataaaggctgtatctaaaata

SEQ ID NO: 4018 - DNA, 600 bp, Homo sapiens
ctggatgtcattcacacagaaaataaactctacctggtttttgaatttctgcaccaagatctcaagaaattcatggatgcctctgctctcactggcattcctcttcccctcatcaagagctatctgttccagctgctccagggcctagctttctgccattctcatcgggtcctccaccgagaccttaaacctcagaatctgcttattaacacagagggggccatcaagctagcagactttggactagccagagcttttggagtccctgttcgtacttacacccatgaggtgactcgccgggccctattccctggagattctgagattgaccagctcttccggatctttcggactctggggaccccagatgaggtggtgtggccaggagttacttctatgcctgattacaagccaagtttccccaagtgggcccggcaagattttagtaaagttgtacctcccctggatgaagatggacggagcttgttatcgcaaatgctgcactacgaccctaacaagcggatttcggccaaggcagccctggctcaccctttcttccaggatgtgaccaagccagtaccccatcttcgactctgatag

SEQ ID NO: 4019 - DNA, 600 bp, Homo sapiens
gacgaagatgattgggcatccaacaaagttatgtttaaaataggtgatcttgggcatgtaacaaggatctccagtccacaagttgaagagggcgatagtcgttttcttgcaaatgaagttttacaggagaattatacccatctaccaaaagcagatatttttgcgcttgccctcacagtggtatgtgctgctggtgctgaacctcttccgagaaatggagatcaatggcatgaaatcagacagggtagattacctcggataccacaagtgctttcccaagaatttacagagttgctaaaagttatgattcatccagatccagagagaagaccttcagcaatggcactggtaaagcattcagtattgctgtccgcttctagaaagagtgcagaacaattacgaatagaattgaatgccgaaaagttcaaaaattcacttttacaaaaagaactcaagaaagcacagatggcaaaagctgcagctgaggaaagagcactcttcactgaccggatggccactaggtccaccacccagagtaatagaacatctcgacttattggaaagaaaatgaaccgctctgtcagccttactatatactga

SEQ ID NO: 4020 - DNA, 600 bp, Homo sapiens
cacaccttcgtcccctttgcagggagttacaggagaccccgagacaccctccctccactcgggagccagatggtctgagaagtgaaataagaacctagcatttggttgagagggttattggaaagcttcaaacagagaattagattgtttcctgatttaaaaaatcactcctctccagcaccgagctcccccagggctgcccatcatcttaatgtttggagcttgccttgtaatcaacagagagagaaactaaacacatacgtaagatggtgcttgctctatttggctcctaacagttgccagcccacctaagttctcttcgcttaaagatatgtcccagggcaagacaacaggatcagagaacttgccagatagaaaagacttaaatggagaaccagcccatgcctcacagacagtaggatcccagtaaatatgggttgaataaaatgtgtcttgtccaacctacaaaagtttggccctaaaaaaacccacaaaatatttggacctttaaacagcttgttttcccatggagaagatgacaatgccaatcataggcattttttcattctacagcataaaaacatgagatttaagagcctg

SEQ ID NO: 4021 - DNA, 600 bp, Homo sapiens; identical to SEQ ID NO: 4020

SEQ ID NO: 4022 - DNA, 600 bp, Homo sapiens
tggacccatttcagtccattgcagcgcgggcgttggaagaactggagtcttcataacgctaagcattgttttggaaagaatgagatatgaaggagttgtagatatcttccagactgtcaaaatgttaagaacacaacgaccagctatggtacagacagaggatcaatatcagttttcctatcgtgccgcactagagtacctgggcagctttgaccactatgcaacgtagaaacccctgacccattctggatttttactacaggcccttcaatatccatggagtctcttctgagccatacagggcacttgagaagtccttcttaacttctagctaacaactacttagtgggactattacacacaaaacaaattaaaaacaaattattccaggtggaccaagaattctttgacatcgccccttcccaccatactgctcataataacattttagggggaaaggggagggaatgtttaaaaagaaagtccttgatttagttttttagtattgtaaagatactgctgacctgtgcttcatttctaactgtgtaaacttttttttaacaaaatgtatcattcgataaagtgaattttaaaaaagtt

SEQ ID NO: 4023 - DNA, 1400 bp, Homo sapiens
ctccagtgggtgcagttcagcaagatcctgctttgtgatcaaacagagaagcacatcaacacagagataagatgcaacaatccaaaaaccagtcggcagaccacagggcagcttgggactcccagcaggcaaatccccaccatttgagagctcaccttgcagcagacagacatggtggctcggtacaggttgtaagttctacaaatggagagttaaacacagatgaccccaccgcaggacgttcaaatgcacccatcacagcccctactgaagtagaagtgatggatgaaaccaagtgctgctgttttttcaaacgaaggaaaaggaaaaccatacagcgccacaaatgactctggacacagacagatcctggggagttacttacatgttcatctgctgtcttgtgattaaaatcatctctgtagtgaccacgtatattttcaaggactcactcttagaaacaaaaatgtcatactttcatacttcattttgtggttgtcttacattctttttctttttttttttttctctaatttaacctttatggaagctttaaagttttgtcaaaacatgagtgctttgcccatcagtgaatggaatggaccaatgaggtggtatcaatgaatatagttccatagaacattttccagaagttcttctgttgtagaaagcagtacagtatcttaagtgtcaaccagttatatacctaatctggttttttataacttctgtaagagcataatcaaacaggaattttcttttctcagtggataatacaacagagaaaacagagttgcccaaatatttaaaagaagttattccttgagaagttcatattttgtgacatctgcattgatttcagtattactgatggtactgttattcataagtcatattaacattctctccgtgaaatcatggtacagtcactgcccagaggtactgaggaaaaagcaatatgggttcggcagatggtggtggtaaaatgaatcttaaggagtgtggtaaatatgtgctccgcttttgttgcatcactatgtgaagtactgtgttgcagaagtggcaaaagcgcttatttttaaaaatgcaaaatatttgtacaatgtaactttatgcttccaaataataatgtatgttagacagcaagaaatgaatactttaaaaagtgatgtatgttggagttataaagaaatacactaaggagaggtagtaaatgtgaaccttgttgcagtgtataaggtggaagcctaaagaaatctcaccgaaacttactgctgaatgattacattctcccttaagcagaaaactttggatgtgccatgcaatggtgtctgtgtaattattttgctctttgattaaaaaaaagacccccagcaataaaaagtgggtcactctatgcc

SEQ ID NO: 4024 - DNA, 1400 bp, Homo sapiens; identical to SEQ ID NO: 4023

SEQ ID NO: 4025 - DNA, 1400 bp, Homo sapiens
agctgccgcaatttccatgccaggatatttttccgcaaatcagtcggttgaaattcagaggagtcagaatgactcgacctgtccttcaatgttgataataaatgtctcagccaaaaaccttccttgagctgccatgcttttccccttgacctgcacctcttcccctaaaacttctgcagggaagcccctggcggaggcgccattgaaagcatggtcttgccagtggctggcaaggcggttttgttctgctcagtttctggagagggttggatgcgtcccctgccatccagccctccccgcttgaggccagcactgagtctgggacactcagcgggaagggggctggcatcgccagcgacccacacattcctcacgtagcttctgctcccaggaaggtagtttaaatcctgtatatactttttagagactcttttaaactttctgaagtgctgatgtacatactttctcgtacacacttttgtgaagatttcaaggggaagggagtcgtctgccattcaatgtttacatttatgttctgcaagacgctgtcctcagggaccattaggggaccattctgttcagtgcgatcctgatggtccgggagatgagggtttccggggctagtgatcgtgatcccttttatttgcaactgtaatgagaatttttcacactaacacagcgagggactcaacacgctgattctcctcctgcctctcccgtgagtctccagcctgcccagcaccggcagctgtggagcacgtggatgctgcctaccccggcgcccgcgtcttccacgggcacaggtgtgtggaggccgtggtcggaccctggtgtcctggttactgctgcccgggtgtcttttttttgagtaactgctctctgagttttgcacacgaagttgccctcatctgctggagatcgataaggaaggcacaagacgttctcctctgcccgtgaggagcttcccgcagccgcctggcccagcctgggcacgttctccgaggcatgtgtctccctgctcaccctcgtctgggcacctcagcatctgtggacttgagcgtccaaaaaccctgagtgtgattctgggcagccggcctggcttgaagtccgccatgaccctgggcacaggggaagcccagccgtgggcttaggagagagggaccagcgcccagcgttagggctggaagacggcagtgttcagaattccagccgctcatctgaacacagaaggtgtgaactgacctctaaagcagcgtgagatgggaatgatctagaaaactttggatttttgaagtaaattttaatgtttcatattaatttcttgaaaatgtattaaatgtcattgaaagccttattacgcttttcagatcctttcaataaacaagacttgtagaaaataa

SEQ ID NO: 4026 - DNA, 1400 bp, Homo sapiens
ttccttttggagcaccgcatggtcttgccagctaccaggagccacttaagagattattgtgctgttttccaggaaagctgcagctagaaaatggtcttaatggtgctcactttagcagacagcgtccacaatgtgaatcctacagtttccaggtgaggccctttctccagtttgcccattaactgggagaggtactttcgcctccaaggactgaattttgccaattactataaatccaaataaatacccactttcaaaacacccacccctcttgccattaagaagtcccataacccccggttggttgccagtgaagacagaagctcttactgacttggccccgaggccatcaccccctccagcagtgaacactgtccgccgctgtgaggcctgctcccctgcgaccgccctgccccccgtcaccgaatcggacactcatcctttctcacacttcccacacatgatccttcttcccttcatcaccaaaggagcctctgtatggaaacatgtccagtgttgctgcccagtgtgtatgcctcccagtacccactctgctcggccgccttgggggttccgcttcctgttccagttcacctaaaggctgattgtgcaggcccagcactgtggctggactgccgcgccacgggcaccaggacccctaagaccaagtgacaactgggagagcctcagcatatactcttctcctccgatctcacagcctgtcatgctgctcagtgtggttctcacccctgcaagctcaaattcagttccctgaatggagtcaggtgctggaggccgtggcagcggagggtggttggggttggggctgggggtggactggtgtgagggcagaccagggccaggtagacggggctgtttggtgcctgaaggatggcagacgcctggtgtcaggaggggccgccaccaaggagcagcagctggggcagaggagctggggtcaggggccacccctctctgccgatctccctgcctgggctggctgtgaggccacctttgtcccaggcccagcctcaaggcaaggagggcgcttcactgaggtgtgaattgtacgtacaggctttttatataccaaaagtattttttgactagaccattcaaagctacccgaactatgttggaaattttttttttctcattaaaatacaggcccttaggctctatttttcatgtatgagtcgtgtgtaatttatgtaaaaatgtgtgtacagactcactgatgcagcactgtagcccatcaccttggagcactgactgtacatagtgtggtgaagaaaagtgaacgcccttgtagagcagcccgaccacaggagcatggccgctgccagcccagacgctgctgacgctgtgtaaatgtgcacaataaacccgtctcaccccgg

SEQ ID NO: 4027 - DNA, 600 bp, Homo sapiens
tggcccctgaagtacttgatgaaaccattaatatgaaacactttgactcctttaaatgtgctgatatttatgccctcgggcttgtatattgggagattgctcgaagatgcaattctggaggagtccatgaagaatatcagctgccatattacgacttagtgccctctgacccttccattgaggaaatgcgaaaggttgtatgtgatcagaagctgcgtcccaacatccccaactggtggcagagttatgaggtaagaagctggcctcctgcggctttcccatcagcctgatttctccaccttagaaaagggtttcttgacaatggggtcaggccccagaggagccccctgagagtgtcagttattatttactattacgtgctattttacatatcccaagccctttagggctacagtctcttgtcctggaccctgtagggtgccatttggagttcacagcctagaagaagaaaaggctttgggcctggtgtggtggcataggcctgtaatcgtagcgctttgagaggctgaggcaggaagatagcttgagctcagaagttcgagacaaacctgggcaatgtggggagaccccatctctaca

SEQ ID NO: 4028 - DNA, 600 bp, Homo sapiens; identical to SEQ ID NO: 4027

SEQ ID NO: 4029 - DNA, 600 bp, Homo sapiens
ctgaggtgggcatttcacgggaagggttggtgtgctggctttagacggggagaaacatctggaaggatgctcgagagaacaaatggaggtggtgaaaatcaagctttggattgtgcattcctaggcacaaaattacctcattcttcctaacaagcaatctgggacctgattttccaccttttttctcttttcttcccttcctttgttttcataagcctttggtatctttcctgcccttttcctttgtgtactctatactggagttcccttcttcctcttgctgtaggctcaatcccataccgacatctacaactaatctttcccatcaactctgtgtgaaggcaggttgcaactagaaattcagaggggcttggaatagagaaacctaaagaagcatcatcccctccatccccaacttcctcaaagcccaaagccaagggaaggataaatcaaggctcaaggcttccccagcaaagattagggaaagagacttgaccccaggactgtactacgactcttaagagaacactgcacagcactcaaagtcccccactggactgcttcctccttagccccactggtataaatacatctctctcc

SEQ ID NO: 4030 - DNA, 600 bp, Homo sapiens; identical to SEQ ID NO: 4029

SEQ ID NO: 4031 - DNA, 600 bp, Homo sapiens
attagaaataacaactagtgtggaaagtaacccacattctgttcaggatacttttgttttaaaaggctaaaatgtttgtgtgctttaaaattcttaatgaattcactggcatgagtaattttatgccgggaaaatctgatttgtggtctatttaattacaaagagattgtgatggtgataatttgaataccatctttctatgaaaagctgtgtatattaattttaatctctagggccttttttcaataacttgaaaatcacagcctcatcattagcaactttatatacacagctttaaaaaatttgctttaaactgtttcagagcttcttccctaagccataaactgtctcacctaaacaagatagacctcaataaaagacataatatttctccacctggcagaaaagtaactgccaagtaagattaagaaataagttgagcatttctggagtatatttctcataattctgcagagacttccagtttattgcatatatgcagtaaagtgtatatattatgcagtttctctaagtggaaaaacttgacatgactttaatagtgttaaaacatgaaaatgctggtgagctgaggtagaaaaa

SEQ ID NO: 4032 - DNA, 600 bp, Homo sapiens; identical to SEQ ID NO: 4031

SEQ ID NO: 4033 - DNA, 1400 bp, Homo sapiens
agaaggatggaagaaaattcctctggcaataccatgtcagcctcttcgatgtttaatacagaagaaagaaaatgtttgcagactcacagagtcacggtgcatggggtcccagggccagagccctttaccgttttcactattaatggaggcaccaaggcaaagcagcttctgcagcaaattctgacaaatgaacaagacatcaaacctgttaccacagactattttttgatggaagaaaaatattttatatctaaagaaaagaatgaatgtaggaaacaaccattccagagagccattggtccagaagaggagatcatgcaaattttaagcagctggtttccagaagagggatacatgggcaggattgtcttaaaaacccagcaggaaaacctagaagagaaaaacattgttcaagatgacaaagaggtgatcttgagctcagaggaggagagtttctttgtccaagtgcatgatgtttctccagagcaacctcgaacagtcatcaaagcaccccgcgtcagcactgcacaggatgtcattcagcagaccttatgcaaagccaaatattcctacagcatcctgagcaaccccaatccaagcgactatgtgcttttggaagaggtggtgaaagacactaccaacaagaagactaccacaccaaagtcctctcagcgggtccttctggatcaggagtgtgtgtttcaagcccaaagcaagtggaaaggtgcaggaaaattcatccttaagctaaaggagcaggtgcaggcatctcgagaagataaaaagaaaggcatttctttcgcaagtgaactcaagaagctcaccaagtcaactaaacagccccgaggacttacatcaccttctcagctcttgacctcagaaagtatccaaaccaaggaggagaaacctgtgggtggcttgtcctccagtgacacaatggattaccgacagtgactaagggcagcatgtttaacccaggtgaagatctttaagcaagaagttaaagagtgaacatggtggaaaaaatataattattttcatcagacttaaactggaaattgatgatttctgaactgaagccttcacacatgtgagatccatgctgaggagaagcaaaatggcacagggctagttgccaccaaccaatttactgatgaatgaagcccaggggactgccattttataaatgtcagcagttggaaaaatcgtcacgaattgacttagagcaagggtcagcaagcttgtctgtaaagggccaaacagtaaatattttagggctgggggccataaaatatgttgcaaccacccaattctgccattgtagtgcaaaagcagccatagacaacacatacatgaacgaacgtggctgtattccaataaaactttatttatggacactg

SEQ ID NO: 4034 - DNA, 600 bp, Homo sapiens
gaaaacctcttatactatcatccaggtgaagagtcgaaaattttaattacagattttggtttggcatactccgggaaaaaaagtggtgactggacaatgaagacactctgtgggaccccagagtacatagctcctgaggttttgctaaggaagccttataccagtgcagtggacatgtgggctcttggtgtgatcacatatgctttacttagcggattcctgccttttgatgatgaaagccagacaaggctttacaggaagattctgaaaggcaaatataattatacaggagagccttggccaagcatttcccacttggcgaaggactttatagacaaactactgattttggaggctggtcatcgcatgtcagctggccaggccctggaccatccctgggtgatcaccatggctgcagggtcttccatgaagaatctccagagggccatatcccgaaacctcatgcagagggcctctccccactctcagagtcctggatctgcacagtcttctaagtcacattattctcacaaatccaggcatatgtggagcaagagaaacttaaggatagtagaatcgccactgtctgcgcttttgtaa

SEQ ID NO: 4035 - DNA, 1400 bp, Homo sapiens
ctgtcttcagccttccccagctaaagagcagaggagggcctgggctacttgggttccccatcggcctccagcactgcctccctcctcccactgcgactctgggatctccaggtgctgcccaaggagttgccttgattacagagaggggagcctccaattcggccaacttggagtcctttctgttttgaagcatgggccagacccggcactgcgctcggagagccggtgggcctggcctccccgtcgacctcagtgcctttttgttttcagagagaaataggagtagggcgagtttgcctgaagctctgctgctggcttctcctgccaggaagtgaacaatggcggcggtgtgggagacaaggccaggagagcccgcgttcagtatgggttgagggtcacagacctccctcccatctgggtgcctgagttttgactccaatcagtgataccagaccacattgacagggaggatcaaattcctgacttacatttgcactggcttcttgtttaggctgaatcctaaaataaattagtcaaaaaattccaacaagtagccaggactgcagagacactccagtgcagagggagaaggacttgtaattttcaaagcagggctggttttccaacccagcctctgagaaaccatttctttgctatcctctgccttcccaagtccctcttgggtcggttcaagcccaagcttgttcgtgtagcttcagaagttccctctctgacccaggctgagtccatactgcccctgatcccagaaggaatgctgacccctcgtcgtatgaactgtgcatagtctccagagcttcaaaggcaacacaagctcgcaactctaagatttttttaaaccacaaaaaccctggttagccatctcatgctcagccttatcacttccctccctttagaaactctctccctgctgtatattaaagggagcaggtggagagtcattttccttcgtcctgcatgtctctaacattaatagaaggcatggctcctgctgcaaccgctgtgaatgctgctgagaacctccctctatggggatggctattttatttttgagaaggaaaaaaaaagtcatgtatatatacacataaaggcatatagctatatataaagagataagggtgtttatgaaatgagaaaattattggacaattcagactttactaaagcacagttagacccaaggcctatgctgaggtctaaacctctgaaaaaagtatagtatcgagtacccgttccctcccagaggtgggagtaactgctggtagtgccttctttggttgtgttgctcagtgtgtaagtgtttgtttccaggatattttctttttaaatgtctttcttatatgggttttaaaaaaaagtaataaaagcctgttgcaaaaatg

SEQ ID NO: 4036 - DNA, 600 bp, Homo sapiens
ctggttggggcagaccggacccaggtttcctgactcctggcccaagtctcttcctcctatcctgcgggatcactggggggctctcagggaacagcagcagtgccatagccaggctctctgctgcccagcgctggggtgaggctgccgttgtcagcgtggaccactaaccagcccgtcttctctctctgctcccacccctgccgccctcaccctgcccttgttgtctctgtctctcacgtctctcttctgctgtctctcctacctgtcttctggctctctctgtacccttcctggtgctgccgtgcccccaggaggagatgaccagtgccttggccacaatgcgcgttgactacgagcagatcaagataaaaaagattgaagatgcatccaaccctctgctgctgaagaggcggaagaaagctcgggccctggaggctgcggctctggcccactgagccaccgcgccctcctgcccacgggaggacaagcaataactctctacaggaatatattttttaaacgaagagacagaactgtccacatctgcctcctctcctcctcagctgcatggagcctggaactgcatcagtgactgaattc

SEQ ID NO: 4037 - DNA, 600 bp, Homo sapiens; identical to SEQ ID NO: 4036

SEQ ID NO: 4038 - DNA, 600 bp, Homo sapiens
cctcactaccacctgctgctcccgtcgtagtaagaagaccacacacctgcccaattctaacctgccagctactcgcctgcgcagcatgcaagagctcagcacgatccacatccagggcagtgagcagccctccctcacaaccagtcgctccagccttaatttgaaagcagacgacggactgagaccaaactgcaaaacatcccagatcaccacagccatcatcagcatccccactcccccagcgctaaccccagagggggaaagtcggccaccccctgccagcccaggccccaacacgaacattccttccatagccagcaatgttgtcaaggtctccgccttgtaaaaccactggacagagggccagagtgggtagtggggaatgaaggggactggcatgttggtgggtggtcactgagaccactccctcccccctttccccactatttctgcctgccccattgtacccctagcactgagacttgtgcctggaaggaaaaagaggtagcaaaggggcacctgaggttcacgctgctagcgtggacatagccctgtgatactgcatctcactggggccagaggaagggagggagggtgggg

SEQ ID NO: 4039 - DNA, 600 bp, Homo sapiens; identical to SEQ ID NO: 4038

SEQ ID NO: 4040 - DNA, 600 bp, Homo sapiens
aacacaacgccttcgggcggatcctgcagcatgaactgaaacccaatggcagaaatgtgccagtcacagaggagaataagaaagaatacgtccggttgtatgtaaactggaggtttatgagaggaatcgaagcccagttcttagctctgcagaaggggttcaatgagctcatccctcaacatctgctgaagccttttgaccagaaggaactggagctgatcataggcggcctggataaaatagacttgaacgactggaagtcgaacacgcggctgaagcactgtgtggccgacagcaacatcgtgcggtggttctggcaagcggtggagacgttcgatgaagaaaggagggccaggctcctgcagtttgtgactgggtccacgcgagtcccgctccaaggcttcaaggctttgcaaggttctacaggcgcggcagggccccggctgttcaccatccacctgatagacgcgaacacagacaaccttccgaaggcccatacctgctttaaccggatcgacattccaccatatgagtcctatgagaagctctacgagaagctgctgacagccgtggaggagacctgcgggtttgctgtggagt

SEQ ID NO: 4041 - DNA, 600 bp, Homo sapiens
agaagtggagagaggaaagagtaaatgtgtcaaatactggcctgatgagtatgctctaaaagaatatggcgtcatgcgtgttaggaacgtcaaagaaagcgccgctcatgactatacgctaagagaacttaaactttcaaaggttggacaagggaatacggagagaacggtctggcaataccactttcggacctggccggaccacggcgtgcccagcgaccctgggggcgtgctggacttcctggaggaggtgcaccataagcaggagagcatcatggatgcagggccggtcgtggtgcactgcaggtgacagctcctgctgcccctctaggccacagcctgtccctgtctcctagcgcccagggcttgcttttacctacccactcctagctctttaactgtaggaagaatttaatatctgtttgaggcatagagcaactgcattgagggacattttgatcccaaggcatatttctcctagaccctacagcactgccattggccatggccatggcaacatgctcagttaaaacagcaaagactaagtcagcattatctctgagtccaccagaagttgtgcattaaacaacttcatcctgg

SEQ ID NO: 4042 - DNA, 600 bp, Homo sapiens; identical to SEQ ID NO: 4041

SEQ ID NO: 4043 - DNA, 600 bp, Homo sapiens
tctgtgcctctccccaggaagcatccagggcagaggaagccacatctcccggtgcccccaaccccagctgcagcctcctccccctgagcattcattctctccaccaggcctccaggtcctgagcccttcctctgtaaaagtgtcacaccacctccctcagcacttccccatcacaacaacctatgtcactgactcagatgcagggtctgctcaccccaacacatgccttccctccccagccacaccgtgcacgaagggggcacaggagaggagaggggctgtgccccaggctccccatttcccagctcctcacagaggcctggtttgctcagtcttctgaactccagggaccagccctggtgggcatggggtggggagcagggagttgcccttcccctccctcgggaagccacctaagaatgtttacatgccaaacagaatgtaacacccctccccaagcccttcccagtcactgcatggcctctgcccatcctgcacctgtccaccccaccccaacaccctggaagccactgtcaatgattagatcgggtctcggaagggaagtagccatcacaccattaaaaagcctgtggacctttt

SEQ ID NO: 4044 - DNA, 600 bp, Homo sapiens; identical to SEQ ID NO: 4043

SEQ ID NO: 4045 - DNA, 1400 bp, Homo sapiens
aactaggccctgggaggagcggggacactgaggacctctctccaaattggcctctcaactcacaggaagacacagctgcccagagcagcccaggccgtggtgaggaggcggaggcatcggcggcggaggctcagggtggggagcaggcctacctggcaggcctggcagggcagtaccacttggagcggtacccggacagttacgagtccatgtccgagccgcccattgctcatcttttgcgccccgtgcttccccgggccttcgccttccccgtggacccccaggtccagtctgccgctgatgagactgctgtgcagctgagcgagttgctgacgctgcccgtgctcatgaagcgctccatcacggcaccgctggccgcccacatctccttggtgaacaaggccgctgtcgactacttcttcgtggagctgcacctggaggcgcactatgaggcactgcggcacttcctgctgatggaggacggcgagttcgcccagtccctcagcgacctgctctttgagaagcttggagctgggcaaacgcccggagagctgctcaacccgctggtgctgaactctgtgctgagcaaggccctgcagtgcagcctgcatggggacaccccgcacgcctccaacctctccctcgctctcaagtacctgcccgaggtgtttgcccccaacgccccggatgtgctgagctgcctggagctcaggtacaaggtggactggcctctcaacattgtcatcaccgagggctgcgtgagcaagtacagcggcgtcttctccttcctgctgcagctgaagctcatgatgtgggcgctcaaggacgtctgcttccacctcaagcgcacagccctgctgagccacatggccggctctgtgcagttccgtcagctgcagctgttcaagcacgagatgcagcatttcgtgaaggtcatccagggctacatcgccaaccagatcctgcacgtcacctggtgcgagttcagggccaggttggccaccgtgggcgacctggaggagatccagcgtgcgcacgcagagtacctgcacaaggccgtcttcaggggcctgctcacggagaaggcggcgcccgtcatgaacgtcatccacagcatcttcagcctcgtgctcaagttccgcagccagctcatctcccaggcctgggggccccctgggggcccgcggggtgcagagcaccccaactttgcactcatgcagcagtcctacaacaccttcaagtactactcccactttctcttcaaagtggtgaccaagctggtgaaccgcggctaccagccccacctggaggactttctgctgcgcatcaacttcaacaactactaccaggacgcctgaggctgctctgcgggggacgtgcacaataaaggtgttctcgga

SEQ ID NO: 4046 - DNA, 600 bp, Homo sapiens
cacaggtggaggaccccctgccccctgtgttctcaggcacaccaaagggcagtggggctggctacggtgttggctttgacctggaggaattcttaaaccagtctttcgacatgggcgtggctgatgggccacaggatggccaggcagattcagcctctctctcagcctccctgcttgctgactggctcgaaggccatggcatgaaccctgccgatattgagtccctgcagcgtgagatccagatggactccccaatgctgctggctgacctgcctgacctccaggacccctgaggcccccagcctgtgccttgctgccacagtagacctagttccaggatccatgggagcattctcaaaggctttagccctggacccagcaggtgaggctcggcttggattattctgcaggttcatctcagacccacctttcagccttaagcagccacctgagccaccaccgagccatggcaggatcgggagaccccaactccccctgaacaatccttttcagtattatatttttattattattatgttattattacactgtctttttgccatcaaaatgaggcctgtgaaatacaaggttcccttctgc

SEQ ID NO: 4047 - DNA, 600 bp, Homo sapiens; identical to SEQ ID NO: 4046

SEQ ID NO: 4048 - DNA, 600 bp, Homo sapiens
ctcaactccctttctagatcccattcattttctgcacctcccccataggcttgtttctctccattgctattaaatgtagaaggccatacctggaattttaaaaatattattcctggtaatacagctcagtgtcattttcctatttttaaaacatgctctacatgcctaatgttttgtgattcactttaacctgatggtttgcatttgctgtttttcactcttatgtcagagcagttgggttttaccccttagtttttatgcctgttaagctttactgtgcttttgacaggtagttttgggtcagttatattcagttttagtattgtattccaagttgataactcttccatgtttcacatttctaaatttaacagagatgctgtagcttaaaacatgttttgataagtaattacactggacctaggcaaaaccactgaagaacaagtgttcctttttaccacatacatattatgttttgatcactgctgcttgagccccgctattggtataattcagatcattttagcttgttgctgaggatgtcacatataagacaggatcaaacctgaaagacactaatggttcatcctctataaggcc

SEQ ID NO: 4049 - DNA, 600 bp, Homo sapiens
cacaaggtcagccctgcgcccaggccctcgtccctgcccatcctgccttccggacccctctacccaggcctctttgacatccgtggctccccaactggaggggcaggaggctcggctgaccccttcgccccagtctttgtgccgccacacccggggatatccggggggctcgggggagccttgtcaggggcctcgcgctccctctcaccgacccgcctgctctcgctgcccccggacaagccgtttggcgctaaacctctggggttctggaccaagttcgacgtggctgattggctggagtggctgggtttggcggagcaccgagcccagttcctggaccacgagatcgatggctcccacctgcccgccttgaccaaggaggactacgtcgatctaggtgtgaccagggtgggccaccgcatgaacatcgaccgggctctcaaattcttcctggagaggtgatggctggcctggacggaccagccccgtccacagaactcttgagcctgctggcctcttgacctctgacccctgactgtcattctctccccgggccagggactctgttcaaactgcgccctgccctcatctcccaaggcc

SEQ ID NO: 4050 - DNA, 600 bp, Homo sapiens; identical to SEQ ID NO: 4049

SEQ ID NO: 4051 - DNA, 1104 bp, Homo sapiens
acccctcaaggagtttgtggaggcctgtttgaataaggagccgagctttagacccactgctaaggagttattgaagcacaagtttatactacgcaatgcaaagaaaacttcctacttgaccgagctcatcgacaggtacaagagatggaaggccgagcagagccatgacgactcgagctccgaggattccgacgcggaaacagatggccaagcctcggggggcagtgattctggggactggatcttcacaatccgagaaaaagatcccaagaatctcgagaatggagctcttcagccatcggacttggacagaaataagatgaaagacatcccgaagaggcctttctctcagtgtttatctacaattatttctcctctgtttgcagagttgaaggagaagagccaggcgtgcggagggaacttggggtccattgaagagctgcgaggggccatctacctagcggaggaggcgtgccctggcatctccgacaccatggtggcccagctcgtgcagcggctccagaggagtatccatgggaaccaagcccctcctgactgccatctggcacaagtgcaggcgtttggaggcagtggatgtgtgctgggaagccgctctgtgtgacctgagggtgatttgtcactgggctgtcctccacacccccaggaggaccaggcgtgctgctgccttgacagttcatcttcaggtgtccaggctgacacctcccaaagctggctgagactctgtgatcatgagggggatttctgggtctttcctgagactgcgtcccacctgacagtacataaagaagttttgcacacgtgaggtcccttttgctatttggaagtgattgaaggggctgcctactgtcctgtgaagagcccctctacgtggggacagcaggagaaaaccacagttctgatacttcacgtttatgcttctgaactcgggtttcttagtaagacatttcaactttttaagttgctagaaaataaaaatgatctacttggctgccttcaattttgaggcaattgaaggacgatccctccctcctttgatactaaaaacaatataggaataaaggaaaatagaattaaaaagtcacc

SEQ ID NO: 4052 - DNA, 600 bp, Homo sapiens
tggctgaatccttgtgtgatatttttttcttcgcttgtttatttattcatttatttaattgtatttattcatttactaactttatgtgttaccaattaattttgtttacccattcctttatccatccctcccctccttttcaggtaaggagacaggaggagtaggaggaggcagggcctctccatgccagcctctgtggtccttgcccaaacccatcagcgcaatacttgaaccttctcccaggtaggggcaggaggagccacatgagagagggagaaggaccgcgtttacctttagagttttgttttgttttttccttctgagtttgctgttggtgcaggaataagggaaaggcccaaggtatccaagcctggggaagggcaggccagccagcacctctgccttctcagggacaagagtagtcctttaccaccctcactctgcctgtcccctctcctactctacagcattaaagactgtgggaccaggaccctaagtctcctttccttctgggtggggagttctggggttcttggtgtgtgggagaagttttataattgcttccaaacagctgggtttaaatataaaatagacacactc

SEQ ID NO: 4053 - DNA, 600 bp, Homo sapiens; identical to SEQ ID NO: 4052

SEQ ID NO: 4054 - DNA, 600 bp, Homo sapiens
ggttgaccactgtggaatgtactggagagactggcttctcagctgaggaatgcatttccatcagtgaagaatcaaccggacctgttgctagcaggcaatctccatttctcagtgacagaagcatgtttgagatgccgtgggaaaccaaatatataataataaaaatataaaaaggtgatgttcaacagaagtgaagacaaaacaatatgcatcaggagaacaagagtaaacccagctcccattctcagtgggctgcagttgcccaaccacaggaagaaagggaaggaggtagagggaagaaacagaagcagtgttccattttcttcctcaccaatgacattcttttcttttctcctttcgtactcctccctgagagtcccctcccttctcccacactcgtttccctttgctcatgactcctgtagggaagtttcttcaaacaaaacccagctcctgagtctccagatgttgttctgtcagttgccaaaggactttgctgaccactgcatggggatccaaccaattcaattaatgtcttcatattgaagaagagatgtaccttcaattgaaaacctcgtttttcttttgtttgcattttct

SEQ ID NO: 4055 - DNA, 600 bp, Homo sapiens; identical to SEQ ID NO: 4054

SEQ ID NO: 4056 - DNA, 600 bp, Homo sapiens
tcaccaccggaagtgccccactcctggttgcgacggctctggccatgtcacaggcaagttcacagctcaccattgcctctcaggctgcccactggctgagaggaaccagagccggctgaaagcggagctgtctgactcggaggcctcagcccgcaagaagaacctctcaggcttctccccaaggaagaagcctcgccatcacggccgaattggacgccctccgaagtatcgaaagattccgcaggaagatttccagacctcacgcccgatgtcgtgcaccagtccctcttcatgtcagccctgtcggcccaccctgaccgctcactctcagtgtgctgggagcagcactgcaagctcctgccaggagtagcgggcatctcagcctcgacagtcgccaagtggaccatcgatgaggtcttcggctttgttcagaccctgacaggttgtgaggaccaagcacgcctcttcaaagacgaggtaaggtgcaagtgcagagtgggagacagagccggggtcactgtccttaagacggcaggaagcaggtgccctccccagcgtcacttctgctaaggagggacccgtgttgccccaccaggcaag

SEQ ID NO: 4057 - DNA, 600 bp, Homo sapiens; identical to SEQ ID NO: 4056

SEQ ID NO: 4058 - DNA, 1017 bp, Homo sapiens
atcctggagctggaggagctcctgcgggcagggaagtcttcttgcagccgtgtggacgaagtttggcccaaccttttcataggagatgcaaacagcatcaagtgtgcggagacaggcggctgaaagccagcagcacgaactgcccgtcagagaagtgcacagcctgggccagatactcccacaggatggactcactgcagaagcaggacctccggaggcccaagatccatggggcagtccaggcatctccctaccagccgcccacattggcttcgctgcagcgcttgctgtgggtccgtcaggctgccacactgaaccatatcgatgaggtctggcccagcctcttcctgggagatgcgtacgcagcccgggacaagagcaagctgatccagctgggaatcacccacgttgtgaatgccgctgcaggcaagttccaggtggacacaggtgccaaattctaccgtggaatgtccctggagtactatggcatcgaggcggacgacaaccccttcttcgacctcagtgtctactttctgcctgttgctcgatacatccgagctgccctcagtgttccccaaggccgcgtgctggtacactgtgccatgggggtaagccgctctgccacacttgtcctggccttcctcatgatctgtgagaacatgacgctggtagaggccatccagacggtgcaggcccaccgcaatatctgccctaactcaggcttcctccggcagctccaggttctggacaaccgactggggcgggagacggggcggttctgatctggcaggcagccaggatccctgacccttggcccaaccccaccagcctggccctgggaacagcaggctctgctgtttctagtgaccctgagatgtaaacagcaagtgggggctgaggcagaggcagggatagctgggtggtgacctcttagcgggtggatttccctgacccaattcagagattctttatgcaaaagtgagttcagtccatctctataataaaatattcatcgtc

SEQ ID NO: 4059 - DNA, 440 bp, Homo sapiens
ggaaagccagcagcacagccaaggtgcctgccagccccctgcccggtctggagaggaagaagaccaccccaaccccctccacggaacagcgtcctctccaccagcacaaatcgaagcaggaattccccacttttggagcgggccagcctcggccaggcctccatccagaatggcaaagacagcacagccccccagcgtgtccctgttgcctccccatccgcccacaacatcagcagcagtggtggagccccagaccgaactaacttcccccggggtgtgtccagccgaagcaccttccatgctgggcagctccgacaggtgcgggaccagcagaatttgccctacggtgtgaccccagcctctccctctggccacagccagggccggcggggggcctctgggagcatcttcagcaagttcacctccaagtttgtacgcag

SEQ ID NO: 4060 - DNA, 440 bp, Homo sapiens; identical to SEQ ID NO: 4059

SEQ ID NO: 4061 - DNA, 1400 bp, Homo sapiens
gagaagatggacgttgagcaaaaaatgagcatccggatcctgaagtgactccgtttgtgccttgggcttgctcctgcaaccagtatctccttggaattcatccaaagcccccatggacgcatggacgcagggcgacaataaactgtattttcgtttctaactctatttagggccaagagaagaaagctggaaggatgtgtactaaagtctagctcagcagtccccaacctttttggcatcagggacagtttttccacggatgggtgacaggggatggttttgggatgattcaagtgcattacatttattgtgcactttatttctattatgattacattgtaatatataatgaaataattatacaactcaccataatgtagaatcagcaggagccctgagcttgttttcctgcaattagacggtcccatatgggagtgatgggagacagtgacagatcatcaggcattagattctcataaggagtgcacaatctagatcctttggtgtgcagttcacagtaggatttgggctcctatgataatctaatgccactgctgatctgacaggaggcagagctcaggcggtaatgcaagcaatggggagtggctgtaaatatagatgaagcttcagctcgcctgccgctcaccttgtgctgtgcagcccggttcctaacagaccacagaccccacaccaggtctatctcatttggtctcagagctgtgaatcagccagcaatattttagttgcaaatcactgaaaacccaactcaaagtgacttaagtcagaaagaaattttatgaattcaggtaattaaaaagtccagaagtatctgcctttaggcacagctggatccaagggcacaaatgatgtcatcaggctccagttattctccatctcccagctcagctttttctgtctgtaagcctgattttcaggaaggctctttcctagtgatggagatgaccaccatcagctccaggcttctatcctgctaacccagtaacccagtgggaagagatttacttattccaataattccaagtggagagtgtcattgacccgtttggggtctcatctctacttctaggggaatgaaacactctgagtggccaggcctgtgtcatgtgctaattcctagagccagggaaataaggtctgaggattcaggatggggtgaaaggtggttgcttaaaggaaaatgaaatacaattagcagaataaggggaaacgagtggtctgctctgctcgggcaaaacaagagatgcccattactgtgagggacccttgaagtctggactcttaaatgggtttttgctgatttcctgggtgcatgctaggatgatggggcttgatgcagtagggaagagacgatgtaaaaataataaacaatatataccttc

SEQ ID NO: 4062 - DNA, 600 bp, Homo sapiens
cagatcccgggcagccgcgaattcgacgtgagcttccgctcagcggagaagctggccctgttcctacgcgtctacgaggagaagcgggagcaggaggactgctgggagaactttgtggtgctggggcggagcaagtccagcttgaagacgctcttcatcctcttccggaacgagacggtggacgtggaggacattgtgacttggctcaagcgccactgcgacgtgctggccgtgccggtgaaagtgaccgacaggtttgggatctggaccggggagtacaaatgcgagatcgagctgcgccagggggagggcggggtcaggcacttgccaggggccttcttcctgggggccgagaggggctacagctggtacaaggggcagcccaagacatgctttaaatgtggttcccggacccacatgagcggcagctgcacgcaggacaggtgcttcaggtgcggggaggaggggcacctgagcccttactgccggaagggcatcgtgtgcaacctctgtggcaagcgaggacacgcctttgcccagtgtcccaaagcagtgcacaattccgtggcagctcagctaaccggcgtggccgggcactaa

SEQ ID NO: 4063 - DNA, 600 bp, Homo sapiens; identical to SEQ ID NO: 4062

SEQ ID NO: 4064 - DNA, 1400 bp, Homo sapiens
ttggcatggaccctgcccggcctgaccaagccagcactgtggccgtcaagatgctcaaagacaacgcctctgacaaggacctggccgacctggtctcggagatggaggtgatgaagctgatcggccgacacaagaacatcatcaacctgcttggtgtctgcacccaggaagggcccctgtacgtgatcgtggagtgcgccgccaagggaaacctgcgggagttcctgcgggcccggcgccccccaggccccgacctcagccccgacggtcctcggagcagtgaggggccgctctccttcccagtcctggtctcctgcgcctaccaggtggcccgaggcatgcagtatctggagtcccggaagtgtatccaccgggacctggctgcccgcaatgtgctggtgactgaggacaatgtgatgaagattgctgactttgggctggcccgcggcgtccaccacattgactactataagaaaaccagcaacggccgcctgcctgtgaagtggatggcgcccgaggccttgtttgaccgggtgtacacacaccagagtgacgtgtggtcttttgggatcctgctatgggagatcttcaccctcgggggctccccgtatcctggcatcccggtggaggagctgttctcgctgctgcgggagggacatcggatggaccgacccccacactgccccccagagctgtacgggctgatgcgtgagtgctggcacgcagcgccctcccagaggcctaccttcaagcagctggtggaggcgctggacaaggtcctgctggccgtctctgaggagtacctcgacctccgcctgaccttcggaccctattccccctctggtggggacgccagcagcacctgctcctccagcgattctgtcttcagccacgaccccctgccattgggatccagctccttccccttcgggtctggggtgcagacatgagcaaggctcaaggctgtgcaggcacataggctggtggccttgggccttggggctcagccacagcctgacacagtgctcgaccttgatagcatggggcccctggcccagagttgctgtgccgtgtccaagggccgtgcccttgcccttggagctgccgtgcctgtgtcctgatggcccaaatgtcagggttctgctcggcttcttggaccttggcgcttagtccccatcccgggtttggctgagcctggctggagagctgctatgctaaacctcctgcctcccaataccagcaggaggttctgggcctctgaaccccctttccccacacctccccctgctgctgctgccccagcgtcttgacgggagcattggcccctgagcccagagaagctggaagcctgccgaaaacaggagcaaatggcgttttataaattatttttttgaaataaa

SEQ ID NO: 4065 - DNA, 1400 bp, Homo sapiens
ccgcgcagagagtgagctcagggagcctgagcttcagggctactcggcctacagtgtgtctgcctgccggctgcgctgtgaaaaggaggccgtgcttcagcgctgccactgccggatggtgcacatgccagactccctgggtgggggccctgagggcccgtgcttctgccccaccccctgcaacctgacacgctatgggaaagagatctccatggtcaggatccccaacaggggctcagcccggtacctggcgaggaagtacaaccgcaacgagacctacatacgggagaacttcctggtcctagatgtcttctttgaggccctgacctctgaagccatggagcagcgagcagcctatggcctgtcagccctgctgggagacctcgggggacagatgggcctgttcattggggccagcatcctcacgttgctggagatcctcgactacatctatgaggtgtcctgggatcgactgaagcgggtatggaggcgtcccaagacccccctgcggacctccactgggggcatctccactttggggcttcaggagctgaaggaacagagtccctgcccgagccggggccgagtggagggtgggggggtcagcagtctgctccccaatcaccaccacccccacggtcccccaggaggtctctttgaagattttgcttgctaggacggtgctgtgactgaaaggacccaggagtctgggacccctcctgggatccccagcacattctcctgctcctgggagaggcctgggggcggtgctcactgggagggccaggactcagttcctgctctcatcctcccctgccctgatgtcagctgctttgcacaaaggtccttcttgtccacaccccttatccccaggctggtgccccgggagggctggagaccaggccatgggccctcacggagaggaagggaaggaaggagagggagggggaggatagagcccatcccagccggggagggggagccctctgtacatttgtaaatatttagggaaagccgggtggggggaggggatacagatgtagaaggtgggtagggctacaggggtgggtgatttagggacagccagggtcccagccccaatgtcagcaggatagggagagccccaggactcaggagtgctgggctggtcctacttcctgcccctctccaggcccagctcccctcttggcagggggagaggatggcccagcaggcctggcccagctcccagttccccctgcaccagccccacccctagagtcccttctatagggagggggcaggagaccttccagacttcggctgagcttggagggtgggaagggagccttctcagtcctctctccctccagtctgattttataaagtgctgacgagattgggaataaagaggcataaag

SEQ ID NO: 4066 - DNA, 600 bp, Homo sapiens
gcgggccgggcctccgccaccgcgtggtcctttgcaagagcgcagaccaccgcgccacgctgcccccggcgcactgctcacccgccgccaagccaccggccaccatgcgctgcaacttgcgccgctgccccccggcccgctgggtggctggcgagtggggtgagtgctctgcacagtgcggcgtcgggcagcggcagcgctcggtgcgctgcaccagccacacgggccaggcgtcgcacgagtgcacggaggccctgcggccgcccaccacgcagcagtgtgaggccaagtgcgacagcccaacccccggggacggccctgaagagtgcaaggatgtgaacaaggtcgcctactgccccctggtgctcaaatttcagttctgcagccgagcctacttccgccagatgtgctgcaaaacctgccatggccactagggggcgcgcggcacccggagccacagctggcggggtctccgccgccagccctgcagcgggccggccagagggggccccgggggggcgggaactgggagggaagggtgagacggagccggaagttatttattgggaacccctgcagggccctggctggggggatgga

SEQ ID NO: 4067 - DNA, 600 bp, Homo sapiens
agctcagaggcaaggtaataaagcacttcagggcttgctccccaagtgggcctgatttagcaggtggtcctgcgggcgtccaggtcagcaccttcctgtagggcactggggctagggtcacagcccctaactcataaagcaatcaaagaaccattagaaagggctcattaagccttttggacacaggaccccagagaggaaaaagtgacttgcccaaggtcgtaagcaagctactggcatggcaagagcccagcttcctgacggagcgcaacatttctccactgcactgtgctagcagctcagcagggcctctaacctgtgatgtcacactcaagaggccttggcagctcctagccatagagcttcctttccagaacccttccactgcccaatgtggagacgggttagtggggctttctatggagccatctgctttggggacctagacctcaggtggtctcttggtgttagtgatgctggagaagagaatattactggtttctacttttctataaaggcatttctctatatacatgttttatatacctcattctgacacctgcatatagtgtgggaaattgctctgcatttgacttaatt

SEQ ID NO: 4068 - DNA, 600 bp, Homo sapiens; identical to SEQ ID NO: 4067

SEQ ID NO: 4069 - DNA, 1400 bp, Homo sapiens
ttcctcccatcatacaagtttgacatcgggaaggacacgtacgacagcacctccaagcagaggacgccctcatacacggaccgcgtcttgtacagaagccgccacaagggtgacatctgtcctgtgagctactcttcctgccccgggatcaagacgtccgaccaccgccctgtgtatggcctcttccgggtgaaagtgaggccggggcgagacaacattccgttggcagctggcaaatttgatagagaactgtacttactaggaattaaaagacggatttcgaaggagattcagaggcagcaagcactacagagtcagaactccagcaccatctgctccgtttcttgaagtttgctgaacgaggactcacagctgcaacgtggggtgattgtattgatcaaaacccactgggaaggacaaagagtttgccgcctttcggggatccgagggactgtggcgaccgtgcctctgtgccagcgtcccaggaaggaagccaaccctgagcgagcctgtcctctgtggcaggtccacacggtgtgggtgggcagggcttggacccccgtctccatggcaggtccatacagcatgggtggcagggtttggacccgcccagcagcaccacggaccccagccactctcgggggcagacgtcagaatccgttcctgagcagctcctgtgccctgggggcagtcacagagccccccaacacccccgtgctctgcaccagcctctccctccacacccgaagcaggcgtccatctgtgtcctcctggcagcccctcaaacacacaccaccccatgtcacacgggtatccagagcaaggctggatctgggctaggtgacccctggggcctcagacctctgagtgggccccagagcccagctgaggaagccacacagcctccaggacgtggcacggttcccctccacttggctgcaagtcgcctgccatggggcgaggaggcctgcaccccagtataagggcctccccagctgagtaagaagctgcttcccctcctctcataggccaagcctattgtgtgaaaccatctcatggtcttggtgacgtagaccatttttgaaaccgtctcatggtcttggtgacgtagaccgtttgcttctttaactccagccgcggaatgacattagtggaaccgggctagggaactgctggaagttcaggatgccaccaccttgaacacctaggccagggatccccaccatgtcccgggtttctttcttcgagagtatagaaccgttcattcttgctttgtgtcccattccatctcttgaaaaaatgtagtctttgaatgtgtgaaaatctagggacattcaatctagtcttttaaattatttttccatatttatatttttaaataaatgcatatattgagtctt

SEQ ID NO: 4070 - DNA, 1394 bp, Homo sapiens
gtcactgggctgcagtccatcaacactcaccagaccaatctgaactggaccaatgttcatgccatcaacttgacgctggtgaatgtgacgagtgaggacaatggcttcaccctgacgtgcattgcagagaacgtggtgggcatgagcaatgccagtgttgccctcactgtctactatcccccacgtgtggtgagcctggaggagcctgagctgcgcctggagcactgcatcgagtttgtggtgcgtggcaaccccccaccaacgctgcactggctgcacaatgggcagcctctgcgggagtccaagatcatccatgtggaatactaccaagagggagagatttccgagggctgcctgctcttcaacaagcccacccactacaacaatggcaactataccctcattgccaaaaacccactgggcacagccaaccagaccatcaatggccacttcctcaaggagccctttccagagagcacggataactttatcttgtttgacgaagtgagtcccacacctcctatcactgtgacccacaaaccagaagaagacacttttggggtatccatagcagttggacttgctgcttttgcctgtgtcctgttggtggttctcttcgtcatgatcaacaaatatggtcgacggtccaaatttggaatgaagggtcccgtggctgtcatcagtggtgaggaggactcagccagcccactgcaccacatcaaccacggcatcaccacgccctcgtcactggatgccgggcccgacactgtggtcattggcatgactcgcatccctgtcattgagaacccccagtacttccgtcagggacacaactgccacaagccggacacgtgggtcttttcaaacatagacaatcatgggatattaaacttgaaggacaatagagatcatctagtcccatcaactcactatatatatgaggaacctgaggtccagagtggggaagtgtcttacccaaggtcacatggtttcagagaaattatgttgaatccaataagccttcccggacattccaagcctcttaaccatggcatctatgttgaggatgtcaatgtttatttcagcaaaggacgtcatggcttttaaaaactccttttaagcctccttgttttgatgtcaccttggtaggctgggccctctgagaggttggaagctctaggcattgttctctttggatccagggatgctaagtagaaactgcatgagccaccagtgccccggcaccctttaacaccaccagatgggtgttttcccccatccaccactggcagggttgccccttccctccaatcatcactgtgctccttttttcccggcctacgaggcagctcctgccactatctttagagccaataaagagaattaaaaacctg

SEQ ID NO: 4071 - DNA, 1394 bp, Homo sapiens; identical to SEQ ID NO: 4070

SEQ ID NO: 4072 - DNA, 600 bp, Homo sapiens
atatgccagccattaataaaaggacgatctgcccctggaagattaaaccagccttctgcagtgggtactcgtcagcaaaaattgacatcagcattccagcagcagcatttgaacttcagtcaggttcagcactttggatctgggcatcaagagtggaatggaaactttgggcacagaagacagcaagcttatattcctactagtgttaccagtaatccattcactctttctcatggaagtcccaatcacacagcagtgcatgcccacctggctggaaatacacacctcggaggacagcctactctacttccatacccatcatcagccaccctcagtagtgctgcaccagtggcccacctgttagcctctccgtgtacctcaagacctatgttacagcatccaacttataatatctcccatcccagtggcatagttcaccaagtcccagtgggcttaaatccccgtctgttaccatccccaaccattcatcagactcagtacaaaccaatcttcccaccacattcttacattgcagcatcacctgcatatactggatttccactgagtccaacaaaactcagccagtatccatatatgtga

SEQ ID NO: 4073 - DNA, 1400 bp, Homo sapiens
ctcatcacaaagcacccagaccggtttgcgtaccctattccacatacaaccagacctccaaagaaagacgaagaaaatggaaagaattattactttgtatctcatgaccaaatgatgcaagacatctctaataacgagtacttggagtacggcagccacgaggatgcgatgtatgggacaaaactggagaccatccggaagatccacgagcaggggctgattgcaatactggacgtggagcctcaggcactgaaggtcctgagaactgcagagtttgctccttttgttgttttcattgctgcaccaactattactccaggtttaaatgaggatgaatctcttcagcgtctgcagaaggagtctgacatcttacagagaacatatgcacactacttcgatctcacaattatcaacaatgaaattgatgagacaatcagacatctggaggaagctgttgagctcgtgtgcacagccccacagtgggtccctgtctcctgggtctattaggcctctccccagatatctgagcataactgggagcacctcatttgtggaaaagcctctttgttatcggccttgtgtcagcaggtcatggtccctagagactacctagttgtagtgtgacctacatttataattattgtcatgtccgaatagataggaggagaaaaacaattacacactaatttaaagagacagtatcttttttaatcagttctcctaaactttaataaaatgtatctttaaatgtatgtattattcaatcctttggaatgttatatttttggaaatcatagctttttatttccaaggcccctaaaaactgcacaaaatagatgctgctttctataatctattttaataataataaacaatgattctgttaccttgactgggggtggaacactacattctttttagagtctgattttatggattggaatattgggatatctttctttcctttatttatttgaaataattagtgtagtgattacaaaacagtcataaatttttaaaggccttttttctctctttttttttttttagaatagtatttttttttaagtcctttatgtaacatccagataatgtgatactgtctctttgaagcaccctgtaaaccttttagagatttgaagttgggtcttgactcttaatgcatgtggacagtcgcgagcgtttatgctgtcggtgtgtctgtgttggacaaaacaatctgtaatctacagcaaagtacattctacattccgttcatggggcacacccaggggaataagaataaaatgctattatgactaagttgtaaacctatgcacatcccttgcattttgggcaactttataaaaaaaaagaaactgatttttattaataataatcatgtagtgaaatgtgtttgt

SEQ ID NO: 4074 - DNA, 600 bp, Homo sapiens
ttgggatgtatagcaacattaaatttggtttgttttgctatgtacagtctgactaataactgctaatttgtgatccaacatgtacagtatgtatatagtgacatagcttaccagtagacctttaatggagacatgcatttgctaactcatggaactgcagacagaaagcactccatgcgaaaacagccattgccttttttaaagatttaccctaggacctgatttaaagtgaatttcaaatgacctgattaatttcctattcttccaaatgagatgaaaatggggatcctgtacaaccctttgtggacccttttggtttagctcttaagtaggggtattttctactgttgcttaattatgatggaagataacattgtcattcctagatgaatcctttgaagtaacaaacattgtatctgacatcagctctgttcatgagtgctcagagtccctgctaatgtaattggaagcttggtacacataagaaaaactagagatttgaaatcagctatgaattactctatatagtatctatagccatgtacatattacagcatgacaagctcaaataattatgagtcagcccgaaaggatgttaat

SEQ ID NO: 4075 - DNA, 600 bp, Homo sapiens; identical to SEQ ID NO: 4074

SEQ ID NO: 4076 - DNA, 600 bp, Homo sapiens
tctgccctttagaatggcttgtcccatcagcagatgaatgtgttaagcacaaagcatcttccttaaagcacaaagagagggactaactgatgctgcatctagaaaacacctttaagttgcctttcctctttgtagttagcgttcaggcaggtgacgtgtggaaagtctagggggttccattctggccatgcgagcccagctcctaccaacgtcggtaacttgagcagtccctgttgctggccagagactgcctggtcgccagcgctcaccatgggtgccaggatgcttcgcagaggcactgtgctcacggttggacttggtgtcagtgggaaagggcagtgtggggactgtcatttttgtgatttaataacacacagtgaaaatccaggaagaatgaattaagcttcttctgggagttgtttattcctgctcgtgcttaagattgatgatttcgtgaaataaagaacatcatttcatttaagagatcatttcattaagatctctaatctgttttgagtctttacaaaatagccagttataaaatggggcttgatttgtttagactgaaggaagacgttttcccaaaatatactacagaag

SEQ ID NO: 4077 - DNA, 600 bp, Homo sapiens; identical to SEQ ID NO: 4076

SEQ ID NO: 4078 - DNA, 1400 bp, Homo sapiens
cgaagtgatggtggtcataccgtattgcatcgggatctgaaaccagccaatgttttcctggatggcaagcaaaacgtcaagcttggagactttgggctagctagaatattaaaccacgacacgagttttgcaaaaacatttgttggcacaccttattacatgtctcctgaacaaatgaatcgcatgtcctacaatgagaaatcagatatctggtcattgggctgcttgctgtatgagttatgtgcattaatgcctccatttacagcttttagccagaaagaactcgctgggaaaatcagagaaggcaaattcaggcgaattccataccgttactctgatgaattgaatgaaattattacgaggatgttaaacttaaaggattaccatcgaccttctgttgaagaaattcttgagaaccctttaatagcagatttggttgcagacgagcaaagaagaaatcttgagagaagagggcgacaattaggagagccagaaaaatcgcaggattccagccctgtattgagtgagctgaaactgaaggaaattcagttacaggagcgagagcgagctctcaaagcaagagaagaaagattggagcagaaagaacaggagctttgtgttcgtgagagactagcagaggacaaactggctagagcagaaaatctgttgaagaactacagcttgctaaaggaacggaagttcctgtctctggcaagtaatccaggtatgagaatcaacttggtcaacagaagctggtgctacaaatgaagaaatgtgcaccagtgttgctcccaaagtggcttaggtagcccttttcatttacaaatctcaaattttaagatggatttcattgaatatatgcatttcaatggaaacaaaattctgttatagcagtgatttatttcctgggttcatagacctgaggcaatgagtcatagaatttcatgtttgattttctttaccttatcaaactacatgtttagtaattgatacttatttttattatcattatttatttttttattttttttgagatggagtctcactctgtagcccaggctggagtgcagtggcacaatctcggctcactgcaagctctgcctcccgggttcacgccattcttctgcctcagcctcccaagtagctgggactacagacacccgccaccaagcccggctaatttttgtatttttagtagagacggggtttcaccgtgttagccaggatggtctcgatttcctgacctcgtgatccgcctgcctcggcctcccaatgtgctgggattacaggcatgagacaccgtgcccagccgatacttatttttaaaaattagggcatttacaaaactattgtatgtttcagatttcagagagataaactgcatttcaagtaaaaataaa

SEQ ID NO: 4079 - DNA, 1400 bp, Homo sapiens; identical to SEQ ID NO: 4078

SEQ ID NO: 4080 - DNA, 600 bp, Homo sapiens
ctggaaccccttccgctccaagctagcagcagcaatcctgggtggtgtggaccagatccacatcaaaccgggggctaaggttctctacctcggggctgcctcgggcaccacggtctcccatgtctctgacatcgttggtccggatggtctagtctatgcagtcgagttctcccaccgctctggccgtgacctcattaacttggccaagaagaggaccaacatcattcctgtgatcgaggatgctcgacacccacacaaataccgcatgctcatcgcaatggtggatgtgatctttgctgatgtggcccagccagaccagacccggattgtggccctgaatgcccacaccttcctgcgtaatggaggacactttgtgatttccattaaggccaactgcattgactccacagcctcagccgaggccgtgtttgcctccgaagtgaaaaagatgcaacaggagaacatgaagccgcaggagcagttgacccttgagccatatgaaagagaccatgccgtggtcgtgggagtgtacaggccaccccccaaggtgaagaactgaagttcagcgctgtcaggattgcgagagatgtgtgttgatac

SEQ ID NO: 4081 - DNA, 600 bp, Homo sapiens
gctgtgcttctcccgcttctccgtctcgcctgcgctggagaccccggggccacccgcccgggcccccgacgcccggcccgcaggccccgtggagaattgattccccgaagacccgaccccgctgcaccctcagaagaggggttgagaatggaatcctctgtggatgacggcgccactgccaccaccgcagacgccgcctctggggaggcccccgaggctgggccctccccctcccactcccctaccatgtgccaaacgggaggccccgggcccccgccccccagccccccagatggctcccctgacccccctgaccccctcggagccaaatgaggcaggaatccccccgcccctccatagagagccgcctttctcggaactgaactgaactcttttgggcctggagcccctcgacacagcggaggtccctcctcacccactcctggcccaagacaggggccgcaggcttcggggacccggaccccccatttcgcgtctcccctttccctccccagcccggcccctggaggggcctctggttcaaaccttcgcgtggcattttcacattatttaaaaaagacaaaaacaactttttggagg

SEQ ID NO: 4082 - DNA, 600 bp, Homo sapiens; identical to SEQ ID NO: 4081

SEQ ID NO: 4083 - DNA, 600 bp, Homo sapiens
ggaacgtttggggtttcctagccgctacatctgttacttttgttggtgttatgggaatgagatcctactactatggaaaattcatgcctgtaggtttaattgcaggtgccagtttgctgatggccgccaaagttggagttcgtatgttgatgacatctgattagcagaagtcatgttccagcttggactcatgaaggattaaaaatctgcatcttccactattttcaatgtattaagagaaataagtgcagcatttttgcatctgacattttacctaaaaaaaaaaagacaccaaatttggcggaggggtggaaaatcagttgttaccattataaccctacagaggtggtgagcatgtaacatgagcttattgagaccatcatagagatcgattcttgtatattgattttatctctttctgtatctataggtaaatctcaagggtaaaatgttaggtgttgacattgagaaccctgaaaccccattccctgctcagaggaacagtgtgaaaaaaaatctcttgagagatttagaatatcttttcttttgctcatcttagaccacagactgactttgaaattatgttaagtgaaatatcaa

SEQ ID NO: 4084 - DNA, 600 bp, Homo sapiens; identical to SEQ ID NO: 4083

SEQ ID NO: 4085 - DNA, 1009 bp, Homo sapiens
gagactcggccatgctacgcgcgctgagccgcctgggcgcggggaccccgtgcaggccccgggcccctctggtgctgccagcgcgcggccgcaagacccgccacgacccgctggccaaatccaagatcgagcgagtgaacatgccgcccgcggtggaccctgcggagttcttcgtgctgatggagcgttaccagcactaccgccagaccgtgcgcgccctcaggatggagttcgtgtccgaggtgcagaggaaggtgcacgaggcccgagccggggttctggcggagcgcaaggccctgaaggacgccgccgagcaccgcgagctgatggcctggaaccaggcggagaaccggcggctgcacgagctgcggatagcgaggctgcggcaggaggagcgggagcaggagcagcggcaggcgttggagcaggcccgcaaggccgaagaggtgcaggcctgggcgcagcgcaaggagcgggaagtgctgcagctgcaggaagaggtgaaaaacttcatcacccgagagaacctggaggcacgggtggaagcagcattggactcccggaagaactacaactgggccatcaccagagaggggctggtggtcaggccacaacgcagggactcctaggggcccagtaaggacagtgcccgccagggaccatgtatgtatcatggcggaagagttggccctgacctggaataaagcagttggtgttgcttatgaggaaggttcagccttatccagcacagccttcacgttttgccctctgctgtcaccacttggtcagaaacttccaaacgcagtgccctgttctgccggtgtgtacagcctcagcgcaccaggagaccctagagtggtttccatctcacagagaatcagacagggccacagccccctcaggcagccaggtcatctgagtatcattaagagtagtgatgggaagattacagtctgagggccaaacgtgcctgcttcctgtttttgtaaataaagttttgttggaacac

SEQ ID NO: 4086 - DNA, 600 bp, Homo sapiens
ggagctgctggttgactgttacaaacccacagaggccttcatctctggcctgctggacaagatccgggccatgcagaagctgagcacaccccagaagaagtgagggtccccgacccaggcgaacggtggctcccataggacaatcgctaccccccgacctcgtagcaacagcaataccgggggaccctgcggccaggcctggttccatgagcagggctcctcgtgcccctggcccaggggtctcttcccctgccccctcagttttccacttttggatttttttattgttattaaactgatgggactttgtgtttttatattgactctgcggcacgggccctttaataaagcgaggtagggtacgcctttggtgcagctcaaaaaaaaaaaaaaaaatgatttccagcggtccacattagagttgaaattttctggtgggagaatctataccttgttcctttataggccaaggaccgcagtccttcagtaacaccagtgtaaaagcttgaggagaaattgtgaagctacacagtatttgttttctaatacctcttgtcattctaaatatctttaatttattaaaaaatatatatatacagt

SEQ ID NO: 4087 - DNA, 1400 bp, Homo sapiens
tcacaagacctcatccacctctgcacattggctggcactgtcacactgcagcctccgatctgctggagtacagaccacagcaccacgtctgctacggtgagttcattcccagcgagccaagggctcttcccaagagcagagttcatggagcggaaaacagcggctttttctttactgcttccctcttttaactgaaaaatcgcaatatctacccagctatctataagggttgcgttgacagcattatgcttctggccaaacagagagaacaagaaacgtgcaatgttcccttcgccttcgatggggcacatcgtctggatgctgaatttcatctgcgtcttcggcactgaaaagaaaaaacacgccaggtagcatcaccagagcagccctgagggaagtactcgcacagtggggaaggggacagtcaccaaacaccacagactgatgacatgggaaagggtgttttcaagaagaacatcacattttcagtctgtctctaagatgcttactactgaaaagggtttaagtgcaaactatgttaaaaaagtaaccaaagagtcattcctggtatttgattatgacacttctgaagctagaagggacctcagaccacctgctccaatccctgctgcctaaggttttgggggctgagggctggaaacccaggagctgcatctcccaggctcttggcctcataatcgccttctgtgagactgagggcaattaagatatgaatgacatgaactcgcttatctccatatcaacataaaccagaagaggcatacatctgtgggatagtcaatacataacatcctatctttatatggccatatgagaagataacttcagtgtccctatgatggtaagttcttgaatgtgagggcaagatggctgtgatagccatgactccccgctttgcctggttggacagaacccccttccccaaatgctcacagtcccccccttgagctgtgtctcactcagagaccctaaattttgcagacgaacaagggcatctttgcgttgcttcatctctgctcctcctctagaactatcccacaggctttctagacttagaatatctgacctgatgcaaatcgctatgtggccagtatgccacagaatgtcctaaacccttgctgcctcttatcaaaaccatgttgcacatctcatcatatagtacagctaacccttgaacagtgggggggttagggacactgacccccgactgctgtgcagtcgaaaatccacataaaacttctgactccttcaaaacttaagcactaatagcctactattcatgggaagccttacccatcacagttgattaacacgttttgtatggtctgtatattatatgctatattcttacaataaacttgagaaaatgttaagaaaat

SEQ ID NO: 4088 - DNA, 1247 bp, Homo sapiens
  misc_feature (354)..(673): n is a, c, g, or t
gggatttggggggctcctgggcagagtgcgaagctccggagccgaggccactggatccccagtgactgctcgggggggtcccgctgcgtggagatgccggcagcacgtcggttccctggcctggagctctccttccctctcctggccagactgcggcgacgcctgtacacagaggctgggaggcggcagaatgcagccagaggagggcacaggctggctgctggagctgctgtccgaggtgcagctgcaacagtacttcctgcggctccgagatgacctcaacgtcacccgcctgtcccactttgagtacgtcaagaatgaggacctggagaagatcggcatgggtcggcctgnnnnnnnnnnnnnnnnnnnnnnnnnnnnnnnnnnnnnnnnnnnnnnnnnnnnnnnnnnnnnnnnnnnnnnnnnnnnnnnnnnnnnnnnnnnnnnnnnnnnnnnnnnnnnnnnnnnnnnnnnnnnnnnnnnnnnnnnnnnnnnnnnnnnnnnnnnnnnnnnnnnnnnnnnnnnnnnnnnnnnnnnnnnnnnnnnnnnnnnnnnnnnnnnnnnnnnnnnnnnnnnnnnnnnnnnnnnnnnnnnnnnnnnnnnnnnnnnnnnnnnnnnnnnnnnnnnnnnnnnnnnnnnnnnnnnnnnnnnnnnnnnnnnnnnnnnnnnnnnncccgatgtcctgagccagccagaagccatggacgacttcatccgggaggtcaatgccatgcactcgctcgaccaccgaaacctcatccgcctctacggggtggtgctcacgccgcccatgaagatggtgacagagctggcacctctgggatcgttgttggaccggctacgtaagcaccagggccacttcctcctggggactctgagccgctacgctgtgcaggtggctgagggcatgggctacctggagtccaagcgctttattcaccgtgacctggctgcccgcaatctgctgttggctacccgcgacctggtcaagatcggggactttgggctgatgcgagcactacctcagaatgacgaccattacgtcatgcaggaacatcgcaaggtgcccttcgcctggtgtgcccccgagagcctgaagccgccctggagggacatcagtgcttcctcttccacccaattcccccacgcggttccatgttttcccaccagcctgttggcgaagttgctgctccggcattcagtacctgcttcttccagagaaataaagttagtttctattttatgtt

SEQ ID NO: 4089 - DNA, 600 bp, Homo sapiens
cagtgcccctcacctggctagcccaccagccacgcccaaggccgacaaggagccactggaaatggcccggccccctggcccaccccgtggccctgctgcagccgctgctggctatggctgcccactccttagtgacttgaccctgtcccccgtgccgagggactcgctgctgcccctgcaggacaccgcctacaggtacccaggctttatgccccaggcgcatcctggcctgggtgggggccccaagagcggcttcctggggcccatggcggaacctcaccccgaggacacattcaccgtcacatccctgtagtgccaactgaagtgccgactggaccgcgaggttttgttcctggctttcagaaaaccaacgccaagatccctcccagcgtccacatcgtcctctggcaggagctcctgcccctctgcctcccaccctgccccctacaccccctgcagacccatctccctccaccccctcccacccatctcctccacgcagaagccgaaggtgagccctttctgcacaaaaccagcaattgtaaatactttttaaaaatgtacaaaacttaaaaacaaaacacagttttagaaaaagac

SEQ ID NO: 4090 - DNA, 1400 bp, Homo sapiens
gtctccgtcagggtttgcctgtcgcacctgaggtgcttcgagctcagacagggactcagcctcctgaggccctccgagtgccctcgcgatgccaggctctgctggcttctgctgggcactttgcccaaggtcgtctccctgtgcggggacgtgggtgagggggcccctgacgttctgagtcggcgaagggtccgctgcagcggggcggctggcggggcccgcggagagcctcccccgagcgggacctctgggcggcgtcttcctgcatctccgcctctggcttcgcgccggcgctctgttggtgaaattcttccccctcctactcctctaccccctcacctacctggctcccagcgtctccaccctctggctccacctgcttctgaaagccaccgagacctcaggcccaacctacatcaaactgggccagtgggccagcacccggcgcgatctgttttcggaggctttctgtgcccaattttccaagctgcatgtccgagtgacgccccacccgtggactcacactgagcgcttccttcggcaggcttttggggatgactgggggagcatcctctcttttgagaaccgggaacctgtgggctcaggctgcgtggcccaggtgtacaaagcatacgccaacactgccttcctggagactgacagcgtccagagacttggcagggcctcctgtctgccgcccttctcacatactggggcagtcggtgggctgagagagctctttggataccttggaaatggccggaaacctccagaaaatctcgcagaccagtcgtttctagaaaggctgctcctccctaaagctgacctggttggatcaaatgcaggggtgtctcgggctcaggtccctggccaccaacctgaggccaccaacctcatctccgtggcagtgaaagtgttgcaccctggcctgctcgctcaggtgcatatggacctgctgctgatgaagattggcagccgagtcctgggagttttgccaggcatcaagtggcttagcttgcctgagattgtggaggaatttgagaagctgatggtccaacagattgacctgcgttacgaagctcagaatctagaacacttccaggtcaacttccggaatgtgaaagccgtcaagttccccactcccaagagcctctcctatggcagctgggacgttttaaaattgggacaccaatttcaaatgtaaccctccagtggtggaaggcacaccatggcttcctctgcttggtttgagggtctgttcaaaagctttgggccaattagggagtaaaaggagggaaggggcctatccattccattgtggaagctgggccaggtgccagggacactctccttcagggaaaatgttatgtggaggaggacgaataaatttattttgtttt

SEQ ID NO: 4091 - DNA, 600 bp, Homo sapiens
cctacctggagttccggtccttccaggctatcacgccccaggacctgcggagctacgttttgcagggctcagtacgaggctgcccggccctggagggctccgtaggtctcagcaacagcgtgtcccgctgggtgcaggtgatggtgctgagccgtcccgggcccctacagcgtgcacaggtgctggacaagttcattcacgtggcacaggctccaccagctgcagaatttcaacacgctgatggcagtcacagggggcctgtgtcacagtgccatctccagactcaaggactcccatgcccacctgagccctgacagcaccaaggccctcctggagctcactgagctccttgcctcccacaacaactacgcccgctaccgccgcacctgggctggctgcgcgggtttccggctgcctgtactgggcgtgcacctcaaggacctggtgtccctgcatgaggcacagcccgacaggttgcctgacggccgcctgcacctacccaagctgaacaacctctacctgcggctgcaggagctggtggccctccaagggcagcatccaccctgcagcgccaatgaggatctgctgcacctgctcacg

SEQ ID NO: 4092 - DNA, 600 bp, Homo sapiens
atcactcttataccaagggcaagcggctgccccgtgcacttcagcaaaatggagctccaggtattgccaaggtcaaggccaactgagaagcatggcctagataggcgcccacctaagtgcctcaggactgcaccttagggcagtgtccgtcagtgccctctccacctacacctgtgaccaaggcttatgtggtcaggactgagcaggggactggccctcccctccccacagctgctctacagggaccacggctttggttcctcacccacttcccccgggcagctccagggatgtggcctcattgctgtctgccactccagagctgggggctaaaagggctgtacagttatttccccctccctgccttaaaacttgggagaggagcactcagggctggccccacaaagggtctcgtggcctttttcctcacacagaagaggtcagcaataatgtcactgtggacccagtctcactcctccaccccacacactgaagcagtagcttctgggccaaaggtcagggtgggcgggggcctgggaatacagcctgtggaggctgcttactcaacttgtgtcttaattaaaagtgacagaggaaacc

SEQ ID NO: 4093 - DNA, 600 bp, Homo sapiens
ctctggggctgagagtgggactctagccagagcctctttggctcttccaacttcctccctgtcccggaccgcgtcccagagcagcagtcaccgaggctgggagatccttcgtcaaaacaccctggggcacttgaatcttggactgaaccttagtgagggggatggagaggaggtctaccatttttgattaacatcgctatcactcttgaccttactcccggttggcctgggggcggggacagagacggagacctctgcctatgcaagtgtctaacttctgtgcctgttaatcatgggagggtgagacagaacaatccctaaagggtcatgcctcacacttcacatcagaatttctggcaatgggcaatggtcatcgattgtctcacgtattttctgggctcttgcaagtcacccatctcaggaaaaaggaggttggcaactaaagacatgaggcagggatgctagattaatgtcaggaccatttctcttctgccccacgcagcccctagaaagtagtaagctgtgaggctattctggctccccagggcttacgtgggaagagccaggcatggcatagaggttgtggcccttctttttttc

SEQ ID NO: 4094 - DNA, 600 bp, Homo sapiens
gtcttctgacagtgccaataccaccatagaggatgaagacgctaaagcccggaagcaggagatcattaagaccacggagcagctcatcgaggccgtcaacaacggtgactttgaggcctacgcgaaaatctgtgacccagggctgacctcgtttgagcctgaagcactgggcaacctggttgaagggatggacttccacagattctacttcgagaacctgctggccaagaacagcaagccgatccacacgaccatcctgaacccacacgtgcacgtcattggagaggatgccgcctgcatcgcttacatccggctcacgcagtacattgacgggcagggccggccccgcaccagccagtctgaggagacccgcgtgtggcaccgcgcgacggcaagtggcagaacgtgcacttccactgctcgggcgcgcctgtggccccgctgcagtgaagagctgcgccctggtttcgccggacagagttggtgtttggagcccgactgccctcgggcacacggcctgcctgtcgcatgtttgtgtctgcctcgttccctcccctggtgcctgtgtctgcagaaaaacaagaccagatgtgatttgtt

SEQ ID NO: 4095 - DNA, 1400 bp, Homo sapiens
agaagccccgtggaaaggagcagctggccaagcggaagaccttctcgctggtcaaggagaagaaggcggctcggaccctgagtgccatcctcctggccttcatcctcacctggacaccgtacaacatcatggtgctggtgtccaccttctgcaaggactgtgttcccgagaccctgtgggagctgggctactggctgtgctacgtcaacagcaccatcaaccccatgtgctacgcactctgcaacaaagccttccgggacacctttcgcctgctgctgctttgccgctgggacaagagacgctggcgcaagatccccaagcgccctggctccgtgcaccgcactccctcccgccaatgctgatagtcccctctcctgcatccctccaccccagtccccgggaaaggccggtgggaagagggcaggggctgcatcctcagccccagggccctgctcaggcctcacctggcttcccaggaccctgggtcaccttcctgggcagcccagagagaccctgccaactttccagacttcgctattcccaggcagggagggaaacccggggaactggtttttctgttccctgctgggtgggaatgcgctcttcaccaggaagaaggcccgggaggaggatccgggctttggactccttgtttgcctttaggcaggaagtcaggagccagcagggcgggccaggagaaagaaggcttaacattaagtattccttggcccagcagcggcccagattgcggtgtgagatggtgccccctggggggcacagccagaaactgaactggccgctgggagaaaagccagatgacagggagctggggaatcccctcgcttcataggcagagcccgcccacctgggccctaggcatactctccaggattgtccacaaatgtcctcagagggtccctaggtgggtcaactccaaggcaaatgtccaagcatcagcaagacaatgacactggaagggtccggcttggctagtcacatatcaagtcccgaggcagcaacaggaccaggagccaggtgtcctgactgtcctacaatatcattttcctgggagtgggagtcaagtgtgcctgctatccagccgcaaatccataccccctgccccagagaagcctcagtccctccctcctggctcacagccaccacctggatggatctgctccatgcagatctagccaggcctcccgcatgctgcctgcctccggccctgccccacacaggcctggcccagccagcaggttctctcctgtgagctccccaatccaacccatgcatggcctcccagccacccggatctccaggcccagcctggccccaaatgttctttcctttcatcctcagcaagtgctgagtctgtgaataaagccacataaccagcgggc

SEQ ID NO: 4096 - DNA, 600 bp, Homo sapiens
agagtgggattaggctgaagtggcttagaaggcctcagccatgcttggatactcacattaggaggaccatgtggttggaaggatagactgccccctacctcccaccaccaccatgaagtttggtgacttgaggctggagctccctctgttacctttccatctagcaagttcccaaaggcaagactctctctgatggtcactttgtggtctgtgctttcagaaatacaggaatctgatatcaacatatcctagggtttctaccaatctctgttgaaagaagccagggtttgccactgtgaagcttgatttctgctggtgacttctgaccataagctagaaccatggtcgccactgttttccctctgtagtttctcaagtgaacactctcaggatacccagttccctcatagcctctgttctcagagaattggagttggcccaagaaacataaacatataaccacccatatctatcctggattctgaactcttcaatttggagtgactaacacaagttgttatctaaacctttaaacctatcttccaggcagcccagagaagatctgtttccctgtgtcctgtgaatggaaggacccaagcc

SEQ ID NO: 4097 - DNA, 600 bp, Homo sapiens; identical to SEQ ID NO: 4096

SEQ ID NO: 4098 - DNA, 600 bp, Homo sapiens
acagattcggaaaagcccagattgcacattttactgtgcagattctgagaaacagcaactcgaggagaagtacaggcaggaggatcagagggaaagagaactgaggacacttttattacaacagagcaatgtctgatcacaggggcgccatccaggtttaaccctgcaagctgtttccacatcagaactcccttcaaacacaaagattgctgtgaaaacgaaaatgtgtagacgcactctcaaaaactgcacggacatacaaaatcaatcttttcctttgatcttgtggctaaaccagcatttctgtgtttgagagatttcctgttaggtgcttcgtctgaaagtgaactctcataattcaaattgtataaaataaagctacatttctaagagcttggtgtagggcaattggaataatgtcctgttagataaacagacatttagcaatcctgacattaaaaggaaatgtatttctatacaagattattagctgtaatacaagatatttatttaaccaatgaccttatggctgagagttgaattgtggttcagtattcattgatctcactgctttaaaacatgctctttttgttcaagcag

SEQ ID NO: 4099 - DNA, 600 bp, Homo sapiens; identical to SEQ ID NO: 4098

SEQ ID NO: 4100 - DNA, 1134 bp, Homo sapiens
tcctggagaaagatggcgacagccgagaagcagaaacacgacgggcgggtgaagatcggccactacattctgggtgacacgctgggggtcggcaccttcggcaaagtgaaggttggcaaacatgaattgactgggcataaagtagctgtgaagatactcaatcgacagaagattcggagccttgatgtggtaggaaaaatccgcagagaaattcagaacctcaagcttttcaggcatcctcatataattaaactgtaccaggtcatcagtacaccatctgatattttcatggtgatggaatatgtctcaggaggagagctatttgattatatctgtaagaatggaaggctggatgaaaaagaaagtcggcgtctgttccaacagatcctttctggtgtggattattgtcacaggcatatggtggtccatagagatttgaaacctgaaaatgtcctgcttgatgcacacatgaatgcaaagatagctgattttggtctttcaaacatgatgtcagatggtgaatttttaagaacaagttgtggctcacccaactatgctgcaccagaagtaatttcaggaagagactgcaatattataagaattttaacctctcaatttactaactaccagcattgagaacatgaagatatttgtacagtgtcgctttttgaatagtttggaaaacaggagaatttaatatttttaagaataactctttgtccttcactatactactgaaattgaaaacagaagctgaagtttgctagatttataatgaacttttaataacttttcacccaaaccatgcttatttgtgtgaatgttttgcatcttgattaactcaatgcagaaatactgtagtattttctatttttataagcttgttggcctagactgctcaaagaaatgagatttgtgtaaaaatatggctgtgagtaaggcaggagtacctaattttagatttgtcaagtttcatcttttttttaaatattaacttaatgtcaaaaattatttaaaaaatttttaaaaaaatggtgttgtctatcttaattcttttaggaataaaacaattcaggacatggagactgtggaaagttgttatttaaataaataaaaagaaatgttataactgtg

SEQ ID NO: 4101 - DNA, 1134 bp, Homo sapiens; identical to SEQ ID NO: 4100

SEQ ID NO: 4102 - DNA, 600 bp, Homo sapiens
tttattaacaagaatctgtgaaaatcacatttaaacactgttgcatgttgtaagaccaggtggtaccttagtaacctaaaacttgcaagagaatattaatggtagctttagaagactcaggaggagaaactgacttcagagttggaagatgttgcaagtcgttcctttttctgtccttcagggactgaagaactgggaggctgcccattgtttggttgccagtcatacaaattaaaatcatatttccttccatgaatggaagaaacacactattggtttttccccttggaaacagcaatcccaaataatgtcggcttacaaaaaaaaaaagttaccacttttttagagtccttccctgtaacattggattttttttttcccttatgagatccacctaaggccattgacgtggcctgcgatctcagtgacaatgatctgcttctggatctcactgttgcctttggttagggaacacaactagtaactctgcagagtgccttctcccgcagccctactggaacacagcagagtctgtgccatgaagcagttacagaaacagaattgatgtgctgctaaaaaaaaaaaaaaaaatggggcccg

SEQ ID NO: 4103 - DNA, 600 bp, Homo sapiens; identical to SEQ ID NO: 4102

SEQ ID NO: 4104 - DNA, 600 bp, Homo sapiens
ctggagttgaggaggaaggagatgatgggaaggaaccccaagttgggggcagcccccaacccctgagccatcccagcccagtgtggatgaactactcctacagcagcctgtgtttgagcagcgaggagtcagaaagcagtggggaagatgaggagttctgggctgagctgcagagtcttcggcagaagcacttgtcagaggtggaaacactacagacactacagaaaaaagaaattgaagatttgtacagccggctggggaagcagcccccaccgggtattgtggccccagctgctatgctgtccagccgccagcgccgcctctccaagggcagcttccccacctcccgccgcaacagcctacagcgctctgagcccccaggccctggcatcatgcgaaggaactctctgagtggcagcagcaccggctcccaggagcagcgggcaagcaagggggtgacattcgccggggatgttggcaggatgtgaattcagaacagaagccatgtatctcccccacaccagggcccaccatggagcttgtgttctcagaatctgatgctttctgatcaacaaaactgagcaaggaagatcccaacac

SEQ ID NO: 4105 - DNA, 600 bp, Homo sapiens; identical to SEQ ID NO: 4104

SEQ ID NO: 4106 - DNA, 1400 bp, Homo sapiens
cttacccaagccatcactggccaggtgggttttgtggatgtggaattttgcactacctgtggagaaaagggagcaagtaaaagatgttcagtttgcaaaatggtaatatattgtgatcaaacctgccagaaaacacactggtttactcataagaaaatctgtaagaatctgaaggacatttacgaaaagcaacagttggaggctgccaaagaaaagagacaagaggaaaaccacggcaaacttgatgtcaattctaactgtgttaatgaagagcaaccagaggctgaagtaggtatctctcaaaaggattccaatcctgaagattccggggaaggaaagaaagaatctcttgaaagcgaagctgagttggaaggcttacaggatgctcctgcagggccacaggtgtctgaggagtaaaagccagagcaagtgccagtgtggatgatcctcaccctgcaagaagctggaaaactcctaggaatgcattgtcctcaccttgttatacctgcgtggcaccatggcaggattccacatttcatagaatacaggttttcaagcaaacccctgttgaccatgccctaatttcctattgatttctgttctataattgaatggatattcctatggaaaattttttgtttcaaaatacaggaaaaacattcctattacctttctgaggctggctttccagcaattgtttcaaaggaaaatagatccccttaaagaaaaaatacaggctttagggaacaaagggacaagcagaacaggtgtggaagagagattttcaggaagggaaaaatttatagctacagagggtagttagaaaaatcataacttatatgtgaataaaatacatataagcagcatttacggtagtggcattctacttattaagatgcaatgaaatgaagaaaggctttatgttcaaggacctttgccatagttcagctaattgtagttttatatagaaatgatcctgaacactctgaacttgacgtagtcctgcggtgatattctatctgcagtatttgtacctccagaatggcagatccctcagcaggaacaaaggcatattgacggttctctcagcgtatgcattaaaaaaggtacttcctgaaacttttgattcaataatgactaaacatactatgtacacaattactgtaaggctaattcacgtgccatactccacctgaaagcctgagttatcttgctataagcttttcatggagcacttcctttccagaaactgatttgtaactcatttagagaatgtcctggcgtcggtttttagcatatgtggtatttaaacagagctagaatgtgatgtctgaagataatgctgcatttctgggtttcttgtgtggattttaaaataaattgtgcctacaaatataaac

SEQ ID NO: 4107 - DNA, 1372 bp, Homo sapiens
cttctagggactttcctctcagccaggaaggattttgatattcatcagaaatacctccagaagattcaaggagctgtagaggtgaagtaagcctgtgaaggaccagcatgggaatcctatactctgagcccatctgccaagcagcctatcagaatgactttggacaagtgtggcggtgggtgaaagaagacagcagctatgccaacgttcaagatggctttaatggagacacgcccctgatctgtgcttgcaggcgagggcatgtgagaatcgtttccttccttttaagaagaaatgctaatgtcaacctcaaaaaccagaaagagagaacctgcttgcattatgctgtgaagaaaaaatttaccttcattgattatctactaattatcctcttaatgcctgttctgcttattgggtatttcctcatggtatcaaagacaaagcagaatgaggctcttgtacgaatgctacttgatgctggcgtcgaagttaatgctacagattgttatggctgtaccgcattacattatgcctgtgaaatgaaaaaccagtctcttatccctctgctcttggaagcccgtgcagaccccacaataaagaataagcatggtgagagctcactggatattgcacggagattaaaattttcccagattgaattaatgctaaggaaagcattgtaatccttgtgaccacaccgatggagatacagaaaaagttaacgactggattctatcttcattttagacttttggtctgtgggccatttaacctggatgccaccattttatggggataatgatgcttaccatggttaatgttttggaagagctttttatttatagcattgtttactcagtcaagttcaccatggccgtaatccttctaagggaaacactaaagttgttgtagtctccacttcagtcagaaactgatgtttcagctaggcacagtggtacatgcctgtaatcccagctacttgggaggctgaggtgggaggatcacttgaactcaggagtttgagagcagccagggcaacacagcgagaccctgtctcaaaaaaaaaaaaaaaaaaaaaagccctggtgttccaaactcagtctttcctgaagaagaggatctgagttatcttctgaaacagcgttctcccttcccagttgtatcactcttataaaaagactgtccagtctatgtcatgccctaggagacaaactgttcctcccagccccctttgagtattgagcagaagaatcaaattattaaatacgtatgtttgtacagaatggtatttgtgtatgtgtgtgggcttagagattcacaagtaaatattcctttggtgaaggaatttcaataaaaacatctatcaagtgtc

SEQ ID NO: 4108 - DNA, 586 bp, Homo sapiens
tcccatcccctcctccggaagcctcttccctgatgtcccctccaggcaggcagcctcagccagagagcctggaaatcactggggcggtggagcctggagcctgctgtctggctcagcccgtggactctatgccctcacactccttctccccccctccaagttcaggcagcgcctggggcaggtccccctcaggcatctgggccacctcggcccactgcgtccgcagagtggggctggcccctcggctcagcagaagccccacggtaggcccatgccctcgctctgcagccaggtgtaggggggtctttcggagccagccggtagcatccacctgggcacccctgtccagcaggcagccggcaacctccacgtggccttcccgagaggcgtgatgcaggggtgtgaggcccagggtgtcccgcgcatccacctcggccccctgggtgaccagcaactggacggcaagcaggtgtcctcgggcggcagccctgtgcagcgcagagcggccatgcctgtccctgatgcctgggtctgccccgtggcccagcagcacctcaatgtcctgggagcggcctagggcggccgc

SEQ ID NO: 4109 - DNA, 1400 bp, Homo sapiens
aggaggggcccgtgtagatgccctggaccgagctggtcgcacacccctgcacctggccaagtcaaagctgaatatcctgcaggagggccatgcccagtgcctagaggctgtgcgtctggaggtgaagcagatcatccatatgctgagggagtatctggagcgcctagggcaacatgagcagcgagaacgcctggatgacctctgcacccgcctgcagatgaccagtaccaaagagcaggtggatgaagtgactgacctcctggccagcttcacctccctcagtctgcagatgcagagcatggagaagaggtagcaagagaggctccctgccttcctgccactgccccaccctgccccactgctgtctcagtaccaagaaaaagcccaacatctgggacttggagctgcacttgtctggtgaggaccttgccctcacccgcagatgccgtggggcagagatgctctctctccacggcctcagagccactcccagccacagtttccagcatctctgtggacagggaccacagctcccagcttcttccagttctcgcagcaccagaccagcctctgcagctgcacttcagctccgcagacctgcgctatctcagcagacctcacttgccccatggccttcatggcgcgctccaggcctcagacccttctctgtgttccgtcctggccatgggcttgttgcagtcagcaggtgtgggcttaggcgggcaccctgtggccaggggtactgcgtgaggccctcagttggtcctgtgcctctcaccagcacttagacagacacgtcaccagactttcaaggagatactgcagtgagtttctctggttggaaggggagggttggtgagtcccagaccttaaaaatacaaggttaagagggaccccaaagcaaaaaattccaacccttttcctcccagtcattgaaacaccaaaactattataccggagggtgtaatagttttgctgcccagttgtggtaggccagtagtggcctcccaagatgcccatgtcctaatcccaggaacctgtcaaaattaccttgtatggccaaaggggctttgcagatgtaatgaagttaaggatctttcgccaggaagattatcccagcttgttcaggagggcttgatgtcctcacccgggtctgtataacagaagagcaggtgacgggagaggaggttggaggtgtagcgatggagcaggaaactggagttgaggagggcagctcaagccacagagtccaggccacctcagagccaggaaatgcatcctcccacagagccctggaaggccccagccctgctcccacctggactggctcagtgaggctaattttataattctggctgattttagaactctaagggaataaatttgtgttgttttaagtc

SEQ ID NO: 4110 - DNA, 600 bp, Homo sapiens
agcaaaagttggaagcctggagtgcctaagcctgcttgtagccagtgatgcccaaattgatttatgtaataagaacgggcaaacagctgaagatctcgcttggtcatgtggatttccagactgtgccaagtttcttacaacaattaaatgtatgcagacaataaaagcaagtgaacaccctgacaggaatgattgtgttgccgtgctcagacagaaacggagtctcggaagtgtagaaaataccagtgggaaaaggaagtgctgatgtcacgtgggttatgaagaagtctgaagaacgccttcatttcatgcaaatctataagctcctgcttttggctttaccatatgttgtgtctaatctccttctgagaaggacgaaaaactttcttccaagtgaagatccatttaagaacacatgtatttacatgcctataatatgctggttgtgtatgctttgtcttttaagttattaaaggaacgtctaaaaaatacattctccgtgcagtatttacaacctttgaaaaaggtcataatttaaatcgtcaaactagaaccaggatttaatgtgaaaaattaaactgattctttattcacaaattt

SEQ ID NO: 4111 - DNA, 600 bp, Homo sapiens; identical to SEQ ID NO: 4110

SEQ ID NO: 4112 - DNA, 600 bp, Homo sapiens
cgtctcagaaattgaaaaggctattacccattgaagaaaagaaagaaaaatttaagaaagcaatgaccatcggagatgtttcattggtccaggagctcctagattctggcattagtgtagattccaactttcagtatggatggactccccttatgtatgctgctagtgttgccaatgcagagctggttcgggtccttttggacagaggtgctaatgcaagctttgagaaggataagcaaagtattttgataactgcatgttctgctcatggctcagaggaacagatcttgaagtgtgtagaactactactttcaagaaatgctgatccaaatgttgcttgtaggctttaacgtgggcagcacgtcagggtcataaaaatatagttttgaagttgcttgaacttggagctaataaaatgctacaaaccaaagatggaaagatgccaagtgagattgcaaaaagaaacaaacatcatgagatcttcaacttactttcttttactttaaatccattggaaggaaaacttcaacagctaactaaagaagacactatttgtaaaatattgacaacagattctgatagagaaaaagatcacatttt

SEQ ID NO: 4113 - DNA, 600 bp, Homo sapiens; identical to SEQ ID NO: 4112

SEQ ID NO: 4114 - DNA, 393 bp, Homo sapiens
atgcccaagattactgtcaatgtctatagattagaaatgaccacaggacatgcaaccagagatcgtgttgagagaagagggttctggggaggccagactgcgctgatgctgggagtcagccacgacagggaggacatggttcaagcgctgcttagctgccaggcagatgtcaatctgcaggaccacgatggatcctcggccctcatgctggcctgtcaccatggcaacgtggacctggtgcggctgctcctggcacacccagcctgcgacagcagcctgactgacaaggctggccgcacagctttgtccatcgctctgaagtcacccacccatatggaaattgctgggcttctgagagcccacgcggagcagggcaggtccctggggctgtag

SEQ ID NO: 4115 - DNA, 555 bp, Homo sapiens
atgcgtggactgagcccagaccgcaggctgcccgagcccgccccctgcccggctgcggggagccctgagcccaggtccgcgggccgccgccaacgccacgtcctggccctgccggaagaagaggcatggcggccccagcagtgcgctctgctcgaggccgacgcctcggacgaggtgggcatgctgccggcttccccgcgcgccgcctctggcttcgacaacttcttccaggtgcaggagggcgagggccagggctgggagggcgccatggcactggaggcgggctccagccctttcctgccgattgttgacttgctagatgtcatcaagtacaaagagattagtcacagatgtattttgatggtggtggtcgtggtgggatttacctacttggtttcagtgaatgttctggatgatacaagtagggccaacccctataaaaaaggttcatatccaaattacgtaaaaacatctatcgcatgtgccttcatcatcagcctcatccctacaacaatgtttatatgtacagatcaagaagtcattatctcaaactga

SEQ ID NO: 4116 - DNA, 555 bp, Homo sapiens; identical to SEQ ID NO: 4115

SEQ ID NO: 4117 - DNA, 600 bp, Homo sapiens
aagagtggagcggtccctgatgcccttgaccagagcggctacggcccactgcacactgcagctgccaggggcaaatacctgatctgcaagatgctgctcagcctacaagggccacctggagagatcatccatctgctggcagagagccacgcaaacatgggtgctcttggagctgtgaactggactcccctgcacctagctgcacgccacggggaggaggcggtggtgtcagcactgctgcagtgtggggctgaccccaatgctgcagagcagtcaggctggacacccctccacctggcggtccagaggagcaccttcctgagtgtcatcaacctcctagaacatcacgcaaatgtccacgcccgcaacaaggtgggctggacacccgcccacctggccgccctcaagggcaacacagccatcctcaaagtgctggtcgaggcaggcgcccagctggacgtccaggatggagtgagctgcacacccctgcaactggccctccgcagccgaaagcagggcatcatgtccttcctagagggcaaggagccgtcagtggccactctgggtggttctaagccaggagccgagatggaaatttag

SEQ ID NO: 4118 - DNA, 600 bp, Homo sapiens
ttgagtgtgcttacttctggactggtcagcagtgccttagacagcaaaacagaacagcaaaatgcccttggcactggaagaattcagcagtgttgtaaggaatccctcaggtttcaaacagacctttgcatgaagtgctctgagaagtggcagacaatgtctaggagagagaagtctaaatttgatgaagtggcaaaggtggataaagtactccatgtttgggaaatgaaggattatagatcagctaagggaggcaagaaggactctaatgccctcaaaaggccaccaagtctaccccaagatcaaatccacaaaccctggcatctctattggagatgtggcaaaaaaaagctgggtgagatgtggaataacttaagtaacagtgaaatgcaaccttgcatcagtaaggtggtgaagctgagggagaagcatgagaaagatgttgctgactcccttagtctagaaaatgatctgtttttagtcgtggcatttaccctgcaggtggaagcttctcaacacctcccaacagcacactcaccagaagccagccctctcctgtgcagctatagaagtagaggaaattcatcccaaaagccatag

SEQ ID NO: 4119 - DNA, 600 bp, Homo sapiens
aaccctacctacggtgacagatgtcaggagggggagcccagacccatccagctttcccctcaatgccccgggtcctcccacaaattcatcctgcctcaagcctcagtctccacttccgacaaatgggtctcaagctctctgctctgtccaccctgcatggcggtgtgggcagcacagagccagcctgggcttcaagctctgtactgtgggtttaagccttgcacctctggatacctgtgggcctcgggcagatcactgagcctccctgcatctggaagtcggggccaccccaaacttgatcaaaggtccgcttctggcaccccataccctgtcctacaggaaatacagggacaggctcccaataacaacacccagcacggtgccatcaacaccaccacgcacacgggggctcaacggaacagacatctccgcttcttcaatgaagacactggagggaaattgcttacaaggcgcttaagagacctattaagcaaacttgatgtgtggacctgcggcggatcccgattctataaggccaactgcacaaaaccacgagaccccctgaggactgcgccattggctgggtccccgatgatatga

SEQ ID NO: 4120 - DNA, 600 bp, Homo sapiens
cacaacccgcagagcaacctgcatctgctggagggtggtagagaccacaagtatctacaattggtagccgctgcggagcctgccgccaccgcctctgagcagaagatggctgtgccactcacgtatgccaatcttggcaaatctgccagggatgtcttcaccaaaggttatggatttggcttaataaagcttgatttgaaaacaaaatctgagaatggattggaatttacaagctcagactctgccaacactgtggccaccaaaaaatggaacaccgacaatacactaggcacccagattaccgtggaagatcagcttgcacgtgtactgaagctgaccttcgattcatccttctcacctaacactggggggaaaaaagctaaaatcaagacagggtacaagtgggaacacatcaatctgggctgcgacatggatttcgacattgctgggccttccatccagtgtgctctggtgctgggttacggcggctggctggccaactaccagatgaattttgagactgcaaagtcccgagttactcagagcaactttgcagttggctacaagactgatgaattccagcttcacactaatgtctga

SEQ ID NO: 4121 - DNA, 600 bp, Homo sapiens
gtgtggatttcttcatcatatgttaaccttggcaaagctgccagagatatttttaacaaaggatttggtttggggttggtaaaactggatgtgagaacaaagtcacgcagtgctgtgggattttcaacatctggttcatttaatgcagacactggaaaagcttttgaagtcttggagaccaaatataaacggtcaatcacaggaaacaaaagtggtaaaatcaagtcctcttgcaagagggactgcataaaccttgcttgtgatgttaattttgattttgctggacctgcaatctatgcttcagctgtctttggttacgagggctggcttgctgggtaccagatgaccactgacagtgccaagtcaaagctgacaaggaataactgtatgggctaccggatgggggacttcgagcttcacactaataacaataatggggcagaatttggaggctcagtttatcagagggatttaactgccctctttcggtcaatgccagtaattgcaccattaatgacagttgctaaagcagtcagtccagtgacttttcagagggtgctgagattacagattctcttccaggattctttgtttgtttag

SEQ ID NO: 4122 - DNA, 474 bp, Homo sapiens
atgaaactctgcctccagcctctaaaggccacaaagaatgaaattgacagaacaggtataggatttgacactgccagagacaaaacagctgtgcagcatgagttcctgccggagagatatacagtctgccttcggccaaagtgctttgaattcaccgtgtgctttatgaccagcttttctgattctactattggcaagaggagagcttgggagatgagccatttcaggagggctggggtgaaaccaagccctggtgccactcagagtggagaagctggaggcatatctacttggggacagccacgaaacagggctagtaacaaaggtagtggtaagaaaagccagccaaaacgggaaaacagtatggaagaacatgggtggaagatgtttatgccaggcctagatacgacaaacgtgacttctgcgcacattccattagctataattcagtcacgtggccataccaaactgtaa

SEQ ID NO: 4123 - DNA, 474 bp, Homo sapiens; identical to SEQ ID NO: 4122

SEQ ID NO: 4124 - DNA, 600 bp, Homo sapiens
aaggtcaagtgggtgttcacctggcccctcatcttcctcctgtgcgtcaccattcccaactgcagcaagccccgctgggagaagttcttcatggtcaccttcatcaccgccacgctgtggatcgctgtgttctcctacatcatggtgtggctggtgactattatcggatacacacttgggatcccggatgtcatcatgggcattactttcctggcagcagggacaagtgttccagactgcatggccagcctaattgtggcgagacaaggccttggggacatggcagtctccaacaccataggaagcaacgtgtttgacatcctggtaggacttggtgtaccgtggggcctgcagaccatggttgttaattatggatcaacagtgaagatcaacagccgggggctggtctattccgtggtcctgttgctgggctctgtcgctctcaccgtcctcggcatccacctaaacaagtggcgactggaccggaagctgggtgtctacgtgctggttctctacgccatcttcttgtgcttctccataatgatagagtttaacgtctttaccttcgtcaacttgccgatgtgccgggaagacgattag

SEQ ID NO: 4125 - DNA, 525 bp, Homo sapiens
atggctgaagaacaaccacaggtgaaattgctcttgaaggctggcatgcagaagctgtgcccagaagggcagctcctgttcctgctgcgtggcatggaagcacacatagacacccaaaagattgaggaatttctggaggcagtgctgttcccctgcagttcaaatgcaggactcaacgatactctggacaaggggctcctgagagccctgaaggttttagacagttactcaacatcccccttcccagaagaagtggatgacagcagtgctgaagatgagggcatctctcagaagaggtttctcgatggcaacgagctctccctggttgagtgcagcctgttgtcaaagctctgcatagtccaggtggactgtgagaagtaccagggcttccccatccctgagaccttccggggatggcatcggtgcttgggcagtgcctatgcctgggaagaattcacccctacctgtccacatgatgaggagatcaaactggtctgcaagcaagtggccaggaccctcaaataa

SEQ ID NO: 4126 - DNA, 525 bp, Homo sapiens; identical to SEQ ID NO: 4125

SEQ ID NO: 4127 - DNA, 600 bp, Homo sapiens
gtcagtggggacctgacctgcctcaagctcctgacagccgcgcatggcagcagcgtgaaccggcggacacgcagtggcgcctccccactctacctggcctgccaggagggccacctgcacctggcccagttcctggtgaaggactgtggcgctgacgtgcaccttcgtgctctcgatggcatgagcgccctgcacgctgccgccgcccgtggccactactccctcgtcgtctggctggtcacattcaccgacatcggactcacggcacgggacaatgagggggccacggccctgcactttgcagcccgaggcggccacacgcccattctagaccgactcctgctcatgggtacccccatcctgagagactcctggggtgggacccccctccacgacgcagcagagaacgggcagatggaggctgctcagtcgggagccagcagcgtgctccaggcctctgcaaggctagtctggggggattttaagtggaagtgcaaccaaccatcgcattctgggtctgcaagtctagacaactgctcccagctagaacccaaggtcttcctggggccccgggtcacccagtctcagcagtgccattga

SEQ ID NO: 4128 - DNA, 600 bp, Homo sapiens; identical to SEQ ID NO: 4127

SEQ ID NO: 4129 - DNA, 423 bp, Homo sapiens
atggttaagcctcccacgtacgctgatcttggcaaatctgccagggatgtgttcaccaagggctcaggcaagtatcagatggaccctgatgcctgcttcttggctaaagtgtacaaccctagcctgataggtttagggtacactcagaccgtaaagccaagtatcaagctgatgctgtcagctcagctggatggcaagaacgtcgatgctgggaaagtgagaaaagcaaaggtggaggtgattgcaggaaaagagatccgacggaataatagcagccccttaaaaactgtgggaggagcccagttctctgtggccaatcccaatgactttgagagagtgaacttttcattcatcattatcgttgtcctgccacatatcctaatgaaatggccgtccaaatgtgagcatgaggaaacaaaatag

SEQ ID NO: 4130 - DNA, 423 bp, Homo sapiens; identical to SEQ ID NO: 4129

SEQ ID NO: 4131 - DNA, 600 bp, Homo sapiens
ctggtactgaaactccgtcctcaggtcttcagtcctggggattacatttgccgcaaaggggacatcggcaaggagatgtacatcattaaggagggcaaactggcagtggtggctgatgatggtgtgactcagtatgctctgctgtcggctggaagctgctttggcgagatcagtatccttaacattaagggcagtaaaatgggcaatcgacgcacagctaatatccgcagcctgggctactcagatctcttctgcttgtccaaggatgatcttatggaagctgtgactgagtaccctgatgccaagaaagtcctagaagagaggggtcgggagatcctcatgaaggagggactgctggatgagaacgaagtggcaaccagcatggaggtcgacgtgcaggagaagctagggcagctggagaccaacatggaaaccttgtacactcgctttggccgcctgctggctgagtacacgggggcccagcagaagctcaagcagcgcatcacagttctggaaaccaagatgaaacagaacaatgaagatgactacctgtctgatgggatgaacagccctgagctggctgctgctgacgagccataa

SEQ ID NO: 4132 - DNA, 600 bp, Homo sapiens; identical to SEQ ID NO: 4131

SEQ ID NO: 4133 - DNA, 600 bp, Homo sapiens
ccagcaaatgaaagctttggacctctgcagacgtcgcttggaggagcagtcaaagacatcttcaggttcatgctcatattcattatggtgtttgtggcctttatgattggaatgttcaacctctactcctactacattgatgtaaaacaaaatgaagccttcacaacagttgaagagagttttaagacactgttctgggctacatttgtgctttctgcagtgaaatcagtggtcatcaactatagccacaaattcattgaaaacattggttatgttctttatggagtctatgatgttacaatggtcattgttttgctaaatatgttaattgcaatgatcaacagttcactccaggaaattgaggatgacgctgatgtggagtggaaatttgcaagggccaaactctggttttcctgctttggggagggggagagcacttcctgttcctttcaatctggtgccggcttaaagggtggatttctgagctctatccagggtcataaaaaaggtttccaggaagagatagagctaaatgtggaagctgcctctgaagaggaagccacctctgaagagaaagctgccaccaagaacaagcaatga

SEQ ID NO: 4134 - DNA, 600 bp, Homo sapiens; identical to SEQ ID NO: 4133

SEQ ID NO: 4135 - DNA, 600 bp, Homo sapiens
gcagagcccgccgccacctttgagaagaagacggctgtgccacccacgtatgccgatcttggcaaatctgctagggatcttgatttgaaaacgaaatctgaggatggatcggagtttacaagctcaggctcagccaacactgagaccaccaaagtgacgggcagtctggaaaccaggtaccgatggactgactatggctcgaggtctacggagaaatggaaccccgacaatacactaggcaccgagatgagcgtggacgttggctacaggactgatgaattccagcttcacactactgtgaatgacgggacagagtttggcggctccatttaccagaaggtgaacaagaagttggagaccgctgtcaatctcgtctggacagcaggaaacagtaacacgcgcttcggaacagcagccaagtatcagactgaccctcatgcctgcttctccactaaagtgaacaactccagcctgataggtttaggatacactcagaccctgcagccaggtatcaaactgacactgtcagctctcctggatggcaagaacgtcaaggctggtggccacaagcttggtctaggactgaaatttcaagcatga

SEQ ID NO: 4136 - DNA, 600 bp, Homo sapiens
agtggattagctttctatagcagcacaggttggtacaataggcttttcatcaactttgtgctaaggaggcatgttttcttctttgtgctgcaaacctatttcccagccatattgatggtgatgctttcatgggtttcattttggattgaccgaagagctgttcctgcaagagtttccctgggaatcaccacagtgctgaccatgtccacaatcatcactgctgtgagcgcctccatgccccaggtgtcctacctcaaggctgtggatgtgtacctgtgggtcagctccctctttgtgttcctgtcagtcattgagtatgcagctgtgaactacctcaccacagtggaagagcggaaacaattcaagaagacaggaaagcttaaatgtactcactgtcttggtcactggcaaaacaagaatgttcaggcctatccctggaaggacagtatctctttacttcatttcagagaaaagacctggacaccaatgcggacaccaaatggaggactcaaaagggacagagctaaacgtgccagtttcttctcccagactgctacagtagagtggccaaaggatgatgagaaagggctggaatgttag

SEQ ID NO: 4137 - DNA, 486 bp, Homo sapiens
atggttggaaatctagtcatcataccagttggaatcacattctttacagagcaaacaacaacaccatggattattttcaatgtggcatcagatacagttttcctattggacctgatcatgaattttaggactgggactgtcaatgaagacagttctgaaatcatcctggaccccaaagtgatcaagatgaattatttaaaaagctggtttgtggttgacttcatctcatccatcccagtggattatatctttcttattgtagaaaaaggaatggattctgaagtttacaagacagccagggcacttcgcattgtgaggtttacaaaaattctcagtctcttgcgtttattacgactttcaaggttaattagatacatacatcaatgggaagagaaaaaactacctgaattacagcaaagatcttgtaaaaataagaacaagaaccacaacctgaaaattgtggcaaagaaagctaaaaggacatga

SEQ ID NO: 4138 - DNA, 486 bp, Homo sapiens; identical to SEQ ID NO: 4137

SEQ ID NO: 4139 - DNA, 600 bp, Homo sapiens
accaccgcccgctgcctgcagctgtgcagcttgctgctttcagctggagcagacgctgatgctgcggaccaggacaagcagcgacccctgcacctggcctgccgccgtggccatgcagctgtcgtggagctgctcctgtcctgtggtgtcagcgccaacaccatggactatgggggacacacgcccctgcactgtgctctgcagggcccagctgcagccctggcccagagccccgagcacgtggttcgggctctgctcaaccatggcgccgtccgtgtctggccaggggccctccccaaggtgctggagcgctggagcacgtgccctcggaccatcgaggtcctgatgaacacctacagtgttgtgcagcttcccgaggaggccgtcggcctggtgactcctgaaactctgcagaaacatcagcgtttctactcctccctcttcgccttggtgaggcagcccaggtcgctgcagcatttgagccgctgtgcgctccgctcccacctggagggcagcctgccccaagcgctgccccgcctccccctgccaccgcgcctgctccgctacctgcagctggattttgagggcgtgctctactag

SEQ ID NO: 4140 - DNA, 600 bp, Homo sapiens
ctcattgcctatggagcaaacgtcaactgtgctgtctcttccacggggaacacgcccctgaagcttgcagtgtgcactgcatcaagcaaagcaggccgactcctcggggcgggggtcagctgcatccgtctgctactcactcacggagccaaagtcaacgcccaggactacaagggccaaacagccatccatgaggcatgctttggaggcagagaggcaatcatcaatctcctgcttgaatttgaagcaaatgttaacattttaacaagaaacggggaatctccaatttatatgtaccttcagcgcagttgcaatgtaagagatacggcacttctggccaggctactttatcacacttatcctctgagaatgaccaataaccaaggaattctacctgcaggaatcttgctaccagaattccgcctcttaagggacaccctaataaagcaatcgcaaaaacctttatccctacagggtatctgcaaaagaaacatcaggaatatttatggtgagaaatacaaacagcacttgaagcaattcctcccagtgacaatatggaattctgtctactgctgttatgacttggcatatacctcttga

SEQ ID NO: 4141 - DNA, 600 bp, Homo sapiens; identical to SEQ ID NO: 4140

SEQ ID NO: 4142 - DNA, 600 bp, Homo sapiens
catacgactgcaatttgctactatgagaacagccccgggggttcaaggcataaggataatatttttaaaagcctgttacatcatccttcccaaggattccgctttggaactgtccgagaaagcagtgctgaagattatgtgagacaaagtttcccagagatgcatgaatatatgagaaggtacaatgttccagccacccctgatggagtggagtatctgaagaatgatccagagaaactagacgccttcatcatggacaaagcccttctggattatgaagtgtcaatagatgctgactgcaaacttctcactgtggggaagccatttgccatagaaggatacggcattggcctcccacccaactctccattgaccgccaacatatccgagctaatcagtcaatacaagtcacatgggtttatggatatgctccatgacaagtggtacagggtggttccctgtggcaagagaagttttgctgtcacggaggtggaggaggacctaaggacagacagctctgcggactcagaacctaactctacctggacacacagaagcgaacacactattggagacttaccaacacaattattaacataa

SEQ ID NO: 4143 - DNA, 600 bp, Homo sapiens
acaatgacaaatggaggcagcattaacagttctacacatttactggatcttttggatgaaccaattccaggtgttggtacatatgatgatttccatactattgactgggtgcaagaaaaatgtaaagacagagaaaggcatagatggatcaacagcaaaaataaagaatcagcatgggaaatgacaaaaagtttgtatgacgcgtggtcaggttacaaatggctagtagtaacactaataggattggcaccaggggtatttggagggctttggggagcctttttcattagggtaagtattgcctggtgtcatcgacacaagtccaccaaatttggaaagtatcccattctggaaatcattatcgttgcagccattatggctgtgatagcctttcctaatccatacaccagggtaaacaccagtgaactgatcaaagagttttttacacactgttttcccctggaatcctcttctctttgtgactaccaaaatgacatgaatgccagtaaaattttctatgacattcctgataatccagtaggcattggagtatattcagctcaatgcactaatgcctggcactcctatttaaaatcataa

SEQ ID NO: 4144 - DNA, 600 bp, Homo sapiens; identical to SEQ ID NO: 4143

SEQ ID NO: 4145 - DNA, 600 bp, Homo sapiens
ccgcccctgcccgaggccgcgagttcgccgccgccggtcccgcctctgcccctcgagggcgctggccctggctgcgggcagcgccgctcctcctcgcccaccggcagcaccaagtctttcaacgtgatgttcccgatgggcgacaactcggagctactggctgagattaaggcaggcaagagcctgaagccgacgccacagagcaaggggctgaccacagtgttctcaggcagcaggcagccggccttccagcccgattggccgctgccgtctgtgtcacctgcactgttaccagtccggagccccacaccgccagctgcggggtttcagccgctgctcaacggaagcttggttccggtgccgcccactactcctgcgccgggggtgcagctggacgtggaggcgctcatccccacgcacgatgagcagggccgtcccaagcccgagtggaagcgccaggtgatggtgggcaagatgcagctgaagatggaggaggaggaggagcagaggtggaaagtgggaggaggaggcccggctggccagcatgcccgcctggaggtgggacctcctgcggaagaagctggaagaagagaggtgagc

SEQ ID NO: 4146 - DNA, 420 bp, Homo sapiens
atgggtaattttgtgcacatggcagagacagagctggagaatgaggaagaagaggctggacaaatgtccttgccttcatttgtgttctttagctttaatgtttcatcttgctcaactttctcatcacctcacccttcagacctttcagacataagctctgccacatttcttaatctgctcttcagagatgctcccaaagctgccatgggtaaaagttggctctgtagatccaggttttgggaggccgtgcctttggttgtaggttttccagaagggatggaagacagtcttctgaatatgccgttaagccatcagttcaggaatcgcggtacaaactggcatgaatgtctggcagagagcagggcaatttgtggagagatatctagcagctcttccagcacggctttggtaggggagtga

SEQ ID NO: 4147 - DNA, 420 bp, Homo sapiens; identical to SEQ ID NO: 4146

SEQ ID NO: 4148 - DNA, 600 bp, Homo sapiens
gccagttcatttgctgttgctgttcctgctgcaaaaccaagaagccagactatcccccgatccctacttttgccaatcccagggcaggggctgtgcctggggagggagagcgtggatcctaccgccttcacgtcatcaaggccctggtacagcgctacacagagactgcccggcgagaattcgaggagacccggcggaaagatctgggcaacagactcacagagctgaccaagaccatatctcgactgcaaagcgaggtagccggtgtgcggtgaactctggcagagggagggacgccccggcctcccgacggtgccagcgtcctcagtcactacatcactcaagtgcacaacagcttccagaacctggggcctcccatccctgagaccccagagctgacagggcctgggattgtgaggacccaggaatcatcaggaaccgggcttcaggacactggaggggtgaggactctggcttccggagagtctggcccctgctccccagctcatgtgctagttcatagggagcaggaagcagagggggctggggacctgccccagggggaggattcggggactgagaggaggtcctgatacagtg

SEQ ID NO: 4149 - DNA, 600 bp, Homo sapiens; identical to SEQ ID NO: 4148

SEQ ID NO: 4150 - DNA, 600 bp, Homo sapiens
actgatgtagaaggaaggattctttcacttttattatttattttggtaattaaatttacattaatttaatatgttaaatattttagtaccttttgctttttcacatttcatttgaaccattaacatgcatctttggacatcaatgtccttgtctttttggcccaattgttttagtcaccagaaactttttcaggacatgctatcttctatttgtttgacatacagaatcatatgtacctgaatttattactaactctgggattttcattttaagtaacaactacctattatgtgaggacagttgtttatgtgattggttgttctaacttgccctataaatgtgcattcatcaaaggagaagtttttaaatccaaaaacaaataaaacccgattcatattagacaactcttcaggttccacatggtatagttactgagtccactttattctggggcactgtgggagggactatatcaaagtagaagaccctgattgcccgtaggttaagaggtcagcattgaggtcacctgctttccaaatctggcagatgtttaatatgatatatgtatatttgatttattacttcccaatatttctaga

SEQ ID NO: 4151 - DNA, 600 bp, Homo sapiens; identical to SEQ ID NO: 4150

SEQ ID NO: 4152 - DNA, 600 bp, Homo sapiens
ctgagaccacaatttgttcacttttgtattcttcagtcctatgtctgtctctaccttcaatgctcctcctgataatgtagacctgaacatacttgtgtattttgcagctggtcatgagattgtgttgtcctcattaggacatcatgtctttgtcagtgccatgtccacagtatctgccatactccctggcatagtacggtaaggcaaaaattgtttatcaaaaatatgttccgagtgcaatgcccactgaaagacaaacttgcatatgttgattaacttaatatggacttacagtcagagatgaccttaaatatgatggagtaaaattgtcaatcatacattgaattgctatggaagacttgtttttatgatgtgcatggactcattgaagtatggaagcttagtgcccatatataagtttatttattggagtgatggatttggtgccatggtctataatgtttcatgcatccatacttctgtttttgcttcaaaatttttagtgctccctacaaatacgaatccttctatcccactaaccaaaatacctccttcattataaaattttgtcgtaaacattaaagtgcaggtcagtgaaca

SEQ ID NO: 4153 - DNA, 600 bp, Homo sapiens; identical to SEQ ID NO: 4152

SEQ ID NO: 4154 - DNA, 600 bp, Homo sapiens
aatggttcaaaacaatgggggacctatgcagaagctataagtgcatgtggtcaacacaggttatgtagattccaaggatgcaaatatcttagtgacataaatataacaagatataacataaattgcagagagaatagggcttgcaatgaacttttccattgtcagtgtgatcctggttatgcacctccagattgtgagccgccaatatcatcaccaggaggagtgtttaatgatggatttaggcttacggtagaaaaaagtgtacccttgtttccaaaacgacgtgctgctcctaaaaacaatggtcttttgatcagtttctacatttctttttcacctttgctcattttaattgctattgttagtcttaaatggaataaaatgaagagattttggagcaaaggcggaacaataagcagcatatctatctcagaagacagcagcaggaacaacaacgagtcacagagttaaagtagcccaagtgataacttcgaagccatagggtggagaaaggatattaccaagaaactcaccattaactggcctgatctaacaatgaaaaaaaaaagttttctctcattttgttatggcttaaagctt

SEQ ID NO: 4155 - DNA, 600 bp, Homo sapiens; identical to SEQ ID NO: 4154

SEQ ID NO: 4156 - DNA, 600 bp, Homo sapiens
cagcctgtccacacctgggtcttcctcgtggcccactcactcccaaatggaccctgtggggtatagccggcacatggtggtgactgtcacccgcttcctctgtggcttcctggtcccagtcctcatcatcacagcttgctacctcaccatcgtctgcaaactgcagcgcaaccgcctggccaagaccaagaagcccttcaagattattgtgaccatcatcattaccttcttcctctgctggtgcccctaccacacactcaacctcctagagctccaccacactgccatgcctggctctgtcttcagcctgggtttgcccctggccactgcccttgccattgccaacagctgcatgaaccccattctgtatgttttcatgggtcaggacttcaagaagttcaaggtggccctcttctctcgcctggtcaatgctctaagtgaagatacaggccactcttcctaccccagccatagaagctttaccaagatgtcatcaatgaatgagaggacttctatgaatgagagggagaccggcatgctttgatccgaattcttcgccctatagtgagtcgtattacgcggccggtcgacagctctaga

SEQ ID NO: 4157 - DNA, 600 bp, Homo sapiens; identical to SEQ ID NO: 4156

SEQ ID NO: 4158 - DNA, 600 bp, Homo sapiens
acctgttggagactctgattgtcatgccactggatgggatgtggaacattacagtccaatggtatgctggagagttactctgcaaagttctcagttatctaaagcttttctccatgtatgccccagccttcatgatggtggtgatcagcctggaccgctccctggctatcacgaggcccctagctttgaaaagcaacagcaaagtcggacagtccatggttggcctggcctggatcctcagtagtgtctttgcaggaccacagctgcctcttcatcatccctcttttcatcatgctgatctgcaatgcaaaaatcatcttcaccctgacacgggtccttcatcaggacccccacgaactacaactgaatcagtccaagaacaatataccaagagcacggctgaagactctaaaaatgacggttgcatttgccacttcatttactgtctgctggactccctactatgtcctaggaatttggtattggtttgatcctgaaatgttaaacaggttgtcagacccagtaaatcacttcttctttctctttgcctttttaaacccatgctttgatccacttatctatggatatttttctctgtga

SEQ ID NO: 4159 - DNA, 600 bp, Homo sapiens
agcatgtgcagtcacgggagctcagctcaggccagggctgggctgtgcacctgcctcccactgacccagacccacttcctccagagaggcctctctccgcctgagctatttcccttgctagtgtgcagatatttccctaacatgtccttttttgtatttgtttgtacggaccataaatataactgtagctttaagactacacaggttgttatgtttggtcaacatgaagcgtttcccagaacttctctgacccaagaatggtgaagtggtggtacagtggcagaggcagcctcgtgggctctcttgctggggctctggcagctcacagcacatctgcccagattctgaggttctgcactgtggggctgggagggccaagtaggggccctcattcctcactctagctgccaccctgcaccgtccttacggcaatatgcttttgtagcatgtttgactttccaaaacgtttccagcatctttcagatttccccaaccagcccttggggcagtggccctgtgcaaaccttggctcaggaaggagattgggctcgctccacacaccctgtcggcgacggtgcagtgcaggggccgagggacagc

SEQ ID NO: 4160 - DNA, 600 bp, Homo sapiens; identical to SEQ ID NO: 4159

SEQ ID NO: 4161 - DNA, 600 bp, Homo sapiens
gttaaacaggttgtcagacccagtaaatcacttcttctttctctttgcctttttaaacccatgctttgatccacttatctatggatatttttctctgtgattgatagactacacaagaagtcatatgaagaagggtaaggtaatgaatctctccatctgggaatgattaacacaaatgttggagcatgtttacatacaaacaaagtaggatttacacttaagttatcattcttttagaaactcagtcttcagaggcctcaattattaaggaaaagctcttcaggaaaaatactaaaatatttctcttcctcataagcttctaaattaatctctgccttttctgacctcatataacacattatgtaggtttcttatcactttctctttgcataataatgtactaatatttaaaataccttcagcctaaggcacaaggatgccaaaaaaacaaaggtgagaaaccacaacacaggtctaaactcagcatgctttggtgagtttttctccaaaaggggcatattagcaattagagttgtatgctatataatacatagagcacagagccctttgcccataatatcaactttccctcctatagtt

SEQ ID NO: 4162 - DNA, 600 bp, Homo sapiens
tttttctggttgacatcgttttaaattttcacacgactttcgtggggcccggtggagaggtcatttctgaccctaagctcataaggatgaactatctgaaaacttggtttgtgatcgatctgctgtcttgtttaccttatgacatcatcaatgcctttgaaaatgtggatgagggaatcagcagtctcttcagttctttaaaagtggtgcgtctcttacgactgggccgtgtggctaggaaactggaccattacctagaatatggagcagcagtcctcgtgctcctggtgtgtgtgtttggactggtggcccactggctggcctgcatatggtatagcatcggagactacgaggtcattgatgaagtcactaacaccatccaaatagacagttggctctaccagctggctttgagcattgggactccatatcgctacaataccagtgctgggatatgggaaggaggacccagcaaggattcattgtacgtgtcctctctctactttaccatgacaagccttacaaccataggatttggaaacatagctcctaccacagatgtggagaagatgttttcggtggctatgatgatggttggct

SEQ ID NO: 4163 - DNA, 600 bp, Homo sapiens
cgcaaaggagacattggccaagagatgtacatcatccgagagggtcaactggccgtggtggcagatgatggtatcacacagtatgctgtgctcggtgcagggctctactttggggagatcagcatcatcaacatcaaagggaacatgtctgggaaccgccgcacagccaacatcaagagcctaggttattcagacctattctgcctgagcaaggaggacctgcgggaggtgctgagcgagtatccacaagcacagaccatcatggaggagaaaggacgtgagatcctgctgaaaatgaacaagttggacgtgaatgctgaggcagctgagatcgccctgcaggaggccacagagtcccggctacgaggcctagaccagcagctggatgatctacagaccaagtttgctcgcctcctggctgagctggagtccagcgcacttaagattgcttaccgcattgaacggctggagtggcagactcgagagtggccaatgcccgaggacctggctgaggctgatgacgagggtgagcctgaggagggaacttccaaagatgaagagggcagggccagccaggagggacccccaggtccagagtga

SEQ ID NO: 4164 - DNA, 600 bp, Homo sapiens
gcttgtgtgatggtggtgagcttcagcagcctgcgggccgacgcctcagcgccctggatggcactctgcgtgctgtggtgctccgtggcccaggccctgctgctgcctgtgttcctctgggcctgcgaccgctaccgggctgacctcaaagctgtccgggagaagtgcatggccctcatggccaacgacgaggagtcagacgatgagaccagcctggaaggtggcatctccccggacctggtgttggagcgctccctggactatggctatggaggtgattttgtggccctagataggatggccaagtatgagatctccgccctggaggggggcctgccccagctctacccactgcggcccttgcaggaggacaagatgcaatacctgcaggtcccgcccacgcggcgcttctcccacgacgatgcggacgtgtgggccgccgtcccgctgcccgccttcctgccgcgctggggctccggcgaggacctggccgccctggcgcacctggtgctgcctgccgggcccgagcggcgccgcgccagcctcctggccttcgcggaggacgcaccaccgtcccgcgcgcgccgccgctcggccgag

SEQ ID NO: 4165 - DNA, 600 bp, Homo sapiens; identical to SEQ ID NO: 4164

SEQ ID NO: 4166 - DNA, 1400 bp, Homo sapiens
cccggatccatggacggagacagggccgtggcgcccgcgggcatcctcaaatccatcatgaagaagagagacggcacacctggtgcccaacccagctccggacccaagagcctgcagtttgttggggtcctcaacggagagtacgagagctcctccagcgaggacgccagcgacagcgatggcgacagcgagaacggtggcgccgagcccccgggtagctcctcgggctccggggatgacagcggcgggggatccgactcgggcacccctggccctcccagcggcggggacatccgggaccctgagcccgaggcggaggcagagcctcagcaggtggcacaggggaggtgcgagctgagcccgcgtctgagggaggcgtgcgtagcgctgcagcggcagctgagccggccccgcggagtagccagcgacggcggcgcagtgcgcctcgtggcccaggagtggtttcgagtgtccagccagcggcgctctcaggcggagcccgtggccaggatgctggaaggggtgaggcgcctgggacccgaactgctggcgcacgtggtgaacctggcggatggcaacgggaacacggccctgcactacagtgtgtcccacgggaacctggccatcgcaagcctgctcctggatacgggggcctgcgaggtcaaccgccagaaccgagccggctactcggccctcatgctggctgcactcacctctgtgaggcaggaagaggacatggctgtggtccagagactcttctgcatgggtgatgtcaatgccaaggccagtcagacggggcagacagccctcatgctggccatcagccatggccgacaggacatggtggcaaccctactggcgtgtggggctgatgtgaatgcgcaggatgcggatggggccacagcgctgatgtgtgccagtgagtatgggcgcctggacaccgtgcggctgctgctcacccagccaggctgtgaccctgccatcctggacaatgagggcaccagtgccctggccatcgctctggaggctgagcaggatgaggtggccgctctgctacatgcccacctgagctcgggccagcccgacacccagagcgagtcaccccctggctcccagacagccacacctggtgaaggagaatgcggtgacaatggagagaacccccaggttcactgtggggagatctcctcgtcagtcacctcagcctttggcgcacagaagggtccagggtcccctgctcagaggctaacactggccgaagagaaaggcaatttcagttggggtgactgtggcaggaaggggctcactctggccccaccaaggtgaggtggggaccaagtgatagagccctgatccacccactctctgaaacttctttgctaataaaacattcctactac

SEQ ID NO: 4167 - DNA, 1400 bp, Homo sapiens; identical to SEQ ID NO: 4166

SEQ ID NO: 4168 - DNA, 600 bp, Homo sapiens
gtggacgtgagcggcagtatgaaggggctgaggatgactattgccaagcacaccatcaccaccatcttggacaccctgggggagaatgacttcgttaatatcatagcgtacaatgactacgtccattacatcgagccttgttttaaagggatcctcgtccaggcggaccgagacaatcgagagcatttcaaactgctggtggaggagttgatggtcaaaggtgtgggggtcgtggaccaagccctgagagaagccttccagatcctgaagcagttccaagaggccaagcaaggaagcctctgcaaccaggccatcatgctcatcagcgacggcgccgtggaggactacgagccggtgtttgagaagtataactggccagactgtaaggtccgagttttcacttacctcattgggagagaagtgtcttttgctgaccgcatgaagtggattgcatgcaacaacaaaggctactacacgcagatctcaacgctggcggacacccaggagaacgtgatggaatacctgcacgtgctcagccgccccatggtcatcaaccacgaccacgacatcatctggacagaggcctacatggacagcaag

SEQ ID NO: 4169 - DNA, 849 bp, Homo sapiens
atggtggagcaggagacagtcccacacgtggaggatcttgcgtctgcagcagcagggcagctcgatgcagtgcttgccaggagccagtgtggactctgcactggcttagcaaccggcattccagcatctccatgcgcaggcagtgccaggcaggagatccaggcaaggaccgaactaggaaatggccagaattcctgtcatggatatggctttggcatggggaagatagacctgaaaaccaagtcctgtagtgcagtggaattttctacttctggtcatgcttacactgatacagggaaagcatcaggcaacctagaacccgaatgtaaggtctgtaactatggacttaccttcactcaaaaacggaacacagacaatactcttgggacagaaatctctttggagaataagttggctaaagggttgaaactgagtcttgataccatattggtaccaaacacaggaaagaagagtggggaattgaaggcctcctataaatgggattgttttagtgttggcagtaatgttgatctagatttttccggaccaaccatctatggctgggctgtgttggtctttgaagggtggcttgccggctatcagatgagttttgacacagccaaatccaaattgtcacagaataatttcgccctgggttacgaggctgcagacttccagctgcacacacatgtgaccgatggcactgaatttggaggttctatctaccagaaggttaatgggattgaaatgtcaataaaccttgcttggacggctggagtaacaacacccattttggcattgctactaagtacaagctggattgtagaacttctctctctgctaaagtaa

SEQ ID NO: 4170 - DNA, 849 bp, Homo sapiens; identical to SEQ ID NO: 4169

SEQ ID NO: 4171 - DNA, 600 bp, Homo sapiens
ccattgcgctgccccggccgccagcccgcccagaagccacagacaagacataggtagccgtagttggactgacgggcagggccggcggggcagccccctccgcgtccccggccgtccccccttatcgccctgcgcccactcccatcgcccctgcccccggcggcggcctcgcgtgcgagggggctcccttcacctcagtgcctcagttcccctagctgtaaaacagggacggggcggcccagtggctgagaggagccggctgtggagccccgcccgccccccgccctctaggtggcccgccgtccgatgaggatcgttttttaagtgcaatacttggcccaccggcttcccgctgcccccatcgcgctcatgcaataaccgacccggccccggtccacgcgcgtcccgcggtgaccttggggagcagcaccccagctccctccagcactggcaccgaggggcgggcctggttgcgccgggcgcgggggcgaggctggggtcccgccaccgtgatgaatgtactgaccagctgaggcagcagtgcccccaccgtggcccctacgcccaattaacccccacacccccattccgcgcaatgaa

SEQ ID NO: 4172 - DNA, 381 bp, Homo sapiens
atgaagcccaagctgaattttaatgaccaacgggaaaaagccagtctaggaaagagacgacttgggacgcaacgacacctgcgcgtgtgcgtattgcctcagtggaggcgctccgctggtcctcctagagtttggtgccctgccgccgctgccccgccacgactgcggctgcggctgctccgggcagtgctgcggccgccgcgggcccagctgtatggtcttgggaggactccagtgcttgttgccctagcattaattgaaagtggaatgaaaaacgaagatgcagtacggtttattagagataaacggcacggcgcttttaacagcaagcaacttttgtatttggagaaatatcattctcaaatgcggcttcgctttgtg

SEQ ID NO: 4173 - DNA, 381 bp, Homo sapiens; identical to SEQ ID NO: 4172

SEQ ID NO: 4174 - DNA, 408 bp, Homo sapiens
ctttagcatttccaggtcatgtggctgcctttaagggtgatttggggatgcttaagaaattagtggaagatggagtaatcaatattaatgagcgtgctgataatggatcaactcctatgcataaagctgctggacaaggccacatagagtgtttgcagtggttaattaaaatgggagcagacagtaatattaccaacaaagcaggggagagacccagtgatgtggcaaagaggtttgcccatttggcagcagtgaagctgttagaggagctacagaaatatgatatagatgacgaaaatgaaattgatgaaaatgatgtgaaatattttataagacatggtgttgagggaagcactgatgccaaggatgatttatgtctgagtgacttggataaaacagatgccagaa

SEQ ID NO: 4175 - DNA, 408 bp, Homo sapiens; identical to SEQ ID NO: 4174

SEQ ID NO: 4176 - DNA, 599 bp, Homo sapiens
atggctgtgctgcccacatgtgctgatcttgacaaacctgccagggatgttttcaccaagggctatggatttggcctaataaagcttgatttgaaagaaaattctgagaatggattggaatttacaagctcagcttcagtcaacaccgagaccaccaaagtgaagggcagtctggaaaccaagtacagacagacagaccatggcctgatgtttacagagaaatggaacactgacaatacactaggcactgagattaccatgaagaataacacacatggactgaagctgacctttgattcatcctactcactggggaagaaaaatgtttggtggctccatttaccagaaaatgaaaaggaagttgagagcactgtgaatcttggctggacagcagaaaaatgtaaaacttgctttgaaatagcagccaagtatcagatcaaccctgatgcttgctttttggataaactgaacaacttcagcctgttaggtttaggatatattcagaccctaaagccaggtatcagactgacactgtcagctttcctgtatggtaagaacgttcaggctcacaagcttgatctaagactggaatttcaagt

SEQ ID NO: 4177 - DNA, 600 bp, Homo sapiens
ttcaagaaaaaaccggaccccaagcccgcagatgaagctgtccctcagatcatcatcagtgctgaagagcttccaggccccaaacttggcacatgtccttcacgcccaagctgcagcatggagctgtttgagagatctcatgcgctagagaaacagaacacactgcaactgcccccacaagccatggagaggagtaactcgtgtcccgaactggtgttgggaagactctcatactccatcatcagcaacctggatgaagttggacagcaggtggagaggttggacatccccctccccatcattgcccttattgtttttgcctacatttcctgtgcagctgccatcctccccttctgggagacacagttggatttcgagaatgccttctatttctgctttgtcacactcaccaccattgggtttggggatactgttttagaacaccctaacttcttcctgttcttctccatttatatcatcgttggaatggagattgtgttcattgctttcaagttggtgcaaaacaggctgattgacatatacaaaaatgttatgctattctttgcaaaagggaagttttaccaccttgttaaaaagtga

SEQ ID NO: 4178 - DNA, 600 bp, Homo sapiens; identical to SEQ ID NO: 4177

SEQ ID NO: 4179 - DNA, 569 bp, Homo sapiens
aagcagcaaacccctctgcatgtagctgctgatcgtggaaatgtggaactggtggaaaccctgctgaaggcaggctgtgacttgaaggctgttgacaagcaaggaaagactgccctggctgtggcctccaggagcaaccatagccttgtcgtgggcatgctcattaaagcagagagatactacgcctggagagaggagcatcatgagagcatcagggacccgtcaacaggctttactctgacattcaagcaagatcacagtctggagaccagacacattcgcacgcttctctgggacctggcttaccatcagctgaaggccaatgagtggcagaggctggcccgttcgtggaactttacagatgaccagattagagccattgaggagcagtggtcgggaaatgaaagcttccgtgaacatggccacagggctctgcttatctagctacacgggaccctgatgactcagggtgacccggccaagcaactgtatgaagagctggtacacgcaggtttcccaaaactagctgaaaagactcgtcatttcaaaagcaaaactgactcaaactc

SEQ ID NO: 4180 - DNA, 569 bp, Homo sapiens; identical to SEQ ID NO: 4179

SEQ ID NO: 4181 - DNA, 309 bp, Homo sapiens
atgattgcgcccctccacgtagctgtgctgggcatgaacaatgaggtgatgaagcttcacaaaggagctaagccatgcaaatcaaatacatttggatgttttcctattcatcaggctgtactttcaggttccaaagaatgcatggaaataatattgaagtttggtgaagagcacgggtacagcagacagtgtcacatcaactttgtggataacgggaaagccagccctctccatctggctgtgcaaaatggtgacttggaaatgatgaaaatgtgcctggacaatggtgtacaaatagacctagtggag

SEQ ID NO: 4182 - DNA, 309 bp, Homo sapiens; identical to SEQ ID NO: 4181

SEQ ID NO: 4183 - DNA, 105 bp, Homo sapiens
catggagctgacatcacaaggtgctggcacttattgcaatttaacaccagagttttgtggttgagaaagaaccaccaaagatctcaaataaaattgttgtgtggt

SEQ ID NO: 4184 - DNA, 600 bp, Homo sapiens
  misc_feature (575)..(576): n is a, c, g, or t
gaaaatagtttcaagcctgaatctcagaggcagagaactgttctaaatgtgactgatgagtatgacttactggatgatggtggtgatgctgtcttcagtcagctgactgaaaaagatgtgaattgccttgaaccatggttaataaaggaaatggatgcttgcctttctgatatatggctacataaagatattgatgcctttgctcaggtctttcatctcattttaactgaaaatgttagtgttgattacagacatagtgaaaccagtgcaacagctctgatggttgctgcaggacgtggctttgcaagtcaagtagaacagttaatcagtatgggagccaatgtccatagtaaagcatcaaatggctggatggcattggattgggctaaacactttgggcagactgaaattgtggatcttctagaatcttacagtgctacactggaatttggaaatctagatgaaagttctctggttcaaacaaatggaagtgacctcagtgctgaagacagagagctcctgaaagcttatcatcatagtttcgatgatgaaaaagtagacttggatttgatcanncatcttctatacaatatctgccat

SEQ ID NO: 4185 - DNA, 600 bp, Homo sapiens; identical to SEQ ID NO: 4184
  misc_feature (575)..(576): n is a, c, g, or t

SEQ ID NO: 4186 - DNA, 600 bp, Homo sapiens
gttggtacacatagcttctccagacccacccacccactctttcctgagccctgtgcttcggatggcggcgggaggttgatggcgagtggtgctgaagggacagctccagcagtggctgatttgggggagaaacaaaatctgcagatggaatccgagcagggcgacttcaccttcaagtgggccagcgaccatcccggtggcggccgcgagttcttcttcgaccggcacccgggcgtcttcgcctatgtgctcaattactaccgcaccggcaagctgcactgccccgcagacgtgtgcgggccgctcttcgaggaggagctggccttctggggcatcgacgagaccgacgtggagccctgctgctggatgacctaccggcagcaccgcgacgccgaggaggcgctggacatcttcgagacccccgacctcattggcggcgaccccggcgacgacgaggacctggcggccaagaggctgggcatcgaggacgcggcggggctcgggggccccgacggcaaatctggccgctggaggaggctgcagccccgcatgtgggccctcttcgaagacccctactcgtccagagccgccagggtaagg

SEQ ID NO: 4187 - DNA, 600 bp, Homo sapiens
cttcagagaccaatgagtatgttaacagatgtcaaacacttcttatcatctggaggaaatgtcaatgagaaaaacgatgaaggagtaaccctgttacacatggcgtgtgcgagtggctacaaggaggtggtgtctcttatcctggaacatggtggagacctcaacatagtagatgatcagtactggactcccctccacttggcagccaaatatggccagacaaatctggtgaaacttctcctgatgcatcaggcaaacccacacctcgtgaactgtaatgaggagaaggcgtcagatattgctgcctctgagtttattgaggaaatgctgctgaaagccgaaattgcctgggaagaaaaaatgaaagagcctttatctgcttctaccttagctcaagaagagccctatgaagagatcattcacgatcttcccgtactgtcgagtaagctcagtcccctggtgttaccaattgccaagcaagacagtttgttggaaaaagacattatgttcaaagatgcaacaaaaggtctgtgtaagcagcagtctcaggacagcatccctgaaaaccccatgatgagcggttccaccaaacccgagcag

SEQ ID NO: 4188 - DNA, 1400 bp, Homo sapiens
acagatgggacagggagatgaaagggacatgcaactaatagcccttgaacagctatgcatgctgcttttgatgtctgacaacgtggatcgttgttttgaaacatgtcctcctcgcactttcttaccagccctttgcaaaatttttcttgatgaaagtgctccagacaatgtattagaggtgacagcccgtgccataacatactacctggatgtatctgcggaatgtacccgaaggattgttggggtagatggagctataaaagcactttgtaatcgtttggttgtagttgaacttaacaacaggactagcagagacttagccgaacagtgtgtaaaggtattagaactgatatgtactcgtgagtcaggagcagtctttgaggctggtggtttgaattgtgtgcttaccttcattcgtgacagtggacatctagttcataaagacaccttgcactctgctatggctgtggtatcaagactctgtggcaaaatggagcctcaagattcttctttagaaatttgtgtagaatctctgtctagtttattaaagcatgaagatcatcaggtttcagatggagctctgcgatgctttgcatcactggctgaccgatttacccgtcgtggtgttgacccagctccattagccaagcatggattaactgaggagctgttatctcgaatggctgctgctggtggtactgtttcaggaccatcatcagcatgcaaaccaggtcgcagcaccacaggagctccatccaccactgcagattccaaattgagtaatcaggtgtcaacaattgatcttctgaggtcggagcttccagattcaattgaaagtgcattgcagggtgatgaaagatgtgtgcttgatactatgcgtttggttgaccttctcttggtgctattatttgaaggacgaaaagctttgccaaagtctagtgctggatctacaggcagaatcccaggactccggagattagatagttctggggagcgctcacatcggcagcttatagattgtattcgaagtaaagataccgatgcacttatagatgcaattgacacaggagcctttgaagtaaattttatggatgatgtaggtcagactctattaaactgggcctctgcttttggaactcaggaaatggtagaatttctttgtgagagaggtgcagatgttaatagaggtcaaaggtcatcatcattacattatgctgcatgttttggaagacctcaagtagcaaagactctgttacggcatggtgcaaatccagatctgagagatgaagatgggaaaactccattagataaagctcgagaaaggggccatagtgaagtggtagctattcttcagtctccaggtgattggatgtgtccagttaataaaggagatgataaga

SEQ ID NO: 4189 - DNA, 1400 bp, Homo sapiens; identical to SEQ ID NO: 4188

SEQ ID NO: 4190 - DNA, 600 bp, Homo sapiens
ctggcagcatgcaccaaccagcccgagattgtgcagctgctgatggagcacgagcagacggacatcacctcgcgggactcacgaggcaacaacatccttcacgccctggtgaccgtggccgaggacttcaagacgcagaatgactttgtgaagcgcatgtacgacatgatcctactgcggagtggcaactgggagctggagaccactcgcaacaacgatggcctcacgccgctgcagctggccgccaagatgggcaaggcggagatcctgaagtacatcctcagtcgtgagatcaaggagaagcggctccggagcctgtccaggaagttcaccgactgggcgtacggacccgtgtcatcctccctctacgacctcaccaacgtggacaccaccacggacaactcagtgctggaaatcactgtctacaacaccaacatcgacaaccggcatgagatgctgaccctggagccgctgcacacgctgctgcatatgaagtggaagaagtttgccaagcacatgttctttctgtccttctgcttttatttcttctacaacatcaccctgaccctcgtctcgtactaccgcccccgggaggaggag

SEQ ID NO: 4191 - DNA, 600 bp, Homo sapiens; identical to SEQ ID NO: 4190

SEQ ID NO: 4192 - DNA, 600 bp, Homo sapiens
gtgattggtttcatacttgaagacggatataaaggaagaatatttcctttatgtgtttctccagaatggtgcctgtttctctctgtgtctcaatgcctgggactggaggttgatagtttaagtgtgttcttaccgcctcctttttcctttaatcttatttttgatgaacacatatataggagaacatctatcctatgaataagaacctggtcatgctttactcctgtattgttattttgttcatttccaattgattctctacttttcccttttttgtattatgtgactaattagttggcatattgttaaaagtctctcaaattaggccagattctaaaacatgctgcagcaagaggaccccgctctcttcaggaaaagtgttttcatttctcaggatgcttcttacctgtcagaggaggtgacaaggcagtctcttgctctcttggactcaccaggctcctattgaaggaaccacccccattcctaaatatgtgaaaagtcgcccaaaatgcaaccttgaaaggcactactgactttgttcttattggatactcctcttatttattatttttccattaaaaataatagctggctattata

SEQ ID NO: 4193 - DNA, 600 bp, Homo sapiens; identical to SEQ ID NO: 4192

SEQ ID NO: 4194 - DNA, 600 bp, Homo sapiens
cgtgctgggccgcgacgaggcgcgccccggcggggccgaggcggctccctccaggcgctggctggagcgcatgcggcggaccttcgaggagcccacgtcgtcgctggccgcgcagatcctggctagcgtgtcggtggtgttcgtgatcgtgtccatggtggtgctgtgcgccagcacgttgcccgactggcgcaacgcagccgccgacaaccgcagcctggatgaccggagcaggataattgaagctatctgcataggttggttcactgccgagtgcatcgtgaggttcattgtctccaaaaacaagtgtgagtttgtcaagagacccctgaacatcattgatttactggcaatcacgccgtattacatctctgtgttgatgacagtgtttacaggcgagaactctcaactccagagggctggagtcaccttgaggacactcggtttgactctcaaacgttgctaccgagagatggttatgttacttgtcttcatttgtgttgccatggcaatctttagtgcactttctcagcttcttgaacatgggctggacctggaaacatccaacaaggactttaccagcattcctgctgcctgctg

SEQ ID NO: 4195 - DNA, 600 bp, Homo sapiens; identical to SEQ ID NO: 4194

SEQ ID NO: 4196 - DNA, 600 bp, Homo sapiens
atggatgacactaccctgaagttccatgatgttgttcctggagggattatttcattatgtatctggcatcatgacggatggacagaacttgttttggcggctgtggaaggggatcccagcaagctatcttgtctcgggcttactgaagattccttctaccgaaccgcaaattcagaacattttgagggtgagaagtggaagcactggacgtctcagagggcgtttgtggcgttgtatgtggcctcacacagaggccactttgatgctgtgcagtaccttctagaacacggagccagctgcctcagcagatcccccctgggcaggacacccctgcatgtggctgcagctatgggccggtcagactgtataatcctcctgctccagcatggggcctccatccacgacagagatgccaagggggagacccccatctccattgcacactgcctgaaccacacactgagcgagaggcagatggtcctcctccaccggatagcaaagtcggggataagggatctgaatgacttggtcatgaagaatgctttgcagagggtcaagtctgggtttaggtctgagaagatgacgatgacccctcattag

SEQ ID NO: 4197 - DNA, 600 bp, Homo sapiens
atgtatgccaacaccaaccgataccatgagatgctgaataatgtacgggacttcctaaaactctatcaggtcccaaaaggccttagtgagcgagtcatggattatattgtctcaacatggtccatgtcaaaaggcattgatacagaaaaggtcctctccatctgtcccaaggacatgagagctgatatctgtgttcatctaaaccggaaggtttttaatgaacatcctgcttttcgattggccagcgatgggtgtctgcgcgccttggcggtagagttccaaaccattcactgtgctcccggggacctcatttaccatgctggagaaagtgtggatgccctctgctttgtggtgtcaggatccttggaagtcatccaggatgatgaggtggtggctattttagggaagggtgatgtatttggagacatcttctggaaggaaaccacccttgcccatgcatgtgcgaacgtccgggcactgacgtactgtgacctacacatcatcaagcgggaagccttgctcaaagtcctggacttttatacagcttttgcaaactccttctcaaggaatctcactcttacttgcaatctgaggaaacgg

SEQ ID NO: 4198 - DNA, 600 bp, Homo sapiens; identical to SEQ ID NO: 4197

SEQ ID NO: 4199 - DNA, 483 bp, Homo sapiens
atgaggcagcagggaggagggcagggcgggctccaggcgggggccggctctggggccagtctgggccacggtcggggcccagtcgagggccggactggccacaaggaagaggaggatggggagggggctgggcctggcgagcagggcggtgggaagctggtgctcagctccctgtccaagcgcctctgcctggtctgtggggacgtggcctccggctaccactgcggtgtgtcatcctgtgaggactgcaaagccttcttcaagaggaccatccaggggagtatggagtacagctgtctggcctccaacgagtgtgagatcaccaagcggagacgcaaggcctgtcaggcctgccgcttcaccaagagcctgcgggagcgcgcctggaccgcgtccggggatgttgttcccgtaaattacatgagctattcaacacttcataagaaaataggatttgtgttagatgattttgcccaactgtag

SEQ ID NO: 4200 - DNA, 600 bp, Homo sapiens
ctgtgggtgctggccttctgtacatccttcggcttgctgctgtcctggtcctcgaaccgcttgctctactggctcagcttcccgtcacacacgcgggtgcaccgcgagtggagccgccagttacccttccccgccgtcactgtgtgcaacaacaacccgctgcgcttcccgcgcctctccaagggggacctctactatgccggccactggctcgggctgctgctgcccaaccgcaccgcgcgcccgcttgtcagcgagctgctgcggggcgacgagccgcgccgccagtggttccgcaagctggcggacttccgcctcttcctgcctccgcgccacttcgagggaatcagcgccgccttcatggaccgcctgggccaccagctggaggacatgctgctctcctgcaagtaccgcggcgagctctgcgggccgcacaacttctcctccgtgagttgccctccgcgcgaacccgctccctctgcgccccactccccggcagtcaggaggcctggtgttccgccccctcggggctgtccccaggcctcttgcagtgttaccactccacgatgccaaggcagaacccattcttgggtcccctga

SEQ ID NO: 4201 - DNA, 600 bp, Homo sapiens; identical to SEQ ID NO: 4200

SEQ ID NO: 4202 - DNA, 600 bp, Homo sapiens
tggagcacgtggagatgctgtgcatgggcttcttcacgctcgagtacctgctgcgcctagcctccacgcccgacctgaggcgcttcgcgcgcagcgccctcaacctggtggacctggtggccatcctgccgctctaccttcagctgctgctcgagtgcttcacgggcgagggccaccaacgcggccagacggtgggcagcgtgggtaaggtgggtcaggtgttgcgcgtcatgcgcctcatgcgcatcttccgcatcctcaagctggcgcgccactccaccggactgcgtgccttcggcttcacgctgcgccagtgctaccagcaggtgggctgcctgctgctcttcatcgccatgggcatcttcactttctctgcggctgtctactctgtggagcacgatgtgcccagcaccaacttcactaccatcccccactcctggtggtgggccgcgcccagtgagctgctcctccctcccctggttatcagccaccaggctttggcttctgatcctcgtcttcccccccacccccaatcgccgcatacagctaacaaaacggcgatggatgtcaaaagtggtggaaagagaactcagcagatca

SEQ ID NO: 4203 - DNA, 600 bp, Homo sapiens; identical to SEQ ID NO: 4202

SEQ ID NO: 4204 - DNA, 600 bp, Homo sapiens
tcacagccgctggagccgggcaccgtggagtgggcgcgccacgcgcccttcttccccgagctgccggtggccgaccaggtggcgctgctgcgcctgagctggagcgagctcttcgtgctgaacgcggcgcaagcggcgctgcccctgcacacggcgccgctactggccgccgccggcctccacgccgcgcctatggccgccgagcgcgccgtggctttcatggaccaggtgcgcgccttccaggagcaggtggacaagctgggccgcctgcaggtcgactcggccgagtatggctgcctcaaggccatcgcgctcttcacgcccgacgcctgtggcctctcagacccggcccacgttgagagcctgcaggagaaggcgcaggtggccctcaccgagtatgtgcgggcgcagtacccgtcccagccccagcgcttcgggcgcctgctgctgcggctccccgccctgcgcgcggtccctgcctccctcatctcccagctgttcttcatgcgcctggtggggaagacgcccattgagacactgatcagagacatgctgctgtcggggagtaccttcaactggccctacggctcgggccagtga

SEQ ID NO: 4205 - DNA, 600 bp, Homo sapiens
agctgctgctgagccaaggagcggacccggcgctgcgcgaccaggacggactccggccgctggacctggccctgcagcagggacacctggagtgcgcgcgagtcctgcaggatctcgacacgcggaccaggacccggacccggatcggggcagagactcaggagcccgagcctgcacctggcaccccaggcctctctggacctaccgatgagacgctggactccatagcactccaaaagcagccatgcagaggtgacaacagggacattggctgggaggctgacccaggaccccccagcctccctgttccccttgaaactgtggacaaacatgggagctcggcgtcccctccagggcactgggattacagctcagacgcctctttcgtcacagcggttgaggtctctggagctgaggacccagcctcggacactcccccctgggctgggtcattgccaccgaccaggcagggacttctgcatgttgtccatgccaaccagagggtacctaggtctcagggcacggaggcagaactgaatgcccgtctgcaggccctgactctgaccccaccaaatgctgctggcttccagtcctcccctt

SEQ ID NO: 4206 - DNA, 600 bp, Homo sapiens; identical to SEQ ID NO: 4205

SEQ ID NO: 4207 - DNA, 600 bp, Homo sapiens
tcagttctatatgaacttggaattattggaaataataaaataaggggctgtggaggttgatattattaatagtgttatgcagaaaatatgaatggcagggaggggcagagagaaaaatccatttcttcatttaaatcaaattttaaaaatcttgaaccttagaatctaaaacttacagtaatttaaaaccaaccaaaatcacatcctaatttttctgagccctttcttttcatgaaaaattacatattataaaacagaagtttggggggaaaaaatctatgttttaccatacaataagttgacaaaaactggagaaactagaacaaacaaatccaactatgtagtactgaaaacaacaagaaaatggcttatttcattaaaaacagtataaccattcatttaaactgaatgaccagacttgctgtctttaaaaacccaaacttgagattaacaaaaattacagtatatttttaacattatactgttaaaagctggtgggagttttaaaagttcatttttacagcttttgtaagcatacaatattactttaaaaaaatgacttttactaggagattcagcaaaacagatgtaggaatgttc

SEQ ID NO: 4208 - DNA, 1400 bp, Homo sapiens
ctaacctgccataaccctttgtgctggcctgcggccaggcagaggaagagaggtcgactgtggggtcatttggtgccaaacatggaggtgggcaggctcacctgttcctgggactgtctgagatggcagggcacttgccctggtggctcccacctgaccccaggccttttataggcaggagccccactgcttccagcctctggtgccaacacagttgccaaacccattgagcttggggctgccctgtggaggcctcctgggtatggaccaggggcttgttgagagctgagccatgcacacaggtgcagacaccccccaactcccatgcacacggctagtccaggcgcctccacgctgcaccgtgaggactgcagggcatgtccccgtgaggggctatgggcctctgtaggtgggcttccaaggtcctgggtgcagccgggtgcatggcagcccttctggcgggggtgagcgcacgaccaaagtcactggaagccgggtttccggaagctcgcagcttggcctgcaccacacgccctccccttttggcttcacgccatcaggcctcaagtgggcatgggggcagggacgggcccaggaactgttgttttctcaggattctttcagctgggaacatggcaggtgagcagagcttggtgcctctgccgtggcccctgctggggcagcccgtgttgccggagcctctaagccaaagagcccgttggccgtggttggtgggggtggacgtgggggtgtcccacctggaccagactggcgtgggtgagctccacaccctgcctggcaatggtatgagagtcggacctggacagggccagctgctgggggagcggcactggggactggaggctggaagcgggtggtgtgtgtcccctgtttacttttagctgagctggggttgggtgtacgggttctgttcctctgagccctgcggcccacctgatgtttacgtgtgtgtgtgagggggggcgggggtggcaggtgtccccccctggtccccgccccaagagcctgctgtctgtatggaggaggtgctagcccggtccaccgggctgctgcccacccctgcatgccccagttgcccaccccgcctgcccctggacatgaagtggtcacgcttcatccacggctccttcccacccctcggcagtggctgtgcaatgttttaagttcacaagttcctgctcctccccacactgagctcctttgttcctccccctccagcctttgcctgggaactggtccttgtttgccgggcttctcggagggttcactgtacattcgttctcaggtggtcttgtggctgtctttcggaaaatggttattttatatgatttgtcatggaatttgttctaataaatcattcttctatcacatggcagcac

SEQ ID NO: 4209 - DNA, 600 bp, Homo sapiens
gccttaaccctaggcgtggaagagaaaatgtgaggttgtttagatactcatcaggacctcacaggagctgagacttatcagccagaatgtgttcttcggacagtcgtacacatcttacagaaaaccctccttgtagagttggttgtggtatgtgtttgatgctataaagctcatttttaatgtgtacacctgctctagggacgattcgtttgaaagagagtaagatgcattaacagaaactatcctgggattaggtgaaaaatgtctagcaaaagaaacaaagtctttaatagagtggcctctttcgctcttcgattatgactgctgcagttttaccccagcagtcagctgtctttgtcaaccatacgtttttggagattgggtctagcacatgtcacccttgtccacgttgtttcacatctggttagggggcagattttaaaatgtagttttgtaatgttacatttaagcatgataaatgattagactaccagatgttactagtgctaactttgtattcttagacattaaaatgattgacataaactctttgtgccttgaaaatgaaacaaattataaaaatgtttaaatggaaccaat

SEQ ID NO: 4210 - DNA, 600 bp, Homo sapiens; identical to SEQ ID NO: 4209

SEQ ID NO: 4211 - DNA, 1400 bp, Homo sapiens
gcattggcctgggcggcagagccccacggcctcgctatgaggaacatgctttctgtgccaacctggggcccgtccagagcagcagcagcagcgagggcctggccagagcccaggggctcagcagcgaagcttctgtggagagcaacgaggactcggatcatgcctgtaaaagctcagctcgcaaacaagctaaaagttacatgaagaccaagaatcctgacagccagtggcctccccgcgctgcaactgacagggaaggctttctcgctgagtccagcccccagactcagagggccccctactcaggaccccaggaccttgccgcactgctggagcagatcgggtgtctgaagtacctgcaggtgtttgaggagcaggacgtggacctccgcatctttctgaccctcactgagagcgacctgaaggaaattggcatcacgctgtttgggcccaagaggaagatgacgtccgccattgcccgctggcacagcagtgcccgcccacccggggatgccctggagctggcctacgccgaccggctggaggctgagatgcaggagctcgccatccagctgcacaagcgctgcgaggaggtagaggccacgcggggccaggtgtgtcaggagcaggagctgcgcgccgtggtggagagctgcctgctggagcaggaccgcgcccgcgaggacctccaggcccggctgcgggagacgtgggccctggcccgggatgctgccctcgtcctggaccagctgcgagcctgtcaagctgagctgtcatctcgagtgaggcaggaccagccccctggtgcagccactctgggcctagccgtccccccagctgactccaagggctggcaagcgtccctgcaggccatgagcctccccgagctctcgggagccctggaggaccgtgtccgtgagatggggcaagcactgtgcttagtgacccagagcctggagaagctgcaggtgctgaacgggaagaagtggcgggagacctagcctgcgggccgaatctgacgttgggtgattggtccaccctgaagctgtgtgccagggagtgaggaggacagtgagcaggtagctgccatgtgcagcccaggcccagtgggggccagaggatcaggccccgggagcagccggcagacagaggcaagacgggggctgcggccctggctcggcagctcgggccagcactgaggcgggacgagggcctcacccagaacctcgtggtgaggcccagagttcatgggctgccctggcccataccaggcagggccctggggggaaagtgtatccatatacacgcacaggtgccaactgaggtgggaccttaggaatgaggactggggcacctggaaaatgccattttttggaaaataaaatttaagaacagctagt

SEQ ID NO: 4212 - DNA, 1096 bp, Homo sapiens
aggtgcactgcctttccacactctcccttctgtactcagccagctgctgctgaggtgggaggaaaagtcctggctgggagaattgagctagtgcagcacacgtaaaaaagcgattccgatgggtcctttgaaagcttttctcttctccccttttcttctgcggagtcaaagtagaggggtgaggttggtcttcttgttactgaccctgcatttgggaaactgtgttgataaggcagatgatgaagatgatgaggatttaacggtgaacaaaacctgggtcttggccccaaaaattcatgaaggagatatcacacaaattctgaattcattgcttcaaggctatgacaataaacttcgtccagatataggagtgaggcccacggtaattgaaactgatgtttatgtaaacagcattggaccagttgatccaattaatatggaatatacaatagatataatttttgcccaaacctggtttgacagtcgtttaaaattcaatagtaccatgaaagtgcttatgcttaacagtaatatggttggaaaaatttggattcctgacactttcttcagaaactcaagaaaatctgatgctcactggataacaactcctaatcgtctgcttcgaatttggaatgatggacgagttctgtatactctaagattgacaattaatgcagaatgttatcttcagcttcataactttcccatggatgaacattcctgtccactggaattttcaagctatggataccctaaaaatgaaattgagtataagtggaaaaagccctccgtagaagtggctgatcctaaatactggagattatatcagtttgcatttgtagggttacggaactcaactgaaatcactcacacgatctctggtatcactacagttctgactatgacaaccctgagtacaattgccaggaagtctttacctaaggtttcttatgtgactgcgatggatctctttgtttctgtttgtttcatttttgtttttgcagccttgatggaatatggaaccttgcattattttaccagcaaccaaaaaggaaagactgctactaaagacagaaagctaaaaaataaagcctcg

SEQ ID NO: 4213 - DNA, 600 bp, Homo sapiens
gcaagcctgtattgatggggactttaattattccaagcggcttttggaaagtggctttgacccaaatattcgtgacagcaggggcagaacaggccttcaccttgcagcagctcgagggaatgtagacatctgccagttactgcataaattcggtgccgatcttctggccacagattatcaaggaaacacagctcttcacctctgtggccatgtggatactatccaatttttggtttccaatggactcaaaattgatatttgcgcagaggagtaaataaagatgtcatccgattgctggaatctttggaagaacaggaggtgaaaggatttaacagaggaacccactcgaaactggagaccatgcaaacagctgagagtgaaagtgccatggaaagccattcactcctcaatcccaacctgcagcaaggtgaaggagtcctctccagcttccgaaccacgtggcaggagtttgtggaggatctgggcttctggagagtattgctgttgatcttcgtcattgctttgctgtctcttggcattgcttattatgtgagtggggtgctacccttcgtggaaaaccagcctgaactggtgcattaa

SEQ ID NO: 4214 - DNA, 600 bp, Homo sapiens
ctgccccagtttatcttgcgggatgagaaggatctaggctgttgtaccaagcactacaacacagggaaattcacctgcatcgaggtaaagtttcacctggaacggcagatgggctactatctgattcagatgtacatccccagcctactcatcgtcatcctgtcctgggtctccttctggatcaacatggatgctgcccctgcccgtgtgggcctgggcatcaccaccgtgctcaccatgaccacccagagctctggctcccgggcctctttgcctaaggtgtcctacgtgaaggcaatcgacatctggatggctgtgtgtctgctctttgtgttcgctgccttgctggagtatgctgccataaattttgtttctcgtcagcataaagaattcatacgacttcgaagaaggcagaggcgccaacgcttggaggaagatatcatccaagaaagtcgtttctatttccgtggctatggcttgggccactgcctgcaggcaagagatggaggtccaatggaaggttctggcatttatagtccccaacctccagcccctcttctaagggaaggagaaaccacgcggaaactctacgtggactga

SEQ ID NO: 4215 - DNA, 600 bp, Homo sapiens; identical to SEQ ID NO: 4214

SEQ ID NO: 4216 - DNA, 132 bp, Homo sapiens
ctggagccatcgcccaagatccgggtcatacatccacatcaggcctggccagcttggatgttcttaaagagttccacaaagcagattactgcacsggcmacaaaggatgggacttttgkcatttcaaagaca

SEQ ID NO: 4217 - DNA, 600 bp, Homo sapiens
ttcctgccgcgctggggctccggcaaggacctgtccgccctggcgcacctggtgctgcctgccgggcccgagcggccccgcgccagcctcctggccttcgcggaggacgcaccactgtcccgcgcgcgccgccgctcggccgagagcctgctgtcgctgcggccctcggccgtggatagcggcccgcggggagcccgcgactcgccccccggcagcccgcgccgccgccccgggcccggcccccgctccgcctcggcctcgctgctgcccgacgccttcgccctgaccgccttcgagtgcgagccacaggccctgcgccgcccgcccgggcccttccccgctgcgcccgccgcccccgacggcgcagatcccggagaggccccgacgcccccaagcagcgcccagcggagcccagggccacgcccctctgcgcactcgcacgccggctctctgcgccccggcctgagcgcgtcgtggggcgagcccggggggctgcgcgcggcgggcggcggcggcagcaccagcagcttcctgagttccccctccgagtcctcgggctacgccacgctgcactcggactcgctgggctccgcgtcctag

SEQ ID NO: 4218 - DNA, 79 bp, Homo sapiens
gtacatgttatatttattttgaaaccagtttaatgggatacaaccagcattttaaaaaatgaaatagaatacagcatgg

SEQ ID NO: 4219 - DNA, 187 bp, Homo sapiens
tcaagaacgccgcctgtcatccaccggcgtggggtgagccgggagaaatcgagcgggaagtgaacatcctgcgggagatccggcaccccaacatcatcaccctgcacgacatcttccaaacaagacggacgtggtcctcatcctgaactggtctctggcggggactcttttgacttcctgggaaaaa

SEQ ID NO: 4220 - DNA, 149 bp, Homo sapiens
acactctcgaaagcgatgggaacgctttgtccacagtgaaaatcagcaccttgtcagccctgaggccttggatttcctggacaaactgctgcgatatgaccaccagtcacggcttactgcaagagaggcaatggagcacccctatttct

SEQ ID NO: 4221 - DNA, 96 bp, Homo sapiens
agtgtctgaccagctggtgccggacgtcaacatggaagagaacttggaccctttctttaactgagctcatgccccacggagacttagcaggttcca

SEQ ID NO: 4222 - DNA, 84 bp, Homo sapiens
tgaagaggatgtaagtcagtttgattccaagtttacacgtcagacacctgtcgacagcccagatgactcaactctcagtgaaag

SEQ ID NO: 4223 - DNA, 96 bp, Homo sapiens
tctgctccaggaaacctactggtgaaagaagggtttggtgaagggggcaagagcccagagctccccggcgtccaggaagacgaggctgcatcctga

SEQ ID NO: 4224 - DNA, 87 bp, Homo sapiens
atggtggcctatgatcccgatgagagaatcgccgcccaccaggccctgcagcacccctacttccaagaacagagaaacagtccctaa

SEQ ID NO: 4225 - DNA, 88 bp, Homo sapiens
ggtagcagcagtcaggggtcaggtgtcaggcccgtcggagctgcctgcagcacatgcgggctcgcccatacccatgacagtggctgag

SEQ ID NO: 4226 - DNA, 1400 bp, Homo sapiens
aggcccaccctgcaactcccactggccaacgatgggggcagccgctcaccatcctcagagagctccccacagcaccctacaccccccacccggccccgccacatgctggggctcccatcaaccttgttcacaccgcgcagtatggagagcatcgagattgaccagaagctgcaggagatcatgaagcagacagggtacctgactatcgggggccagcgttatcaggcagaaatcaatgacttggagaacttgggtgagatgggcagtggtacctgtggtcaggtgtggaagatgcggttccggaagacaggccacatcattgctgttaagcaaatgcggcgctctgggaacaaggaagagaataagcgcattttgatggacctggatgtagtactcaagagccatgactgcccttacatcgttcagtgctttggcaccttcatcaccaacacagacgtctttattgccatggagctcatgggcacatgtgcagagaagctgaagaaacgaatgcagggccccattccagagcgaatcctgggcaagatgactgtggcgattgtgaaagcactgtactatctgaaggagaagcatggcgtcatccatcgcgatgtcaaaccctccaacatcctgctagatgagcggggccagatcaagctctgtgactttggcatcagtggccgccttgttgactccaaagccaaaacacggagtgctggctgtgctgcctatatggctcccgagcgcatcgaccctccagatcccaccaagcctgactatgacatccgagctgatgtgtggagcctgggcatctcactggtggagctggcaacaggacagttcccctataagaactgcaagacggactttgaggtcctcaccaaagtcctacaggaagagcccccactcctgcctggtcacatgggcttctcaggggacttccagtcatttgtcaaagactgccttactaaagatcacaggaagagaccaaagtataataagctacttgaacacagcttcatcatcaagcactatgagatactcgaggtggatgtcgcgtcctggtttaaggatgtcatggcgaagaccgagtccccaaggactagtggagtcctgagtcagcaccatctgcccttcttcagtgggagtctggaggagtctcccacttccccaccttctcccaagtccttccctctgtcaccagccatccctcaggcccaggcagagtgggtctcgggcaggtagggacctggagtggcctggtcccaccctctgacctcctcctcaggccaccagtgttgccctcttccctttttaaaacaaaatacccttgtttgtaaatccttagacgcttgagaataaaacccttcccttttcttccgaaaaaaaaaaaaaaaaaa

SEQ ID NO: 4227 - DNA, 600 bp, Homo sapiens
ctgcctcagcctcccaagtatttgggattacaggcgtgttccaccacacctggctaattttttgtatttttagtagagacggggtttcgccatgttggccaggctggtctcgaaatcctgacctcagatgatccacccgccttggcctcccaaagtgctgggattacaggcgcgagccaccgcgcctggcccaatgtatttggattcttaaagaacactttcaaattaaatatcagttgaagagaactagaactaaagaatttctgtgtcaaactgtttagcaaatgtaagtagaagctgggagatgtgtcctggaatgaatgaatacatcagtaaaataccatacgtatgttatgatgttattgtttccttgccttggttgatttggttttactgtgaaataattttcaatatagaattgtgatcgttggaatttggtcatctactagaaaatgagaaagaagttaatagctatcttccttaaagatttctgaggttgggattaaggtagtgttcccaaggtgttctaaaacggcagcgagagctgtgcactcacttcacaaatttgaattcctgctctgtgttaggcgctgtgctagg

SEQ ID NO: 4228 - DNA, 284 bp, Homo sapiens
  misc_feature (104)..(104): n is a, c, g, or t
  misc_feature (107)..(107): n is a, c, g, or t
  misc_feature (110)..(112): n is a, c, g, or t
  misc_feature (118)..(118): n is a, c, g, or t
  misc_feature (125)..(126): n is a, c, g, or t
  misc_feature (128)..(128): n is a, c, g, or t
  misc_feature (130)..(130): n is a, c, g, or t
  misc_feature (132)..(132): n is a, c, g, or t
  misc_feature (135)..(135): n is a, c, g, or t
  misc_feature (137)..(137): n is a, c, g, or t
  misc_feature (144)..(144): n is a, c, g, or t
  misc_feature (160)..(160): n is a, c, g, or t
  misc_feature (162)..(162): n is a, c, g, or t
  misc_feature (165)..(165): n is a, c, g, or t
  misc_feature (176)..(177): n is a, c, g, or t
  misc_feature (186)..(186): n is a, c, g, or t
  misc_feature (189)..(189): n is a, c, g, or t
  misc_feature (192)..(192): n is a, c, g, or t
  misc_feature (196)..(196): n is a, c, g, or t
  misc_feature (200)..(200): n is a, c, g, or t
  misc_feature (207)..(207): n is a, c, g, or t
  misc_feature (209)..(209): n is a, c, g, or t
  misc_feature (214)..(214): n is a, c, g, or t
  misc_feature (219)..(220): n is a, c, g, or t
  misc_feature (224)..(224): n is a, c, g, or t
  misc_feature (229)..(229): n is a, c, g, or t
  misc_feature (236)..(237): n is a, c, g, or t
  misc_feature (248)..(248): n is a, c, g, or t
  misc_feature (254)..(254): n is a, c, g, or t
  misc_feature (261)..(261): n is a, c, g, or t
  misc_feature (263)..(263): n is a, c, g, or t
  misc_feature (268)..(268): n is a, c, g, or t
  misc_feature (275)..(275): n is a, c, g, or t
  misc_feature (278)..(278): n is a, c, g, or t
gttttgcccctttttagcctcccagagcttcgaggactcaattcgaacccgaaatcctgccgtgggggaggggtggcagggagacctgtgcccggggaggttgntangcnnnaatctnggacttnntncngnccntncatgtanacagtgaaatgactgnanacntggtgacccgnngataccggnctnccnaggncatnatgaatngnatgcnctacnngcanacggnggacatnnggtctgtgggntgtatnatggcgnanatgancacaggnaanacgctg

SEQ ID NO: 4229 - DNA, 600 bp, Homo sapiens
ggtcgacagagaaaaccttcaccatcccagtgactgatataaacagtgggatcccaggaattgatgaggtcatgaagactaccaaaatcatcattgggtgttttgtggccatcacactcatggctgcagtgatgctggtcattttctacaagatgaggaagcagcaccatcggcaaaaccatcacgccccaacaaggactgttgaaattattaatgtggatgatgagattacgggagacacacccatggaaagccacctgcccatgcctgctatcgagcatgagcacctaaatcactataactcatacaaatctcccttcaaccacacaacaacagttaacacaataaattcaatacacagttcagtgcatgaaccgttattgatccgaatgaactctaaagacaatgtacaagagactcaaatctaaaacatttacagagttacaaaaaacaaacaatcaaaaaaaaagacagtttattaaaaatgacacaaatgactgggctaaatctactgtttcaaaaaagtgtctttacaaaaaaacaaaaaagaaaagaaatttatttattaaaaattctattgtgatctaaagcagacaaaaa

SEQ ID NO: 4230 - DNA, 221 bp, Homo sapiens
cccgagaggtgccacatcagaccgcctccgacttcgtgcgggactcggcggccagccaccaggcggagcccgaggcgtacgagcggcgcgtgtgcttcctgcttctgcaactctgcaacgggctggagcacctgaaggagcacgggatcatccaccgggacctgtgcctggagaacctgctgctggtgcactgcaccctccaggccggccccgggcccgcc

SEQ ID NO: 4231 - DNA, 600 bp, Homo sapiens
gggcccttccggccgctctgggccctgctggccttcgcgctgcccgccctcctgctgctcggcgcctacggcggcatcttcgtggtggcgcgtcgcgctgccctgaggcccccacggccggcgcgcgggtcccgactccgctcggactctctggatagccgcctttccatcttgccgccgctccggcctcgcctgcccgggggcaaggcggccctggccccagcgctggccgtgggccaatttgcagcctgctggctgccttatggctgcgcgtgcctggcgcccgcagcgcgggccgcggaagccgaagcggctgtcacctgggtcgcctactcggccttcgcggctcaccccttcctgtacgggctgctgcagcgccccgtgcgcttggcactgggccgcctctctcgccgtgcactgcctggacctgtgcgggcctgcactccgcaagcctggcacccgcgggcactcttgcaatgcctccagagacccccagagggccctgccgtaggcccttctgaggctccagaacagacccccgagttggcaggagggcggagccccgcataccaggggccacctgagagttctctctcctga

SEQ ID NO: 4232 - DNA, 600 bp, Homo sapiens
agtgctgggaaagccaaggtggacactctggaggtgatacggcatccggaagaaaccaccaacatgaagaggcaaactgtggcttcttacttccggtattctctgatggacctgctctccaaaatggtggttggacagccccactttgtgcgctgcattaaacccaatgatgaccgagaggccctgcagttctctcgagagagggtgctggcccagctccgctccacagggattctggagacagtcagcatccgccgccagggctattcccaccgcatcctttttgaagaatttgtgaaaaggtattattacttggcattcacagcacatcaaacacctcttgctagcaaagagagctgtgtggctatcttggaaaagtccagattagatcactgggtgctgggaaaaacaaaggtttttctcaaatattaccatgttgagcaattaaatttgctgcttcgagaagtcataggcagagtggttgtgctgcaggcatataccaaggggtggcttggagccaggagatacaacaaggtcagagagaagagagagaagggagccattgccatccagtcagcctggagaggatatgatgctcgg

SEQ ID NO: 4233 - DNA, 214 bp, Homo sapiens
  misc_feature (60)..(60): n is a, c, g, or t
  misc_feature (62)..(62): n is a, c, g, or t
  misc_feature (81)..(81): n is a, c, g, or t
  misc_feature (83)..(83): n is a, c, g, or t
  misc_feature (118)..(118): n is a, c, g, or t
  misc_feature (165)..(165): n is a, c, g, or t
  misc_feature (167)..(168): n is a, c, g, or t
atggagtacctgcccagcggctgcttgcgcgaacttcctggcagcggcaccgcgcgcgcntngatgccagccgcttccttntntattccttcgcagatctgcaagggcatggagtacntgggcttcccgccgctgcgtgcaccgcgacctggccgcccgaaacancnnccgtggagagcgaggcacacgccaagccgctgacttcggcctagca

SEQ ID NO: 4234 - DNA, 600 bp, Homo sapiens
gtcggatttttccctccaaacttcatcattcgggtccgggctggagaacgtgtgcaccgcgtgacgagatccttcgtggggaaccgcgagatagggcagatcactctcaagaaggaccagatcgtggtgcagaaaggagacgaagcgggcggctacgtcaaggtctacaccggccgcaaggtggggctgtttcccaccgactttctagaggaaatttaggcgtgcgggcgcctgcaagcgggagacacccacaccccattctgggcgggcccagtggagtttggggaggggggcgaaagcaacgggactgctgggagaggaggggtaggaaggcccgcctgagcgcgacggggcttccgggaagggactggttctcgcccccttccccagcctggggcctcggatacctgctgcccagagcagcccggacccgaaacctttcaggccccgcttgcaagagctggaaaaaaacgcgtatctactaggaggagccagggactggggcggggggcgggggcgagggagggcgaactgtcgaatgttgcgaatttattaaacttttgacaaaacttaaaaaaaaaaaaaaaaaaaaaaaaaaaa

SEQ ID NO: 4235 - DNA, 1400 bp, Homo sapiens
tgctggcaagagtcggcacaatgaggaccaggcttgctgtgaagtggtgtatgtggaaggtcggaggagtgttacaggagtacctagggagcctagccgaggccagggactctgcttctactactggggcctatttgatgggcatgcagggggcggagctgctgaaatggcctcacggctcctgcatcgccatatccgagagcagctaaaggacctggtagagatacttcaggacccttcgccaccacccctctgcctcccaaccactccggggaccccagattcctccgatccctctcacttgcttggccctcagtcctgctggtcttcacagaaggaagtgagccacgagagcctggtagtgggggccattgagaatgccttccagctcatggatgagcagatggcccgggagcggcgtggccaccaagtggaggggggctgctgtgcactggttgtgatctacctgctaggcaaggtgtacgtggccaatgcaggcgatagcagggccatcattgtccggaatggtgaaatcattccaatgtcccgggagtttaccccggagactgagcgccagcgtcttcagctgcttggcttcctgaaaccagagctgctaggcagtgaattcacccaccttgagttcccccgcagagttctgcccaaggagctggggcagaggatgttgtaccgggaccagaacatgaccggctgggcctacaaaaagatcgagctggaggatctcaggtttcctctggtctgtggggagggcaaaaaggctcgggtgatggccaccattggggtgacccgaggcttgggagaccacagccttaaggtctgcagttccaccctgcccatcaagccctttctctcctgcttccctgaggtacgagtgtatgacctgacacaatatgagcactgcccagatgatgtgctagtcctgggaacagatggcctgtgggatgtcactactgactgtgaggtagctgccactgtggacagggtgctgtcggcctatgagcctaatgaccacagcaggtatacagctctggcccaagctctggtcctgggggcccggggtaccccccgagaccgtggctggcgtctccccaacaacaagctgggttccggggatgacatctctgtcttcgtcatccccctgggagggccaggcagttactcctgaggggctgaacaccatccctcccactagcctctccatacttactcctctcacagcccaaattctgaagttgtctccctgacccttctttagtggcaacttaactgaagaagggatgtccgctatatccaaaattacagctattggcaaataaacgagatggataaaggtgaaaaaaaaaaaaaaaaaaaaaaaaaaaaaaaaaaaaaaaaaaaaaaaa

SEQ ID NO: 4236 - DNA, 600 bp, Homo sapiens
ccgtccatctcgcccaacttcaacttcctgggccagctgctggagtaccagagcagcccgaagctgctggccgccgtgcagggcgacgcgggcaccccctcaggaatgcaggagcctccccccagccctgcggccggggccccactgccatggctgccaccacctacctcagagaccgctgccaccaggagtgcggctgccagggagggcggcccgagcgcgggcaggaagcccccggcgccccccacggccaccagcacgctgcagcagggcctgcgcagcctgcgcctctcctcggaccacctgcaggacaccagccgcctcaagccctccttctctctggacatcaagcacgcccacggcccggcgcgctaccccgcgcgcggcctgaacttcggctacgcggctgccgggccctggccagccggccagccccggagcctggacgccaccgctcgactccctgaagcgtcctcggtgcttcagccccgagggcgtgcaagggccgggcagggtgctgtttgcgcccttcggccgggcgggcgccccggaacccaacggctgcagcgacctgccacggcgggaggcagcaacggctga

SEQ ID NO: 4237 - DNA, 237 bp, Homo sapiens
atgaccaactgcgagttcaacgtgaactcgttcgggcccgagggccagacggcgctgcaccagtcggtcatcgacggcaacctggagctcgtgaagctgctggtcaagttcggcgccgacatccgcctggccaaccgcgacggctggagcgcgctgcacatcgccgcgttcggtggccaccaggacatcgtgctctatctcatcaccaaggcgaagtacgcggccagcggccggtga

SEQ ID NO: 4238 - DNA, 600 bp, Homo sapiens
cccaggacccctgcggccccgactgtgcgccccccgcgcccggccttccccggggtccctgcggccccgactgtgcgccccccgcgcccggcctcccccaggacccctgcggccccgactgtgcgccccccgcgcccggcctccccccggacccctgcggctccaactgtgctccccccgacgccgtcagagccgccgcgctcccaccccagactccaccgcagacccgcaggaggcggcgtgccaagatcaccggccgggagcgcaaggccatgagggtcctgccggtggtggtcggggccttcctgctgtgctggacgcccttcttcgtggtgcacatcacgcaggcgctgtgtcctgcctgctccgtgcccccgcggctggtcagcgccgtcacctggctgggctacgtcaacagcgccctcaaccccgtcatctacactgtcttcaacgccgagttccgcaacgtcttccgcaaggccctgcgtgcctgctgctgagccgggcacccccggacgccccccggcctgatggccaggcctcagggaccaaggagatggggagggcgcttttgtacgttaattaaacaaattccttccc

SEQ ID NO: 4239 - DNA, 600 bp, Homo sapiens
aaaagcaggagagatattctgcatcagtttgcagttcactgcaaatcttttacattaaggcaaagattgaaaacatgcttaaccactagcaatcaagccacaggccttatttcatatgtttcctcaactgtacaatgaactattctcatgaaaaatggctaaagaaattatattttgttctattgctagggtaaaataaatacatttgtgtccaactgaaatataattgtcattaaaataattttaaagagtgaagaaaatattgtgaaaagctcttggttgcacatgttatgaaatgttttttcttacactttgtcatggtaagttctactcattttcacttcttttccactgtatacagtgttctgctttgacaaagttagtctttattacttacatttaaatttcttattgccaaaagaacgtgttttatggggagaaacaaactctttgaagccagttatgtcatgccttgcacaaaagtgatgaaatctagaaaagattgtgtgtcacccctgtttattcttgaacagagggcaaagagggcactgggcacttctcacaaactttctagtgaacaaaaggtgcctattctttttt

SEQ ID NO: 4240 - DNA, 600 bp, Homo sapiens
accaaaataactattccagtcattaaaagattgctacttctatgttggtcggtccctggagcatttgccttcggggcggtcttctcagaggcctatgcagatggaatagagggctatgacatcttggttgcttgttccagttcctgcccagtgatgttcaacaagctatgggggaccaccttgtttatggcaggtttcttcactcctgggtctatgatggtggggatttacggcaaaatttttgcagtatccagaaaacatgctcatgccatcaataacttgcgagaaaatcaaaataatcaagtgaagaaagacaaaaaagctgccaaaactttaggaatagtgataggagttttcttattatgttggtttccttgtttcttcacaattttattggatccctttttgaacttctctactcctgtagttttgtttgatgccttgacatggtttggctattttaactccacatgtaatccgttaatatatggtttcttctatccctggtttcgcagagcactgaagtacattttgctaggtaaaattttcagctcatgtttccataatactattttgtgtatgcaaaaagaaagtgagtag

SEQ ID NO: 4241 - DNA, 1400 bp, Homo sapiens
accggctcatcttcccggctgtcaccctgtgcaacatcaacccactgcgccgctcgcgcctaacgcccaacgacctgcactgggctgggtctgcgctgctgggcctggatcccgcagagcacgccgccttcctgcgcgccctgggccggccccctgcaccgcccggcttcatgcccagtcccacctttgacatggcgcaactctatgcccgtgctgggcactccctggatgacatgctgctggactgtcgcttccgtggccaaccttgtgggcctgagaacttcaccacgatcttcacccggatgggaaagtgctacacatttaactctggcgctgatggggcagagctgctcaccactactaggggtggcatgggcaatgggctggacatcatgctggacgtgcagcaggaggaatatctacctgtgtggagggacaatgaggagaccccgtttgaggtggggatccgagtgcagatccacagccaggaggagccgcccatcatcgatcagctgggcttgggggtgtccccgggctaccagacctttgtttcttgccagcagcagcagctgagcttcctgccaccgccctggggcgattgcagttcagcatctctgaaccccaactatgagccagagccctctgatcccctaggctcccccagccccagccccagccctccctatacccttatggggtgtcgcctggcctgcgaaacccgctacgtggctcggaagtgcggctgccgaatggtgtacatgccaggcgacgtgccagtgtgcagcccccagcagtacaagaactgtgcccacccggccatagatgccatgcttcgcaaggactcgtgcgcctgccccaacccgtgcgccagcacgcgctacgccaaggagctctccatggtgcggatcccgagccgcgccgccgcgcgcttcctggcccggaagctcaaccgcagcgaggcctacatcgcggagaacgtgctggccctggacatcttctttgaggccctcaactatgagaccgtggagcagaagaaggcctatgagatgtcagagctgcttggtgacattgggggccagatggggctgttcatcggggccagcctgctcaccatcctcgagatcctagactacctctgtgaggtgttccgagacaaggtcctgggatatttctggaaccgacagcactcccaaaggcactccagcaccaatctgacctcccacccctccctgtgccgtcaccaagactctctccgcctcccaccgcacctgctaccttgtcacacagctctagacctgctgtctgtgtcctcggagccccgccctgacatcctggacatgcctagcctgcacgtagcttttccgtcttcaccccaaataaagtcctaatgcatcaaaaaa

SEQ ID NO: 4242 - DNA, 600 bp, Homo sapiens
atgtgatacatcgaaaactgtttacttcaacttttacttcagacaatacgaagaccctctgagatgctacagaggagaggaagcggagtttcacmkswrktyaccattttctttttgtcattggcttaggatttaactaaccatgaaaagaactactgaaatattacactataacatggaacaataaaggtactggtatgttaatggataatccgcatgacagataatatgtagaaatattcataaagttaactcacatgacccaaatgtagcaagtttcctaaggtacaatagtggattcagaacttgacgttctgaggcacatcctcactgtaaacagtaatgctatatgcatgaagcttctgtttattgttttccatatttaaggaaacaacatcccataatagaaatgagcatgcagggctaaggcatataggatttttctgcaggactttaaagctttgaaaggccaatatcccataggctaactttaaacatgtatttttatttttgttttgttttttacttttcatatttatattagcatacaaggacaattgtatatatgtaacatttttaaaattttaaaaaaaaaaaaaa

SEQ ID NO: 4243 - DNA, 600 bp, Homo sapiens
acccaggctcatggaatcactgcaaatctatctgctcttcagacaatacgaagaccctctgagatgctacagaggagaggaagcggagtttcacmkswrktyaccattttctttttgtcattggcttaggatttaactaaccatgaaaagaactactgaaatattacactataacatggaacaataaaggtactggtatgttaatggataatccgcatgacagataatatgtagaaatattcataaagttaactcacatgacccaaatgtagcaagtttcctaaggtacaatagtggattcagaacttgacgttctgaggcacatcctcactgtaaacagtaatgctatatgcatgaagcttctgtttattgttttccatatttaaggaaacaacatcccataatagaaatgagcatgcagggctaaggcatataggatttttctgcaggactttaaagctttgaaaggccaatatcccataggctaactttaaacatgtatttttatttttgttttgttttttacttttcatatttatattagcatacaaggacaattgtatatatgtaacatttttaaaattttaaaaaaaaaaaaaa

SEQ ID NO: 4244 - DNA, 600 bp, Homo sapiens
gacggactaccaattacgatttctctctgtatacgatggacccccatgagaacatcttactgagcactctcgagataaaaaatgaaatggccacatctgaggctgtgatgggacttggagaccccagaagcacaatgctagcctatgatgcctccagcatccagtatcggaaagctgggttgcccaggcatagttttggccgaaatgctctggaacgacatgtggcgcaaaagaaaagtcgcctgaggagacgcgcctcccaactgaaaatcaccatccctgacttgactgatgtgaatgccatagatcggtggtcccgcatattcttcccagtggttttttccttcttcaacatcgtctattggctttactatgtgaactaaacatggcctcccactggaagcaaggactagattcctcctcaaaccagttgtacagcctgatgtaggacttggaaaacacatcaatccaggacaaaagtgacgctaaaataccttagttgctggcctatcctgtggtccatttcataccatttgggttgcttctgctaagtaatgaatacactaaggtccttgtggttttccagttaaaacgcaagta

SEQ ID NO: 4245 - DNA, 600 bp, Homo sapiens
ctggagcgcgccttcgcactgtacaacctgctggcgctgtacctgctgccgctgctcgccacctgcgcctgctatgcggccatgctgcgccacctgggccgggtcgccgtgcgccccgcgcccgccgatagcgccctgcaggggcaggtgctggcagagcgcgcaggcgccgtgcgggccaaggtctcgcggctggtggcggccgtggtcctgctcttcgccgcctgctggggccccatccagctgttcctggtgctgcaggcgctgggccccgcgggctcctggcacccacgcagctacgccgcctacgcgcttaagacctgggctcactgcatgtcctacagcaactccgcgctgaacccgctgctctacgccttcctgggctcgcacttccgacaggccttccgccgcgtctgcccctgcgcgccgcgccgcccccgccgcccccgccggcccggaccctcggaccccgcagccccacacgcggagctgcaccgcctggggtcccacccggcccccgccagggcgcagaagccagggagcagtgggctggccgcgcgcgggctgtgcgtcctgggggaggacaacgcccctctctga

SEQ ID NO: 4246 - DNA, 1400 bp, Homo sapiens
cgcccactgcttccaggagaggtttccgccccaccacctgacggtgatcttgggcagaacataccgggtggtccctggcgaggaggagcagaaatttgaagtcgaaaaatacattgtccataaggaattcgatgatgacacttacgacaatgacattgcgctgctgcagctgaaatcggattcgtcccgctgtgcccaggagagcagcgtggtccgcactgtgtgccttcccccggcggacctgcagctgccggactggacggagtgtgagctctccggctacggcaagcatgaggccttgtctcctttctattcggagcggctgaaggaggctcatgtcagactgtacccatccagccgctgcacatcacaacatttacttaacagaacagtcaccgacaacatgctgtgtgctggagacactcggagcggcgggccccaggcaaacttgcacgacgcctgccagggcgattcgggaggccccctggtgtgtctgaacgatggccgcatgactttggtgggcatcatcagctggggcctgggctgtggacagaaggatgtcccgggtgtgtacaccaaggttaccaactacctagactggattcgtgacaacatgcgaccgtgaccaggaacacccgactcctcaaaagcaaatgagatcccgcctcttcttcttcagaagacactgcaaaggcgcagtgcttctctacagacttctccagacccaccacaccgcagaagcgggacgagaccctacaggagagggaagagtgcattttcccagatacttcccattttggaagttttcaggacttggtctgatttcaggatactctgtcagatgggaagacatgaatgcacactagcctctccaggaatgcctcctccctgggcagaaagtggccatgccaccctgttttcagctaaagcccaacctcctgacctgtcaccgtgagcagctttggaaacaggaccacaaaaatgaaagcatgtctcaatagtaaaagataacaagatctttcaggaaagacggattgcattagaaatagacagtatatttatagtcacaagagcccagcagggcctcaaagttggggcaggctggctggcccgtcatgttcctcaaaagcacccttgacgtcaagtctccttcccctttccccactccctggctctcagaaggtattccttttgtgtacagtgtgtaaagtgtaaatcctttttctttataaactttagagtagcatgagagaattgtatcatttgaacaactaggcttcagcatatttatagcaatccatgttagtttttactttctgttgccacaaccctgttttatactgtacttaataaattcagatatatttttcacagtttttccaaaaaaaaaaaaaaaaaaa

SEQ ID NO: 4247 - DNA, 600 bp, Homo sapiens
gtgagcctggccgtgtgggggatcgtcacactcgtcgtgctgcccttcgcagtcttcgcccggctagacgacgagcagggccggcgccagtgcgtgctagtctttccgcagcccgaggccttctggtggcgcgcgagccgcctctacacgctcgtgctgggcttcgccatccccgtgtccaccatctgtgtcctctataccaccctgctgtgccggctgcatgccatgcggctggacagccacgccaaggccctggagcgcgccaagaagcgggtgaccttcctggtggtggcaatcctggcggtgtgcctcctctgctggacgccctaccacctgagcaccgtggtggcgctcaccaccgacctcccgcagacgccgctggtcatcgctatctcctacttcatcaccagcctgacgtacgccaacagctgcctcaaccccttcctctacgccttcctggacgccagcttccgcaggaacctccgccagctgataacttgccgcgcggcagcctgactcccccagcgtccggctccgcaactgcgcgccactcctggccagcgagggaggagccggcgccagagtgcgggaccagacagg

SEQ ID NO: 4248 - DNA, 600 bp, Homo sapiens
gcctctagaagccatgctcacccgcccacatttaattaacagctgagtccctgatgtcatccttactcgaagagcttagaaacaaagagtgggaaattccactgggcctaccttccttggggatgttcatgggccccagtttccagtttcccttgccagacaagcccatcttcagcagttgctagtccattctccattctggagaatctgctccaaaaagctggccacatctctgaggtgtcagaattaagctgcctcagtaactgctcccccttctccatataagcaaagccagaagctctagctttacccagctctgcctggagactaaggcaaattgggccattaaaagctcagctcctatgttggtattaacggtggtgggttttgttgctttcacactctatccacaggatagattgaaactgccagcttccacctgatccctgaccctgggatggctggattgagcaatgagcagagccaagcagcacagagtcccctggggctagaggtggaggaggcagtcctgggaatgggaaaaaccccaactttggggtcatagaggcacaggtaacccataaaactgcaaacaagctt

SEQ ID NO: 4249 - DNA, 600 bp, Homo sapiens
aggcgcatggttctggacggcccagcagctcctgtggccacagcagctttgtacacgaagaccatccatcctcccttcgtccaccactctactccctccaccctccctccctgatcccgtgtgccaccaggagggagtggcagctatagtctggcaccaaagtccaggacacccagtggggtggagtcggagccactggtcctgctgctggctgcctctctgctccaccttgtgacccagggtggggacaggggctggcccagggctgcaatgcagcatgttgccctggcacctgtggccagtactcgggacagactaagggcgcttgtcccatcctggacttttcctctcatgtctttgctgcagaactgaagagactaggcgctggggctcagcttccctcttaagctaagactgatgtcagaggccccatggcgaggccccttggggccactgcctgaggctcacggtacagaggcctgccctgcctggccgggcaggaggttctcactgttgtgaaggttgtagacgttgtgtaatgtgtttttatctgttaaaatttttcagtgttgacacttaaaattaaacacatgcatacag

SEQ ID NO: 4250 - DNA, 93 bp, Homo sapiens
tctgctccaggaaacctactggtgaaagaagggtttggtgaagggggcaagagcccagagctccccggcgtccaggaagacgaggctgcatcc

SEQ ID NO: 4251 - DNA, 1400 bp, Homo sapiens
gttccagcagctttatgggaatatctaatatgacacaactggaaagctcaactagtaaaatgcttaaagcaggcataagaggaattccgcctaaaattgaagctcttccatctgatatcagcattgatgaaggcaaagttctaacagtagcctgtgctttcacgggtgagcctaccccagaagtaacatggtcctgtggtggaagaaaaatccacagtcaagaacaggggaggttccacattgaaaacacagatgacctgacaaccctgatcatcatggacgtacagaaacaagatggtggactttataccctgagtttagggaatgaatttggatctgactctgccactgtgaatatacatattcgatccatttaagagggcctgtgcccttatactctacactcattcttaacttttcgcaaacgtttcacacggactaatctttctgaactgtaaatatttaaagaaaaaaaagtagttttgtatcaacctaaatgagtcaaagttcaaaaatattcatttcaatcttttcataattgttgacctaagaatataatacatttgctagtgacatgtacatactgtatatagccggattaacggttataaagttttgtaccatttattttatgacattttacaatgtaagttttgaaactaactgttggtaggagaaagtttcttatggaacgaataccctgctcaacatttaatcaatctttgtgcctcaacatactgttgatgtctaagtatgcctcagtgggttgagaaaatccccattgaagatgtcctgtccacctaaaagagaatgatgctgtgcatatcacttgatatgtgcaccaatacctactgaatcagaaatgtaaggcattggtgatgtttgcatttaccctcctgtaagcaacactttaacgtcttacattttctctgatgatgtcacacaaaattatcatgacaaatattaccagagcaaagtgtaacggccaacactttgttcgctcattttacgctgtctctgacataaggagtgcctgaatagcttggaaaagtaacatctcctggccatcccttcatttaaccaagctattcaagtattcctatgccagagcagtgccaactcttggaggtcccagagtgcagccaatgcctttgtgtggtagttctaaattttaattgcacctgaaaaacctgggcacctaagcaatgagccacagcaaaaagtaaagaacaacaacaaaataaagctgttgttaaattttaaacaatattactaattgcccaaaatgtcaatttgatgtagttcttttcatgcaagtataaattcaattgttagttataattgttggacctccttgagatagtaacaacaaaataaagcaagctatctgcacctcaaaa

SEQ ID NO: 4252 - DNA, 600 bp, Homo sapiens
gggtgccgcgagccaggctgaccaggcgcccgggatccagctcatccccttggctgggaacatcctccactgacttcctcccactgtctgccctgaacccactgctgcccccagaaaaaggccgggtgacaccggggggctcccagcccgtgcaccctggaagggcaggtctggcggctccatccgtggctgcaggggtctcatgtggtcctcctcgctatgttggaaatgtgcaaccactgcttcttgggaggagtggtgggtgcagtccccccgctgtctttgagttgtggtggacgctggcctgggatgagagggcccagaagaccttcgtatcccctctcagtcgcccggggctgtcccgtgcatgggttggctgtggggaccccaggtgggcctggcaggactccagatgaggacaagagggacaaggtatggggtgggagccacaattgaggataccccgagactaccaggagagccctgggctggaggctgagctgcatccctgctccccacatggaggacccaacaggaggccgtggctctgatgctgagcgaagctataggctcttgttggataaaagcttttttaacaga

SEQ ID NO: 4253 - DNA, 600 bp, Homo sapiens
gatgggcatttccgccagaatggcggctgtggctatgtgctgaagccagacttcctgcgtgatatccagagttctttccaccctgagaagcccatcagccctttcaaagcccagactctcttaatccaggtgatcagcggtcagcaactccccaaagtggacaagaccaaagaggggtccattgtggatccactggtgaaagtgcagatctttggcgttcgtctagacacagcacggcaggagaccaactatgtggagaacaatggttttaatccatactgggggcagacactatgtttccgggtgctggtgcctgaacttgccatgctgcgttttgtggtaatggattatgactggaaatcccgaaatgactttattggtcagtacaccctgccttggacctgcatgcaacaaggtgagccagcccctttggcccctggccaataccccagctctggctgccttcctaatgctgtcctcctgccccttccaggttaccgccacattcacctgctgtccaaagatggcatcagcctccgcccagcttccatctttgtgtatatctgcatccaggaaggcctggagggggatgagtcctga

SEQ ID NO: 4254 - DNA, 91 bp, Homo sapiens
ggacctgggcgtgaccaaggtgggccacatgaagaggatcctgtgtggcatcaaggagctgagccgcagcgcccccgccgtcgaggcctag

SEQ ID NO: 4255 - DNA, 600 bp, Homo sapiens
tctgaaacaattgctgacattcagctgaacagtagcaatgtggctgctgcagcagccttcaacaaagatgcccttctgaactggcttaaagaatacaactctggggatgacctggaccgagccattgaggaatttacactgtcctgtgctggctactgtgtagcttcttatgtccttgggattggtgacagacatagtgacaacatcatggtcaaaaaaactggccagctcttccacattgactttggacatattcttggaaatttcaaatctaagtttggcattaaaagggagcgagtgccttttattcttacctatgatttcatccatgtcattcaacaaggaaaaacaggaaatacagaaaagtttggccggttccgccagtgttgtgaggatgcatatctgattttacgacggcatgggaatctcttcatcactctctttgcgctgatgttgactgcagggcttcctgaactcacatcagtcaaagatatacagtatcttaaggactctcttgcattagggaagagtgaagaagaagcactcaaacagtttaagcaaaaatttgatgaggcgctcagggaaagctggactactaaa

SEQ ID NO: 4256 - DNA, 600 bp, Homo sapiens
tcgtccaatcagcgagagaccgggggcctcctgtcgcctagcacaccattcggtgcctcgaacctcctggtgaaccccctggagccccaaaatgcagataagatcaagatcaagatcgcagacctgggcaacgcctgctgggtgcacaagcacttcacggaagacatccagactcggcagtaccgggccgtcgaggtgctgatcggcgccgaatacggccccccggcagacatctggagcacagcctgcatggccttcgagctggccactggtgactacctgttcgagccgcattctggagaagactacagtcgtgatgaggaccacatcgctcacatagtggagcttctgggggacatccccccagccttcgccctctcaggccgctattcccgggagttcttcaaccggagaggagagctgcggcacatccacaatctcaagcactggggcctgtacgaggtactcatggaaaagtacgagtggcccctagagcaggccacacagttcagcgcctttctgctgcccatgatggagtacatccccgaaaagcgggccagtgccgctgactgcctccagcacccctggctcaacccctag

SEQ ID NO: 4257 - DNA, 1400 bp, Homo sapiens
aggatacgaagcgttttcggcttcctgcccggagctgtgcagcaaacagtcgacccccatggggctcagccttcccctgagtactagcgtccctgacagcgcggaatctgggtgcagttcctgcagtaccccactctacgatcagggtggcccggtggaaatcctgccctttctgtacctgggcagtgcgtatcacgcttcccgcaaggacatgctggatgccttgggcatcactgccttgatcaacgtctcagccaattgtcccaaccattttgagggtcactaccagtacaagagcatccctgtggaggacaaccacaaggcagacatcagctcctggttcaacgaggccattgacttcatagactccatcaagaatgctggaggaagggtgtttgtccactgccaggcaggcatttcccggtcagccaccatctgccttgcttaccttatgaggactaatcgagtcaagctggacgaggcctttgagtttgtgaagcagaggcgaagcatcatctctcccaacttcagcttcatgggccagctgctgcagtttgagtcccaggtgctggctccgcactgttcggcagaggctgggagccccgccatggctgtgctcgaccgaggcacctccaccaccaccgtgttcaacttccccgtctccatccctgtccactccacgaacagtgcgctgagctaccttcagagccccattacgacctctcccagctgctgaaaggccacgggaggtgaggctcttcacatcccattgggactccatgctccttgagaggagaaatgcaataactctgggaggggctcgagagggctggtccttatttatttaacttcacccgagttcctctgggtttctaagcagttatggtgatgacttagcgtcaagacatttgctgaactcagcacattcgggaccaatatatagtgggtacatcaagtccatctgacaaaatggggcagaagagaaaggactcagtgtgtgatccggtttctttttgctcgcccctgttttttgtagaatctcttcatgcttgacatacctaccagtattattcccgacgacacatatacatatgagaatataccttatttatttttgtgtaggtgtctgccttcacaaatgtcattgtctactcctagaagaaccaaatacctcaatttttgtttttgagtactgtactatcctgtaaatatatcttaagcaggtttgttttcagcactgatggaaaataccagtgttgggttttttttttagttgccaacagttgtatgtttgctgattatttatgacctgaaataatatatttcttcttctaagaagacattttgttacataaggatgacttttttatacaatggaataaattatggcatttctattg

SEQ ID NO: 4258 - DNA, 600 bp, Homo sapiens
ccaccgccaccgcgccccgtggctgataaggacacttccaatgagtccagctcaggcagtgccacccagaacaccaaggaacgcccagccacagagctgtccaccacagaggccaccacgcccgccatgcccgcccctcccctgcagccgcgggccctcaacccagcctccagatggtccaagatccagattgtgacgaagcagacaggcaatgagtgtgtgacagccattgagattgtgcctgccacgccggctggcatgcgccctgcggccaacgtggcccgcaagttcgccagcatcgctcgcaaccaggtgcgcaagaagcggcagatggcggcccgggagcgcaaagtgacacgaacgatctttgccattctgctagccttcatcctcacctggacgccctacaacgtcatggtcctggtgaacaccttctgccagagctgcatccctgacacggtgtggtccattggctactggctctgctacgtcaacagcaccatcaaccctgcctgctatgctctgtgcaacgccacctttaaaaagaccttccggcacctgctgctgtgccagtatcggaacatcggcactgccaggtag

SEQ ID NO: 4259 - DNA, 600 bp, Homo sapiens
ctggggctggcggcaggcccgggcgggaccaagctcctggagcgcgcggggctggtgctgcggctgctgcgtgcgctgcgcgtgctctacgtgatgcgcctggcgcgccactcgctggggctgcgttcgctgggcctgaccatgcgccgctgcgcgcgcgagttcgggctgctgctgctgttcctctgcgtggccatggcgctcttcgcgccactggtgcacctggccgagcgcgagctgggcgcgcgccgcgacttctccagcgtgcccgccagctattggtgggccgtcatctccatgaccaccgtgggctacggcgacatggtcccgcgcagcctgcccgggcaggtggtggcgctcagcagcatcctcagcggcatcctgctcatggccttcccggtcacctccatcttccacaccttttcgcgctcctactccgagctcaaggagcagcagcagcgcgcggccagccccgagccggccctgcaggaggacagcacgcactcggccacagccaccgaggacagctcgcagggccccgacagcgcgggcctggccgacgactccgcggatgcgctgtgggtgcgggcagggcgctga

SEQ ID NO: 4260 - DNA, 600 bp, Homo sapiens
tgattctggaatatgctccaaggggtgagctctacaaggagctgcagaaaagcgagaaattagatgaacagcgcacagccacggataatagaggagttggcagatgccctgacctactgccatgacaagaaagtgattcacagagatattaagccagagaacctgctgctggggttcaggggtgaggtgaagattgcagattttggctggtctgtgcacaccccctccctgaggaggaagacaatgtgtgggacactggactacttgccgccagaaatgattgaggggagaacatatgatgaaaaggtggatttgtggtgcattggagtgctctgctatgagctgctggtgggatatccaccctttgagagcgcctcccacagtgagacttacagacgcatcctcaaggtagatgtgaggtttccactatcaatgcctctgggggcccgggacttgatttccaggcttctcagataccagcccttggagagactgcccctggcccagatcctgaagcacccctgggttcaggcccactcccgaagggtgctgcctccctgtgctcagatggcttcctgagccctgtctgcctctgttccc

SEQ ID NO: 4261 - DNA, 1400 bp, Homo sapiens
tcgtctgatgttataatattaatattactgaatcattggttttgcctgcacctcacagaaatgttactgtgtcacttttccctcgggaggaaattgtttggtaatatagaaaggtgtatgcaagttgaatttgctgactccagcacagttaaaaggtcaatattcttttgacctgattaatcagtcagaaagtccctataggatagagctggcagctgagaaattttaaaggtaattgataattagtatttataactttttaaagggctctttgtatagcagaggatctcatttgactttgttttgatgagggtgatgctctctcttatgtggtacaataccattaaccaaaggtaggtgtccatgcagattttattggcagctgttttattgccattcaactagggaaatgaagaaatcacgcagccttttggttaaatggcagtcaaaattttcctcagtgtatttagtgtgttcagtgatgatatcactggttcccaactagatgcttgttggccacgggaagggaaatgacttgttctaattctaggttcacagaggtatgagaagcctgaactgaagaccattttcaagagggacggtatttatgaatcagggttaggctccatatttaaagatagagccagtttttttttttaaatagaacccaaattgtgtaaaaatgttaattgggttttttaaacattgttttatcaagtcactgttaagtagaagaaagccatggtaaactgatacataacctaaattataaaagcagaaacctaactcactcgtcaagggaagttaccttttgaggaaagttaaagtacttttttccctatctgtatctatagcaacaacccagaacttacaaacttctccaaagattttattgattgttatatcaaatcagaatgtaaacatgaactcttgcatatatttaaaattgtgttggaacatttgaacatgaatgctgtttgtggtacttaagaaattaattcagttggattatcattatgtgatactggcagattgcagtgcaaccttatgccaataaaatgtaatttaacagccccagatattgttgaatattcaacaataacaagaaaagcttttcatctaagttttatgctttaattttttttctttttttttctttttcttttgtttccttggtactaattttaatttttatttggaagggagcagtataaagcttatttgtatttagtagtgtatctcatagatacagacaaggcaagagatgataagctgtttaaatagtgtttaatattgattgggggtggggagaaagaaaaagtgtattacttaaagatactatatacgttttgtatatcattaaatctttaaaagaaatgaaataaatttattgtttacag

SEQ ID NO: 4262 - DNA, 600 bp, Homo sapiens
acttgaatgagcagcactttgcaacttcaaaacagatgcagtgaactgtggctgtatatgcatgctcattgtgtgaaggctagcctaacagaacaggaggtatcaaactagctgctatgtgcaaacagcgtccattttttcatattagaggtggaacctcaagaatgactttattcttgtatctcatctcaaaatattaataatttttttcccaaaagatggtatataccaagttaaagacagggtattataaatttagagtgattggtggtatattacggaaatacggaacctttagggatagttccgtgtaagggctttgatgccagcatccttggatcagtactgaactcagttccatccgtaaaatatgtaaaggtaagtggcagctgctctatttaatgaaagcagttttaccggattttgttagactaaaatttgattgtgatacattgaacaaaatggaactcatttttttttaaggagtaaagatttttaattctgtgattgtgtgtatgtgtgttgaaactgtaaagcttttatgactctaatattaatctcttaaatgaaattaaaaggcaaaagaacatgattgagctt

SEQ ID NO: 4263 - DNA, 1400 bp, Homo sapiens
acggcggaggaggcgcagccggacatttagccgctcatcttcgatgaaatcgttagcaccttaggagaggggaccttcggccgagttgtacaatgtgttgaccatcgcaggggtggggctcgagttgccctgaagatcattaagaatgtggagaagtacaaggaagcagctcgacttgagatcaacgtgctagagaaaatcaatgagaaagaccctgacaacaagaacctctgtgtccagatgtttgactggtttgactaccatggccacatgtgtatctcctttgagcttctgggccttagcaccttcgatttcctcaaagacaacaactacctgccctaccccatccaccaagtgcgccacatggccttccagctgtgccaggctgtcaagttcctccatgataacaagctgacacatacagacctcaagcctgaaaatattctgtttgtgaattcagactatgagctcacctacaacctagagaagaagcgagatgagcgcagtgtgaagagcacagctgtgcgggtggtagactttggcagtgccacctttgaccatgagcaccatagcaccattgtctccactcgccattaccgagcaccagaagtcatccttgagttgggctggtcacagccttgtgatgtgtggagtataggctgcatcatctttgaatactatgtgggattcaccctcttccagacccatgacaacagagagcatctagccatgatggaaaggatcttgggtcctatcccttcccggatgatccgaaagacaagaaagcagaaatatttttaccggggtcgcctggattgggatgagaacacatcagctgggcgctatgttcgtgagaactgcaaaccgctgcggcggtatctgacctcagaggcagaggaacaccaccagctcttcgatctgattgaaagcatgctagagtatgaaccagctaagcggctgaccttgggtgaagcccttcagcatcctttcttcgcccgccttcgggctgagccgcccaacaagttgtgggactccagtcgggatatcagtcggtgacgatcaggccctgggcccccctgcatcttttatagcagtgggtgtccagtccaggacactggtgcttttttatacaagagaacgagccagagttcactccttcctcctggctctctatatacctgtgaatatgtgaaatagtgtaaatatgaaagaacttgtacctatcacttcaacccctgccttgtacataatactattccatccacacagtttccaccctcacctgccccctcatacggagttggatgggggccgagtgaggtaaccaggtggcatctaccccatgttttataaggaattttgtacagtctttgtgaaataaaataacgtgcttcatttga

SEQ ID NO: 4264 - DNA, 1400 bp, Homo sapiens
gaatctcgtgggggtcggggatccccttaagaagtggtaatggggacaagatgcggccctggtgctgtaggctacatcctgatacctataagttcacccccaccccacagctgctggagagaaatcccaagaggcagcccttcctcaccatcccattaaagaccgggctggttagcgtccagctcagggagaagggcgctagtgcctaacctcactggtccctctcccggaggcccttgtagagggccacgtccataaattttcttatggaactctcccacatcctcttccccaacttcatttgcttctctcaacaacctcatctgcattttctatttctatatgatacagactctatattgctatatctctgtatatactttcccagccctgtctgtctccaccccatcccctcttgtctctgagaaccattctcccaccccaagttccaccttctatgtttctactccctccctggtctctgaatgccttcgcctgtataaagagttggactctctcccctggtgtctgtactgtgtacacacatccctctgagaagcacaaggagacgacacgcgcattgtaacctttgcactgtctcagtggcgacaaaggaagctgtgaatcacaagctctgcctctttctggcctcaccctctcccccaacccgggcaccctcggccctccctgcagccttaacattctcttcccctgctcctcctatcccattgccctctgcccagctgacagtggcatccccagggaaggggttgctgtagagatagcccccacccaggggatggaggtctaccctggacactaagccaagtgtgtcagagacagaagggagctggggattggcgactcctgaagttggggcagtgggatgctgacaggcagaagctgaggtcctcagtcagtggcctttcctccttctgggtgcccagccccctttcctcacctgatacccaagcccaccacttttattttctggtgaggtgggtttgggaggaaagagaggcctagaggaggagttgaaagctctgctgttgtctcaccctatcttaatgagagacaagtgaggtggagggcctgccccccctccctccaccagacactccttccaggcctgagccccaacccctcttcaggccttccttccctagctgtgtcttggtcttcaatcccagaacaggacctgtgagcagctgcattggcctggagctggagagtaaggctgtaggatctttggaatctcttggttcctaagagtttcctcagagatcatacctccccagagggaagcaggaatgaggccaaaaagtgtgcattggataggggaacagcaggcagggctctgggtgacgcatgcctctggtctaataaactgggtttcaacc

SEQ ID NO: 4265 - DNA, 1400 bp, Homo sapiens
atgagttccagcagctttatgggaatatctaatatgacacaactggaaagctcaactagtaaaatgcttaaagcaggcataagaggaattccgcctaaaattgaagctcttccatctgatatcagcattgatgaaggcaaagttctaacagtagcctgtgctttcacgggtgagcctaccccagaagtaacatggtcctgtggtggaagaaaaatccacagtcaagaacaggggaggttccacattgaaaacacagatgacctgacaaccctgatcatcatggacgtacagaaacaagatggtggactttataccctgagtttagggaatgaatttggatctgactctgccactgtgaatatacatattcgatccatttaagagggcctgtgcccttatactctacactcattcttaacttttcgcaaacgtttcacacggactaatctttctgaactgtaaatatttaaagaaaaaaaagtagttttgtatcaacctaaatgagtcaaagttcaaaaatattcatttcaatcttttcataattgttgacctaagaatataatacatttgctagtgacatgtacatactgtatatagccggattaacggttataaagttttgtaccatttattttatgacattttacaatgtaagttttgaaactaactgttggtaggagaaagtttcttatggaacgaataccctgctcaacatttaatcaatctttgtgcctcaacatactgttgatgtctaagtatgcctcagtgggttgagaaaatccccattgaagatgtcctgtccacctaaaagagaatgatgctgtgcatatcacttgatatgtgcaccaatacctactgaatcagaaatgtaaggcattggtgatgtttgcatttaccctcctgtaagcaacactttaacgtcttacattttctctgatgatgtcacacaaaattatcatgacaaatattaccagagcaaagtgtaacggccaacactttgttcgctcattttacgctgtctctgacataaggagtgcctgaatagcttggaaaagtaacatctcctggccatcccttcatttaaccaagctattcaagtattcctatgccagagcagtgccaactcttggaggtcccagagtgcagccaatgcctttgtgtggtagttctaaattttaattgcacctgaaaaacctgggcacctaagcaatgagccacagcaaaaagtaaagaacaacaacaaaataaagctgttgttaaattttaaacaatattactaattgcccaaaatgtcaatttgatgtagttcttttcatgcaagtataaattcaattgttagttataattgttggacctccttgagatagtaacaacaaaataaagcaagctatctgcacctc

SEQ ID NO: 4266 - DNA, 1400 bp, Homo sapiens
caaggagtacaatgcccagatcaacagcaacctcttcatgagcttgaacaaggacggttcttacacaggcttcatcaaggttcagctgaagctggtgcgccctgtctctgtgccctccagcaagaagccaccctccttgcaggatgcccggcggggcccaggacggggcacaagtgtcaggcgccgcacttccttttacctgcccaaggatgctgtcaagcacctgcatgtgctgtcacgcacaagggcacgtgaagtcattgaggccctgctgcgaaagttcttggtggtggatgacccccgcaagtttgcactctttgagcgcgctgagcgtcacggccaagtgtacttgcggaagctgttggatgatgagcagcccctgcggctgcggctcctggcagggcccagtgacaaggccctgagctttgtcctgaaggaaaatgactctggggaggtgaactgggacgccttcagcatgcctgaactacataacttcctacgtatcctgcagcgggaggaggaggagcacctccgccagatcctgcagaagtactcctattgccgccagaagatccaagaggccctgcacgcctgcccccttgggtgacctcttgtacccccaggtggaaggcagacagcaggcagcgccaagtgcgtgccgtgtgagtgtgacagggccagtggggcctgtggaatgagtgtgcatggaggccctcctgtgctgggggaatgagcccagagaacagcgaagtagcttgctccctgtgtccacctgtgggtgtagccaggtatggctctgcacccctctgccctcattactgggccttagtgggccagggctgccctgagaagctgctccaggcctgcagcaggagtggtgcagacagaagtctcctcaatttttgtctcagaagtgaaaatcttggagaccctgcaaacagaacagggtcatgtttgcaggggtgacggccctcatctatgaggaaaggttttggatcttgaatgtggtctcaggatatccttatcagagctaagggtgggtgctcagaataaggcaggcattgaggaagagtcttggtttctctctacagtgccaactcctcacacaccctgaggtcagggagtgctggctcacagtacagcatgtgccttaatgcttcatatgaggaggatgtccctgggccagggtctgtgtgaatgtgggcactggcccaggttcataccttatttgctaatcaaagccagggtctctccctcaggtgttttttatgaagtgcgtgaatgtatgtaatgtgtggtggcctcagctgaatgcctcctgtggggaaaggggttggggtgacagtcatcatcagggcctggggcctgagagaattggctcaataaagatttcaagatcc

SEQ ID NO: 4267 - DNA, 600 bp, Homo sapiens
cgctcggacctgctcaaggccggcgggggcgcgggcggcagtggcgggagcggcccctcggccatcctccgtctgcccagttaccgcttccgctaccgccgccgctcccgctctagctcccgctccagcgagccgtcgccgtcgcgggacgcgtctcccggcggccccgggggcccgggctttgcctccacggacatctccatgtacacgctcagccgcgacccctccaagggcagcgtggccgcggggctggcgggggccggcggcggcggcggcggcgccgtgggggcgttcggcggcgcggccgggggcgccgggggcggcggcggaggcggcggcggggcgggtgccgagcgggaccgcgggggggcgtccggcttcctcacgctgcacaacgccttccccaaggaggcgggcggcggcgtcacggtcacggtcaccgggccgcccgccccgcccgcgcccgcgccacccgcgccctctgcgcccgcccccgggaccctggccaaggaggccgccgcctccaacaccaacacgctcaacaggaaaaccacgcctgtgtaggggcgcggcgggggagccgaggggcgtgtccggggc

SEQ ID NO: 4268 - DNA, 120 bp, Homo sapiens
ccatcacgcccctggcgggaatcgacggcctccctccggccctcccagacctgccgaccgcgactgtgcctcccgtgccaccacctcagtatttctctccagccgtgatcttgccgagcc

SEQ ID NO: 4269 - DNA, 87 bp, Homo sapiens
ggtagcagcagtcaggggtcaggtgtcaggcccgtcggagctgcctgcagcacatgcgggctcgcccatacccgtgacagtggctga

SEQ ID NO: 4270 - DNA, 600 bp, Homo sapiens
agcaaaattatatttcttgacatataaaaagttggtttaatgcctttatttctctttaaggaccagaaccaggaatactatatcgaaaaattagtctgtggatttaacactgacttagcatatagcttaaagttgctcttttggtttttaacttcctccatacataagcttcaaggacaataagatgttaaaaaggaggaaataattatttttattttgacactgtgacagttttggtaactaggatcctagggagggaaatgtttgcctgttgaacttctttctgttatgagaggatttagttaggtcattaagatgttgatcacacagcttcaatcacaatatgccaagtataacctggtttcgttagaggtgtctacagtccagatgttcttcgtaataaaagcaaagtttttgaacctctgagtccaaagcaggctggttggcataatatgtaatttgaaaaataaaatcttatcttgcagcactatcagtatgttgaatttattatgtatattatttctaatatccgaaactaaatacttgattttttaatgtgtgtgtttattttatgatattgctattaaatttttattatct

SEQ ID NO: 4271 - DNA, 331 bp, Homo sapiens
ctcaacacccccttcactttggtaaggggcccgctgcctgccgccccaccttctgtcttcgtctccctttcctctctcagttctctggcctccctctgccgttctgcgtctccctgtgggtccccacttctctctccacatctctcttcctcctcatttctcctctcctctgcctctgtcttcctgtcctagtctcttttctccctcctctgtcatctcggttcttgtatctctcctgtttttcttagtctttctttcagtctctgtctctctctctgaagtctttctgtctctcttctctatctctcagtgtcctcatcttttttttttt

SEQ ID NO: 4272 - DNA, 102 bp, Homo sapiens
cacagtgacctgaagccggaaaacagcctctgtcagcaccccaaccaggtctcccccgtgaagatctgtgacttcggcctgggcaatcggttgcatggtacc

SEQ ID NO: 4273 - DNA, 600 bp, Homo sapiens; identical to SEQ ID NO: 1

SEQ ID NO: 4274 - DNA, 1016 bp, Homo sapiens; identical to SEQ ID NO: 2

SEQ ID NO: 4275 - DNA, 497 bp, Homo sapiens; identical to SEQ ID NO: 3
  misc_feature (396)..(396): n is a, c, g, or t

SEQ ID NO: 4276 - DNA, 1400 bp, Homo sapiens; identical to SEQ ID NO: 4
  misc_feature (947)..(947): n is a, c, g, or t
  misc_feature (965)..(965): n is a, c, g, or t
  misc_feature (985)..(985): n is a, c, g, or t
  misc_feature (1321)..(1322): n is a, c, g, or t
  misc_feature (1339)..(1339): n is a, c, g, or t
  misc_feature (1354)..(1355): n is a, c, g, or t

SEQ ID NO: 4277 - DNA, 600 bp, Homo sapiens; identical to SEQ ID NO: 5

SEQ ID NO: 4278 - DNA, 600 bp, Homo sapiens; identical to SEQ ID NO: 5

SEQ ID NO: 4279 - DNA, 316 bp, Homo sapiens; identical to SEQ ID NO: 7

SEQ ID NO: 4280 - DNA, 1400 bp, Homo sapiens; identical to SEQ ID NO: 8

SEQ ID NO: 4281 - DNA, 1187 bp, Homo sapiens; identical to SEQ ID NO: 9

SEQ ID NO: 4282 - DNA, 1187 bp, Homo sapiens; identical to SEQ ID NO: 9

SEQ ID NO: 4283 - DNA, 600 bp, Homo sapiens; identical to SEQ ID NO: 11
  misc_feature (550)..(550): n is a, c, g, or t

SEQ ID NO: 4284 - DNA, 600 bp, Homo sapiens; identical to SEQ ID NO: 11
  misc_feature (550)..(550): n is a, c, g, or t

SEQ ID NO: 4285 - DNA, 600 bp, Homo sapiens; identical to SEQ ID NO: 13

SEQ ID NO: 4286 - DNA, 600 bp, Homo sapiens; identical to SEQ ID NO: 13

SEQ ID NO: 4287 - DNA, 1400 bp, Homo sapiens; identical to SEQ ID NO: 15

SEQ ID NO: 4288 - DNA, 1400 bp, Homo sapiens; identical to SEQ ID NO: 15

SEQ ID NO: 4289 - DNA, 1400 bp, Homo sapiens; identical to SEQ ID NO: 17

SEQ ID NO: 4290 - DNA, 600 bp, Homo sapiens; identical to SEQ ID NO: 18

SEQ ID NO: 4291 - DNA, 600 bp, Homo sapiens; identical to SEQ ID NO: 18

SEQ ID NO: 4292 - DNA, 600 bp, Homo sapiens; identical to SEQ ID NO: 20

SEQ ID NO: 4293 - DNA, 600 bp, Homo sapiens; identical to SEQ ID NO: 20

SEQ ID NO: 4294 - DNA, 600 bp, Homo sapiens; identical to SEQ ID NO: 22

SEQ ID NO: 4295 - DNA, 1400 bp, Homo sapiens; identical to SEQ ID NO: 23

SEQ ID NO: 4296 - DNA, 600 bp, Homo sapiens; identical to SEQ ID NO: 24

SEQ ID NO: 4297 - DNA, 600 bp, Homo sapiens; identical to SEQ ID NO: 25

SEQ ID NO: 4298 - DNA, 1052 bp, Homo sapiens; identical to SEQ ID NO: 26

SEQ ID NO: 4299 - DNA, 1052 bp, Homo sapiens; identical to SEQ ID NO: 26

SEQ ID NO: 4300 - DNA, 1400 bp, Homo sapiens; identical to SEQ ID NO: 28

SEQ ID NO: 4301 - DNA, 1400 bp, Homo sapiens; identical to SEQ ID NO: 29
  misc_feature (1376)..(1376): n is a, c, g, or t
  misc_feature (1386)..(1386): n is a, c, g, or t

SEQ ID NO: 4302 - DNA, 1400 bp, Homo sapiens; identical to SEQ ID NO: 30
  misc_feature (1396)..(1396): n is a, c, g, or t
  misc_feature (1398)..(1398): n is a, c, g, or t

SEQ ID NO: 4303 - DNA, 600 bp, Homo sapiens; identical to SEQ ID NO: 31
  misc_feature (500)..(500): n is a, c, g, or t
  misc_feature (582)..(582): n is a, c, g, or t
  misc_feature (584)..(584): n is a, c, g, or t
  misc_feature (590)..(590): n is a, c, g, or t

SEQ ID NO: 4304 - DNA, 600 bp, Homo sapiens; identical to SEQ ID NO: 32

SEQ ID NO: 4305 - DNA, 600 bp, Homo sapiens; identical to SEQ ID NO: 32

SEQ ID NO: 4306 - DNA, 1400 bp, Homo sapiens; identical to SEQ ID NO: 34

SEQ ID NO: 4307 - DNA, 600 bp, Homo sapiens; identical to SEQ ID NO: 35

SEQ ID NO: 4308 - DNA, 600 bp, Homo sapiens; identical to SEQ ID NO: 35

SEQ ID NO: 4309 - DNA, 600 bp, Homo sapiens; identical to SEQ ID NO: 37

SEQ ID NO: 4310 - DNA, 600 bp, Homo sapiens; identical to SEQ ID NO: 37

SEQ ID NO: 4311 - DNA, 600 bp, Homo sapiens; identical to SEQ ID NO: 39
  misc_feature (480)..(480): n is a, c, g, or t

SEQ ID NO: 4312 - DNA, 1400 bp, Homo sapiens; identical to SEQ ID NO: 40

SEQ ID NO: 4313 - DNA, 1400 bp, Homo sapiens; identical to SEQ ID NO: 40

SEQ ID NO: 4314 - DNA, 868 bp, Homo sapiens; identical to SEQ ID NO: 42

SEQ ID NO: 4315 - DNA, 868 bp, Homo sapiens; identical to SEQ ID NO: 42

SEQ ID NO: 4316 - DNA, 1400 bp, Homo sapiens; identical to SEQ ID NO: 44

SEQ ID NO: 4317 - DNA, 1400 bp, Homo sapiens; identical to SEQ ID NO: 44

SEQ ID NO: 4318 - DNA, 600 bp, Homo sapiens; identical to SEQ ID NO: 46
  misc_feature (499)..(499): n is a, c, g, or t
  misc_feature (547)..(547): n is a, c, g, or t
  misc_feature (570)..(570): n is a, c, g, or t
  misc_feature (586)..(586): n is a, c, g, or t

SEQ ID NO: 4319 - DNA, 600 bp, Homo sapiens; identical to SEQ ID NO: 46
  misc_feature (499)..(499): n is a, c, g, or t
  misc_feature (547)..(547): n is a, c, g, or t
  misc_feature (570)..(570): n is a, c, g, or t
  misc_feature (586)..(586): n is a, c, g, or t

SEQ ID NO: 4320 - DNA, 824 bp, Homo sapiens; identical to SEQ ID NO: 48

SEQ ID NO: 4321 - DNA, 824 bp, Homo sapiens; identical to SEQ ID NO: 48

SEQ ID NO: 4322 - DNA, 1400 bp, Homo sapiens; identical to SEQ ID NO: 50

SEQ ID NO: 4323 - DNA, 1400 bp, Homo sapiens; identical to SEQ ID NO: 51

SEQ ID NO: 4324 - DNA, 1400 bp, Homo sapiens; identical to SEQ ID NO: 51

SEQ ID NO: 4325 - DNA, 1400 bp, Homo sapiens; identical to SEQ ID NO: 53

SEQ ID NO: 4326 - DNA, 1400 bp, Homo sapiens; identical to SEQ ID NO: 53

SEQ ID NO: 4327 - DNA, 600 bp, Homo sapiens; identical to SEQ ID NO: 55

SEQ ID NO: 4328 - DNA, 600 bp, Homo sapiens; identical to SEQ ID NO: 55

SEQ ID NO: 4329 - DNA, 1400 bp, Homo sapiens; identical to SEQ ID NO: 57

SEQ ID NO: 4330 - DNA, 1400 bp, Homo sapiens; identical to SEQ ID NO: 57

SEQ ID NO: 4331 - DNA, 1400 bp, Homo sapiens; identical to SEQ ID NO: 59

SEQ ID NO: 4332 - DNA, 1400 bp, Homo sapiens; identical to SEQ ID NO: 59

SEQ ID NO: 4333 - DNA, 1400 bp, Homo sapiens; identical to SEQ ID NO: 61

SEQ ID NO: 4334 - DNA, 600 bp, Homo sapiens; identical to SEQ ID NO: 62

SEQ ID NO: 4335 - DNA, 600 bp, Homo sapiens; identical to SEQ ID NO: 62

SEQ ID NO: 4336 - DNA, 1400 bp, Homo sapiens; identical to SEQ ID NO: 64

SEQ ID NO: 4337 - DNA, 1400 bp, Homo sapiens; identical to SEQ ID NO: 65
  misc_feature (1346)..(1346): n is a, c, g, or t
  misc_feature (1360)..(1360): n is a, c, g, or t
  misc_feature (1376)..(1376): n is a, c, g, or t

SEQ ID NO: 4338 - DNA, 600 bp, Homo sapiens; identical to SEQ ID NO: 66

SEQ ID NO: 4339 - DNA, 600 bp, Homo sapiens; identical to SEQ ID NO: 66

SEQ ID NO: 4340 - DNA, 600 bp, Homo sapiens; identical to SEQ ID NO: 68

SEQ ID NO: 4341 - DNA, 600 bp, Homo sapiens; identical to SEQ ID NO: 68

SEQ ID NO: 4342 - DNA, 1400 bp, Homo sapiens; identical to SEQ ID NO: 70

SEQ ID NO: 4343 - DNA, 1400 bp, Homo sapiens; identical to SEQ ID NO: 70

SEQ ID NO: 4344 - DNA, 1400 bp, Homo sapiens; identical to SEQ ID NO: 72

SEQ ID NO: 4345 - DNA, 600 bp, Homo sapiens; identical to SEQ ID NO: 73
  misc_feature (435)..(435): n is a, c, g, or t

SEQ ID NO: 4346 - DNA, 600 bp, Homo sapiens; identical to SEQ ID NO: 73
  misc_feature (435)..(435): n is a, c, g, or t

SEQ ID NO: 4347 - DNA, 506 bp, Homo sapiens; identical to SEQ ID NO: 75

SEQ ID NO: 4348 - DNA, 446 bp, Homo sapiens; identical to SEQ ID NO: 76

SEQ ID NO: 4349 - DNA, 446 bp, Homo sapiens; identical to SEQ ID NO: 76

SEQ ID NO: 4350 - DNA, 446 bp, Homo sapiens; identical to SEQ ID NO: 78

SEQ ID NO: 4351 - DNA, 446 bp, Homo sapiens; identical to SEQ ID NO: 78

SEQ ID NO: 4352 - DNA, 450 bp, Homo sapiens; identical to SEQ ID NO: 80

SEQ ID NO: 4353 - DNA, 450 bp, Homo sapiens; identical to SEQ ID NO: 81

SEQ ID NO: 4354 - DNA, 450 bp, Homo sapiens; identical to SEQ ID NO: 81

SEQ ID NO: 4355 - DNA, 476 bp, Homo sapiens; identical to SEQ ID NO: 83

SEQ ID NO: 4356 - DNA, 472 bp, Homo sapiens; identical to SEQ ID NO: 84

SEQ ID NO: 4357 - DNA, 472 bp, Homo sapiens; identical to SEQ ID NO: 84

SEQ ID NO: 4358 - DNA, 477 bp, Homo sapiens; identical to SEQ ID NO: 86

SEQ ID NO: 4359 - DNA, 477 bp, Homo sapiens; identical to SEQ ID NO: 87

SEQ ID NO: 4360 - DNA, 477 bp, Homo sapiens; identical to SEQ ID NO: 87

SEQ ID NO: 4361 - DNA, 576 bp, Homo sapiens; identical to SEQ ID NO: 89

SEQ ID NO: 4362 - DNA, 583 bp, Homo sapiens; identical to SEQ ID NO: 90

SEQ ID NO: 4363 - DNA, 583 bp, Homo sapiens; identical to SEQ ID NO: 90

SEQ ID NO: 4364 - DNA, 583 bp, Homo sapiens; identical to SEQ ID NO: 92

SEQ ID NO: 4365 - DNA, 583 bp, Homo sapiens; identical to SEQ ID NO: 92

SEQ ID NO: 4366 - DNA, 468 bp, Homo sapiens; identical to SEQ ID NO: 94

SEQ ID NO: 4367 - DNA, 468 bp, Homo sapiens; identical to SEQ ID NO: 94

SEQ ID NO: 4368 - DNA, 535 bp, Homo sapiens; identical to SEQ ID NO: 96

SEQ ID NO: 4369 - DNA, 466 bp, Homo sapiens; identical to SEQ ID NO: 97

SEQ ID NO: 4370 - DNA, 466 bp, Homo sapiens; identical to SEQ ID NO: 97

SEQ ID NO: 4371 - DNA, 600 bp, Homo sapiens; identical to SEQ ID NO: 99

SEQ ID NO: 4372 - DNA, 600 bp, Homo sapiens; identical to SEQ ID NO: 100

SEQ ID NO: 4373 - DNA, 600 bp, Homo sapiens; identical to SEQ ID NO: 100

SEQ ID NO: 4374 - DNA, 1400 bp, Homo sapiens; identical to SEQ ID NO: 102

SEQ ID NO: 4375 - DNA, 1400 bp, Homo sapiens; identical to SEQ ID NO: 102

SEQ ID NO: 4376 - DNA, 1400 bp, Homo sapiens; identical to SEQ ID NO: 104

SEQ ID NO: 4377 - DNA, 1400 bp, Homo sapiens; identical to SEQ ID NO: 104

SEQ ID NO: 4378 - DNA, 600 bp, Homo sapiens; identical to SEQ ID NO: 106

SEQ ID NO: 4379 - DNA, 1400 bp, Homo sapiens; identical to SEQ ID NO: 107

SEQ ID NO: 4380 - DNA, 600 bp, Homo sapiens; identical to SEQ ID NO: 108

SEQ ID NO: 4381 - DNA, 600 bp, Homo sapiens; identical to SEQ ID NO: 109

SEQ ID NO: 4382 - DNA, 600 bp, Homo sapiens; identical to SEQ ID NO: 109

SEQ ID NO: 4383 - DNA, 600 bp, Homo sapiens; identical to SEQ ID NO: 111

SEQ ID NO: 4384 - DNA, 600 bp, Homo sapiens; identical to SEQ ID NO: 111

SEQ ID NO: 4385 - DNA, 1400 bp, Homo sapiens; identical to SEQ ID NO: 113

SEQ ID NO: 4386 - DNA, 1400 bp, Homo sapiens; identical to SEQ ID NO: 113

SEQ ID NO: 4387 - DNA, 600 bp, Homo sapiens; identical to SEQ ID NO: 115

SEQ ID NO: 4388 - DNA, 600 bp, Homo sapiens; identical to SEQ ID NO: 115

SEQ ID NO: 4389 - DNA, 1400 bp, Homo sapiens; identical to SEQ ID NO: 117

SEQ ID NO: 4390 - DNA, 1400 bp, Homo sapiens; identical to SEQ ID NO: 118

SEQ ID NO: 4391 - DNA, 1400 bp, Homo sapiens; identical to SEQ ID NO: 118

SEQ ID NO: 4392 - DNA, 600 bp, Homo sapiens; identical to SEQ ID NO: 120

SEQ ID NO: 4393 - DNA, 600 bp, Homo sapiens; identical to SEQ ID NO: 121

SEQ ID NO: 4394 - DNA, 600 bp, Homo sapiens; identical to SEQ ID NO: 121

SEQ ID NO: 4395 - DNA, 600 bp, Homo sapiens; identical to SEQ ID NO: 123

SEQ ID NO: 4396 - DNA, 1400 bp, Homo sapiens; identical to SEQ ID NO: 124

SEQ ID NO: 4397 - DNA, 1400 bp, Homo sapiens; identical to SEQ ID NO: 125

SEQ ID NO: 4398 - DNA, 600 bp, Homo sapiens; identical to SEQ ID NO: 126

SEQ ID NO: 4399 - DNA, 600 bp, Homo sapiens; identical to SEQ ID NO: 127

SEQ ID NO: 4400 - DNA, 1400 bp, Homo sapiens; identical to SEQ ID NO: 128
  misc_feature (615)..(615): n is a, c, g, or t

SEQ ID NO: 4401 - DNA, 600 bp, Homo sapiens; identical to SEQ ID NO: 129

SEQ ID NO: 4402 - DNA, 1400 bp, Homo sapiens; identical to SEQ ID NO: 130

SEQ ID NO: 4403 - DNA, 1400 bp, Homo sapiens; identical to SEQ ID NO: 131

SEQ ID NO: 4404 - DNA, 600 bp, Homo sapiens; identical to SEQ ID NO: 132

SEQ ID NO: 4405 - DNA, 600 bp, Homo sapiens; identical to SEQ ID NO: 132

SEQ ID NO: 4406 - DNA, 600 bp, Homo sapiens; identical to SEQ ID NO: 134

SEQ ID NO: 4407 - DNA, 600 bp, Homo sapiens; identical to SEQ ID NO: 135

SEQ ID NO: 4408 - DNA, 600 bp, Homo sapiens; identical to SEQ ID NO: 136
  misc_feature (350)..(523): n is a, c, g, or t
  misc_feature (546)..(546): n is a, c, g, or t

SEQ ID NO: 4409 - DNA, 600 bp, Homo sapiens; identical to SEQ ID NO: 136
  misc_feature (350)..(523): n is a, c, g, or t
  misc_feature (546)..(546): n is a, c, g, or t

SEQ ID NO: 4410 - DNA, 600 bp, Homo sapiens; identical to SEQ ID NO: 138

SEQ ID NO: 4411 - DNA, 600 bp, Homo sapiens; identical to SEQ ID NO: 138

SEQ ID NO: 4412 - DNA, 1400 bp, Homo sapiens; identical to SEQ ID NO: 140

SEQ ID NO: 4413 - DNA, 1400 bp, Homo sapiens; identical to SEQ ID NO: 140

SEQ ID NO: 4414 - DNA, 1400 bp, Homo sapiens; identical to SEQ ID NO: 142

SEQ ID NO: 4415 - DNA, 600 bp, Homo sapiens; identical to SEQ ID NO: 143

SEQ ID NO: 4416 - DNA, 600 bp, Homo sapiens; identical to SEQ ID NO: 143

SEQ ID NO: 4417 - DNA, 600 bp, Homo sapiens; identical to SEQ ID NO: 145

SEQ ID NO: 4418 - DNA, 600 bp, Homo sapiens; identical to SEQ ID NO: 145

SEQ ID NO: 4419 - DNA, 285 bp, Homo sapiens; identical to SEQ ID NO: 147

SEQ ID NO: 4420 - DNA, 285 bp, Homo sapiens; identical to SEQ ID NO: 147

SEQ ID NO: 4421 - DNA, 1400 bp, Homo sapiens; identical to SEQ ID NO: 149

SEQ ID NO: 4422 - DNA, 1400 bp, Homo sapiens; identical to SEQ ID NO: 150

SEQ ID NO: 4423 - DNA, 600 bp, Homo sapiens; identical to SEQ ID NO: 151

SEQ ID NO: 4424 - DNA, 600 bp, Homo sapiens; identical to SEQ ID NO: 152

SEQ ID NO: 4425 - DNA, 600 bp, Homo sapiens; identical to SEQ ID NO: 153

SEQ ID NO: 4426 - DNA, 600 bp, Homo sapiens; identical to SEQ ID NO: 154

SEQ ID NO: 4427 - DNA, 600 bp, Homo sapiens; identical to SEQ ID NO: 154

SEQ ID NO: 4428 - DNA, 600 bp, Homo sapiens; identical to SEQ ID NO: 156

SEQ ID NO: 4429 - DNA, 600 bp, Homo sapiens; identical to SEQ ID NO: 157

SEQ ID NO: 4430 - DNA, 1400 bp, Homo sapiens; identical to SEQ ID NO: 158

SEQ ID NO: 4431 - DNA, 1400 bp, Homo sapiens; identical to SEQ ID NO: 158

SEQ ID NO: 4432 - DNA, 1400 bp, Homo sapiens; identical to SEQ ID NO: 160

SEQ ID NO: 4433 - DNA, 600 bp, Homo sapiens; identical to SEQ ID NO: 161

SEQ ID NO: 4434 - DNA, 600 bp, Homo sapiens; identical to SEQ ID NO: 162

SEQ ID NO: 4435 - DNA, 600 bp, Homo sapiens; identical to SEQ ID NO: 162

SEQ ID NO: 4436 - DNA, 455 bp, Homo sapiens; identical to SEQ ID NO: 164

SEQ ID NO: 4437 - DNA, 455 bp, Homo sapiens; identical to SEQ ID NO: 164

SEQ ID NO: 4438 - DNA, 600 bp, Homo sapiens; identical to SEQ ID NO: 166
  misc_feature (588)..(588): n is a, c, g, or t
  misc_feature (595)..(598): n is a, c, g, or t

SEQ ID NO: 4439 - DNA, 600 bp, Homo sapiens; identical to SEQ ID NO: 166
  misc_feature (588)..(588): n is a, c, g, or t
  misc_feature (595)..(598): n is a, c, g, or t

SEQ ID NO: 4440 - DNA, 1400 bp, Homo sapiens; identical to SEQ ID NO: 168

SEQ ID NO: 4441 - DNA, 600 bp, Homo sapiens; identical to SEQ ID NO: 169

SEQ ID NO: 4442 - DNA, 600 bp, Homo sapiens; identical to SEQ ID NO: 170

SEQ ID NO: 4443 - DNA, 778 bp, Homo sapiens; identical to SEQ ID NO: 171

SEQ ID NO: 4444 - DNA, 778 bp, Homo sapiens; identical to SEQ ID NO: 171

SEQ ID NO: 4445 - DNA, 600 bp, Homo sapiens; identical to SEQ ID NO: 173

SEQ ID NO: 4446 - DNA, 600 bp, Homo sapiens; identical to SEQ ID NO: 173

SEQ ID NO: 4447 - DNA, 600 bp, Homo sapiens; identical to SEQ ID NO: 175

SEQ ID NO: 4448 - DNA, 600 bp, Homo sapiens; identical to SEQ ID NO: 175

SEQ ID NO: 4449 - DNA, 600 bp, Homo sapiens; identical to SEQ ID NO: 177

SEQ ID NO: 4450 - DNA, 600 bp, Homo sapiens; identical to SEQ ID NO: 178

SEQ ID NO: 4451 - DNA, 1400 bp, Homo sapiens; identical to SEQ ID NO: 179

SEQ ID NO: 4452 - DNA, 1400 bp, Homo sapiens; identical to SEQ ID NO: 180

SEQ ID NO: 4453 - DNA, 1400 bp, Homo sapiens; identical to SEQ ID NO: 181
  misc_feature (857)..(857): n is a, c, g, or t

SEQ ID NO: 4454 - DNA, 487 bp, Homo sapiens; identical to SEQ ID NO: 182

SEQ ID NO: 4455 - DNA, 600 bp, Homo sapiens; identical to SEQ ID NO: 183

SEQ ID NO: 4456 - DNA, 600 bp, Homo sapiens; identical to SEQ ID NO: 184

SEQ ID NO: 4457 - DNA, 600 bp, Homo sapiens; identical to SEQ ID NO: 184

SEQ ID NO: 4458 - DNA, 1400 bp, Homo sapiens; identical to SEQ ID NO: 186

SEQ ID NO: 4459 - DNA, 600 bp, Homo sapiens; identical to SEQ ID NO: 187

SEQ ID NO: 4460 - DNA, 600 bp, Homo sapiens; identical to SEQ ID NO: 187

SEQ ID NO: 4461 - DNA, 600 bp, Homo sapiens; identical to SEQ ID NO: 189

SEQ ID NO: 4462 - DNA, 600 bp, Homo sapiens; identical to SEQ ID NO: 189

SEQ ID NO: 4463 - DNA, 600 bp, Homo sapiens; identical to SEQ ID NO: 191

SEQ ID NO: 4464 - DNA, 101 bp, Homo sapiens; identical to SEQ ID NO: 192

SEQ ID NO: 4465 - DNA, 1400 bp, Homo sapiens; identical to SEQ ID NO: 193

SEQ ID NO: 4466 - DNA, 600 bp, Homo sapiens; identical to SEQ ID NO: 194
  misc_feature (462)..(463): n is a, c, g, or t
  misc_feature (488)..(488): n is a, c, g, or t

SEQ ID NO: 4467 - DNA, 600 bp, Homo sapiens; identical to SEQ ID NO: 194
  misc_feature (462)..(463): n is a, c, g, or t
  misc_feature (488)..(488): n is a, c, g, or t

SEQ ID NO: 4468 - DNA, 600 bp, Homo sapiens; identical to SEQ ID NO: 196
  misc_feature (588)..(588): n is a, c, g, or t
  misc_feature (597)..(597): n is a, c, g, or t

SEQ ID NO: 4469 - DNA, 600 bp, Homo sapiens; identical to SEQ ID NO: 197

SEQ ID NO: 4470 - DNA, 600 bp, Homo sapiens; identical to SEQ ID NO: 198

SEQ ID NO: 4471 - DNA, 600 bp, Homo sapiens; identical to SEQ ID NO: 198

SEQ ID NO: 4472 - DNA, 1400 bp, Homo sapiens; identical to SEQ ID NO: 200

SEQ ID NO: 4473 - DNA, 600 bp, Homo sapiens; identical to SEQ ID NO: 201

SEQ ID NO: 4474 - DNA, 1400 bp, Homo sapiens; identical to SEQ ID NO: 202

SEQ ID NO: 4475 - DNA, 600 bp, Homo sapiens; identical to SEQ ID NO: 203

SEQ ID NO: 4476 - DNA, 600 bp, Homo sapiens; identical to SEQ ID NO: 203

SEQ ID NO: 4477 - DNA, 1400 bp, Homo sapiens; identical to SEQ ID NO: 205

SEQ ID NO: 4478 - DNA, 1400 bp, Homo sapiens; identical to SEQ ID NO: 205

SEQ ID NO: 4479 - DNA, 600 bp, Homo sapiens; identical to SEQ ID NO: 207

SEQ ID NO: 4480 - DNA, 600 bp, Homo sapiens; identical to SEQ ID NO: 208
  misc_feature (566)..(566): n is a, c, g, or t
  misc_feature (569)..(569): n is a, c, g, or t
  misc_feature (571)..(571): n is a, c, g, or t
  misc_feature (578)..(579): n is a, c, g, or t

SEQ ID NO: 4481 - DNA, 1400 bp, Homo sapiens; identical to SEQ ID NO: 209

SEQ ID NO: 4482 - DNA, 1400 bp, Homo sapiens; identical to SEQ ID NO: 210

SEQ ID NO: 4483 - DNA, 600 bp, Homo sapiens; identical to SEQ ID NO: 211

SEQ ID NO: 4484 - DNA, 600 bp, Homo sapiens; identical to SEQ ID NO: 211

SEQ ID NO: 4485 - DNA, 600 bp, Homo sapiens; identical to SEQ ID NO: 213

SEQ ID NO: 4486 - DNA, 600 bp, Homo sapiens; identical to SEQ ID NO: 213

SEQ ID NO: 4487 - DNA, 600 bp, Homo sapiens; identical to SEQ ID NO: 215

SEQ ID NO: 4488 - DNA, 600 bp, Homo sapiens; identical to SEQ ID NO: 216

SEQ ID NO: 4489 - DNA, 600 bp, Homo sapiens; identical to SEQ ID NO: 217

SEQ ID NO: 4490 - DNA, 600 bp, Homo sapiens; identical to SEQ ID NO: 218

SEQ ID NO: 4491 - DNA, 1400 bp, Homo sapiens; identical to SEQ ID NO: 219

SEQ ID NO: 4492 - DNA, 600 bp, Homo sapiens; identical to SEQ ID NO: 220

SEQ ID NO: 4493 - DNA, 600 bp, Homo sapiens; identical to SEQ ID NO: 221

SEQ ID NO: 4494 - DNA, 600 bp, Homo sapiens; identical to SEQ ID NO: 222

SEQ ID NO: 4495 - DNA, 600 bp, Homo sapiens; identical to SEQ ID NO: 223

SEQ ID NO: 4496 - DNA, 600 bp, Homo sapiens; identical to SEQ ID NO: 223

SEQ ID NO: 4497 - DNA, 600 bp, Homo sapiens; identical to SEQ ID NO: 225

SEQ ID NO: 4498 - DNA, 600 bp, Homo sapiens; identical to SEQ ID NO: 225

SEQ ID NO: 4499 - DNA, 600 bp, Homo sapiens; identical to SEQ ID NO: 227

SEQ ID NO: 4500 - DNA, 600 bp, Homo sapiens; identical to SEQ ID NO: 228

SEQ ID NO: 4501 - DNA, 600 bp, Homo sapiens; identical to SEQ ID NO: 228

SEQ ID NO: 4502 - DNA, 1400 bp, Homo sapiens; identical to SEQ ID NO: 230

SEQ ID NO: 4503 - DNA, 1400 bp, Homo sapiens; identical to SEQ ID NO: 230

SEQ ID NO: 4504 - DNA, 600 bp, Homo sapiens; identical to SEQ ID NO: 232

SEQ ID NO: 4505 - DNA, 600 bp, Homo sapiens; identical to SEQ ID NO: 233

SEQ ID NO: 4506 - DNA, 600 bp, Homo sapiens; identical to SEQ ID NO: 234

SEQ ID NO: 4507 - DNA, 1400 bp, Homo sapiens; identical to SEQ ID NO: 235

SEQ ID NO: 4508 - DNA, 1225 bp, Homo sapiens; identical to SEQ ID NO: 236

SEQ ID NO: 4509 - DNA, 1225 bp, Homo sapiens; identical to SEQ ID NO: 236

SEQ ID NO: 4510 - DNA, 600 bp, Homo sapiens; identical to SEQ ID NO: 238

SEQ ID NO: 4511 - DNA, 600 bp, Homo sapiens; identical to SEQ ID NO: 239

SEQ ID NO: 4512 - DNA, 600 bp, Homo sapiens; identical to SEQ ID NO: 239

SEQ ID NO: 4513 - DNA, 1400 bp, Homo sapiens; identical to SEQ ID NO: 241

SEQ ID NO: 4514 - DNA, 1400 bp, Homo sapiens; identical to SEQ ID NO: 241

SEQ ID NO: 4515 - DNA, 600 bp, Homo sapiens; identical to SEQ ID NO: 243

SEQ ID NO: 4516 - DNA, 600 bp, Homo sapiens; identical to SEQ ID NO: 243

SEQ ID NO: 4517 - DNA, 600 bp, Homo sapiens; identical to SEQ ID NO: 245

SEQ ID NO: 4518 - DNA, 1400 bp, Homo sapiens; identical to SEQ ID NO: 246

SEQ ID NO: 4519 - DNA, 1400 bp, Homo sapiens; identical to SEQ ID NO: 246

SEQ ID NO: 4520 - DNA, 600 bp, Homo sapiens; identical to SEQ ID NO: 248

SEQ ID NO: 4521 - DNA, 600 bp, Homo sapiens; identical to SEQ ID NO: 248

SEQ ID NO: 4522 - DNA, 1400 bp, Homo sapiens; identical to SEQ ID NO: 250

SEQ ID NO: 4523 - DNA, 600 bp, Homo sapiens; identical to SEQ ID NO: 251

SEQ ID NO: 4524 - DNA, 1400 bp, Homo sapiens; identical to SEQ ID NO: 252

SEQ ID NO: 4525 - DNA, 1400 bp, Homo sapiens; identical to SEQ ID NO: 252

SEQ ID NO: 4526 - DNA, 1400 bp, Homo sapiens; identical to SEQ ID NO: 254

SEQ ID NO: 4527 - DNA, 600 bp, Homo sapiens; identical to SEQ ID NO: 255

SEQ ID NO: 4528 - DNA, 600 bp, Homo sapiens; identical to SEQ ID NO: 255

SEQ ID NO: 4529 - DNA, 1400 bp, Homo sapiens; identical to SEQ ID NO: 257

SEQ ID NO: 4530 - DNA, 600 bp, Homo sapiens; identical to SEQ ID NO: 258

SEQ ID NO: 4531 - DNA, 600 bp, Homo sapiens; identical to SEQ ID NO: 259

SEQ ID NO: 4532 - DNA, 600 bp, Homo sapiens; identical to SEQ ID NO: 259

SEQ ID NO: 4533 - DNA, 1400 bp, Homo sapiens; identical to SEQ ID NO: 261

SEQ ID NO: 4534 - DNA, 600 bp, Homo sapiens; identical to SEQ ID NO: 262

SEQ ID NO: 4535 - DNA, 600 bp, Homo sapiens; identical to SEQ ID NO: 262

SEQ ID NO: 4536 - DNA, 942 bp, Homo sapiens; identical to SEQ ID NO: 264

SEQ ID NO: 4537 - DNA, 1400 bp, Homo sapiens; identical to SEQ ID NO: 265

SEQ ID NO: 4538 - DNA, 1350 bp, Homo sapiens; identical to SEQ ID NO: 266

SEQ ID NO: 4539 - DNA, 1400 bp, Homo sapiens; identical to SEQ ID NO: 267

SEQ ID NO: 4540 - DNA, 1400 bp, Homo sapiens; identical to SEQ ID NO: 267

SEQ ID NO: 4541 - DNA, 1400 bp, Homo sapiens; identical to SEQ ID NO: 269

SEQ ID NO: 4542 - DNA, 1400 bp, Homo sapiens; identical to SEQ ID NO: 270

SEQ ID NO: 4543 - DNA, 600 bp, Homo sapiens; identical to SEQ ID NO: 271

SEQ ID NO: 4544 - DNA, 1400 bp, Homo sapiens; identical to SEQ ID NO: 272

SEQ ID NO: 4545 - DNA, 600 bp, Homo sapiens; identical to SEQ ID NO: 273

SEQ ID NO: 4546 - DNA, 600 bp, Homo sapiens; identical to SEQ ID NO: 273

SEQ ID NO: 4547 - DNA, 600 bp, Homo sapiens; identical to SEQ ID NO: 275

SEQ ID NO: 4548 - DNA, 1400 bp, Homo sapiens; identical to SEQ ID NO: 276

SEQ ID NO: 4549 - DNA, 600 bp, Homo sapiens; identical to SEQ ID NO: 277

SEQ ID NO: 4550 - DNA, 600 bp, Homo sapiens; identical to SEQ ID NO: 278

SEQ ID NO: 4551 - DNA, 600 bp, Homo sapiens; identical to SEQ ID NO: 279

SEQ ID NO: 4552 - DNA, 600 bp, Homo sapiens; identical to SEQ ID NO: 279

SEQ ID NO: 4553 - DNA, 1400 bp, Homo sapiens; identical to SEQ ID NO: 281
  misc_feature (1399)..(1399): n is a, c, g, or t

SEQ ID NO: 4554 - DNA, 1400 bp, Homo sapiens; identical to SEQ ID NO: 282

SEQ ID NO: 4555 - DNA, 600 bp, Homo sapiens; identical to SEQ ID NO: 283

SEQ ID NO: 4556 - DNA, 600 bp, Homo sapiens; identical to SEQ ID NO: 283

SEQ ID NO: 4557 - DNA, 600 bp, Homo sapiens; identical to SEQ ID NO: 285

SEQ ID NO: 4558 - DNA, 600 bp, Homo sapiens; identical to SEQ ID NO: 285

SEQ ID NO: 4559 - DNA, 600 bp, Homo sapiens; identical to SEQ ID NO: 287

SEQ ID NO: 4560 - DNA, 600 bp, Homo sapiens; identical to SEQ ID NO: 287

SEQ ID NO: 4561 - DNA, 600 bp, Homo sapiens; identical to SEQ ID NO: 289

SEQ ID NO: 4562 - DNA, 600 bp, Homo sapiens; identical to SEQ ID NO: 289

SEQ ID NO: 4563 - DNA, 954 bp, Homo sapiens; identical to SEQ ID NO: 291

SEQ ID NO: 4564 - DNA, 954 bp, Homo sapiens; identical to SEQ ID NO: 291

SEQ ID NO: 4565 - DNA, 1400 bp, Homo sapiens; identical to SEQ ID NO: 293

SEQ ID NO: 4566 - DNA, 600 bp, Homo sapiens; identical to SEQ ID NO: 294

SEQ ID NO: 4567 - DNA, 600 bp, Homo sapiens; identical to SEQ ID NO: 294

SEQ ID NO: 4568 - DNA, 1400 bp, Homo sapiens; identical to SEQ ID NO: 296

SEQ ID NO: 4569 - DNA, 1400 bp, Homo sapiens; identical to SEQ ID NO: 296

SEQ ID NO: 4570 - DNA, 1400 bp, Homo sapiens; identical to SEQ ID NO: 298

SEQ ID NO: 4571 - DNA, 600 bp, Homo sapiens; identical to SEQ ID NO: 299

SEQ ID NO: 4572 - DNA, 1400 bp, Homo sapiens; identical to SEQ ID NO: 300

SEQ ID NO: 4573 - DNA, 1400 bp, Homo sapiens; identical to SEQ ID NO: 301

SEQ ID NO: 4574 - DNA, 1400 bp, Homo sapiens; identical to SEQ ID NO: 301

SEQ ID NO: 4575 - DNA, 600 bp, Homo sapiens; identical to SEQ ID NO: 303

SEQ ID NO: 4576 - DNA, 600 bp, Homo sapiens; identical to SEQ ID NO: 303

SEQ ID NO: 4577 - DNA, 1400 bp, Homo sapiens; identical to SEQ ID NO: 305

SEQ ID NO: 4578 - DNA, 600 bp, Homo sapiens; identical to SEQ ID NO: 306

SEQ ID NO: 4579 - DNA, 1400 bp, Homo sapiens; identical to SEQ ID NO: 307

SEQ ID NO: 4580 - DNA, 1400 bp, Homo sapiens; identical to SEQ ID NO: 307

SEQ ID NO: 4581 - DNA, 600 bp, Homo sapiens; identical to SEQ ID NO: 309

SEQ ID NO: 4582 - DNA, 1400 bp, Homo sapiens; identical to SEQ ID NO: 310

SEQ ID NO: 4583 - DNA, 600 bp, Homo sapiens; identical to SEQ ID NO: 311

SEQ ID NO: 4584 - DNA, 600 bp, Homo sapiens; identical to SEQ ID NO: 312

SEQ ID NO: 4585 - DNA, 600 bp, Homo sapiens; identical to SEQ ID NO: 312

SEQ ID NO: 4586 - DNA, 600 bp, Homo sapiens; identical to SEQ ID NO: 314

SEQ ID NO: 4587 - DNA, 600 bp, Homo sapiens; identical to SEQ ID NO: 315

SEQ ID NO: 4588 - DNA, 600 bp, Homo sapiens; identical to SEQ ID NO: 315

SEQ ID NO: 4589 - DNA, 600 bp, Homo sapiens; identical to SEQ ID NO: 317

SEQ ID NO: 4590 - DNA, 600 bp, Homo sapiens; identical to SEQ ID NO: 318

SEQ ID NO: 4591 - DNA, 600 bp, Homo sapiens; identical to SEQ ID NO: 319

SEQ ID NO: 4592 - DNA, 936 bp, Homo sapiens; identical to SEQ ID NO: 320

SEQ ID NO: 4593 - DNA, 600 bp, Homo sapiens; identical to SEQ ID NO: 321

SEQ ID NO: 4594 - DNA, 600 bp, Homo sapiens; identical to SEQ ID NO: 321

SEQ ID NO: 4595 - DNA, 600 bp, Homo sapiens; identical to SEQ ID NO: 323
  misc_feature (472)..(472): n is a, c, g, or t
  misc_feature (485)..(485): n is a, c, g, or t
  misc_feature (541)..(541): n is a, c, g, or t
  misc_feature (588)..(588): n is a, c, g, or t

SEQ ID NO: 4596 - DNA, 600 bp, Homo sapiens; identical to SEQ ID NO: 323
  misc_feature (472)..(472): n is a, c, g, or t
  misc_feature (485)..(485): n is a, c, g, or t
  misc_feature (541)..(541): n is a, c, g, or t
  misc_feature (588)..(588): n is a, c, g, or t

SEQ ID NO: 4597 - DNA, 939 bp, Homo sapiens; identical to SEQ ID NO: 325

SEQ ID NO: 4598 - DNA, 600 bp, Homo sapiens; identical to SEQ ID NO: 326

SEQ ID NO: 4599 - DNA, 600 bp, Homo sapiens; identical to SEQ ID NO: 327

SEQ ID NO: 4600 - DNA, 960 bp, Homo sapiens; identical to SEQ ID NO: 328

SEQ ID NO: 4601 - DNA, 600 bp, Homo sapiens; identical to SEQ ID NO: 329

SEQ ID NO: 4602 - DNA, 1400 bp, Homo sapiens; identical to SEQ ID NO: 330

SEQ ID NO: 4603 - DNA, 1400 bp, Homo sapiens; identical to SEQ ID NO: 330

SEQ ID NO: 4604 - DNA, 1375 bp, Homo sapiens; identical to SEQ ID NO: 332

SEQ ID NO: 4605 - DNA, 600 bp, Homo sapiens; identical to SEQ ID NO: 333

SEQ ID NO: 4606 - DNA, 600 bp, Homo sapiens; identical to SEQ ID NO: 334

SEQ ID NO: 4607 - DNA, 600 bp, Homo sapiens; identical to SEQ ID NO: 334

SEQ ID NO: 4608 - DNA, 600 bp, Homo sapiens; identical to SEQ ID NO: 336

SEQ ID NO: 4609 - DNA, 945 bp, Homo sapiens; identical to SEQ ID NO: 337

SEQ ID NO: 4610 - DNA, 600 bp, Homo sapiens; identical to SEQ ID NO: 338

SEQ ID NO: 4611 - DNA, 600 bp, Homo sapiens; identical to SEQ ID NO: 338

SEQ ID NO: 4612 - DNA, 1400 bp, Homo sapiens; identical to SEQ ID NO: 340

SEQ ID NO: 4613 - DNA, 1400 bp, Homo sapiens; identical to SEQ ID NO: 340

SEQ ID NO: 4614 - DNA, 600 bp, Homo sapiens; identical to SEQ ID NO: 342

SEQ ID NO: 4615 - DNA, 600 bp, Homo sapiens; identical to SEQ ID NO: 343

SEQ ID NO: 4616 - DNA, 600 bp, Homo sapiens; identical to SEQ ID NO: 344

SEQ ID NO: 4617 - DNA, 1400 bp, Homo sapiens; identical to SEQ ID NO: 345

SEQ ID NO: 4618 - DNA, 1400 bp, Homo sapiens; identical to SEQ ID NO: 345

SEQ ID NO: 4619 - DNA, 600 bp, Homo sapiens; identical to SEQ ID NO: 347

SEQ ID NO: 4620 - DNA, 1400 bp, Homo sapiens; identical to SEQ ID NO: 348

SEQ ID NO: 4621 - DNA, 1400 bp, Homo sapiens; identical to SEQ ID NO: 349

SEQ ID NO: 4622 - DNA, 1400 bp, Homo sapiens; identical to SEQ ID NO: 349

SEQ ID NO: 4623 - DNA, 1400 bp, Homo sapiens; identical to SEQ ID NO: 351

SEQ ID NO: 4624 - DNA, 600 bp, Homo sapiens; identical to SEQ ID NO: 352
  misc_feature (580)..(581): n is a, c, g, or t

SEQ ID NO: 4625 - DNA, 1184 bp, Homo sapiens; identical to SEQ ID NO: 353

SEQ ID NO: 4626 - DNA, 1184 bp, Homo sapiens; identical to SEQ ID NO: 353

SEQ ID NO: 4627 - DNA, 600 bp, Homo sapiens; identical to SEQ ID NO: 355

SEQ ID NO: 4628 - DNA, 600 bp, Homo sapiens; identical to SEQ ID NO: 355

SEQ ID NO: 4629 - DNA, 1400 bp, Homo sapiens; identical to SEQ ID NO: 357

SEQ ID NO: 4630 - DNA, 600 bp, Homo sapiens; identical to SEQ ID NO: 358

SEQ ID NO: 4631 - DNA, 600 bp, Homo sapiens; identical to SEQ ID NO: 358

SEQ ID NO: 4632 - DNA, 600 bp, Homo sapiens; identical to SEQ ID NO: 360

SEQ ID NO: 4633 - DNA, 600 bp, Homo sapiens; identical to SEQ ID NO: 361

SEQ ID NO: 4634 - DNA, 600 bp, Homo sapiens; identical to SEQ ID NO: 362

SEQ ID NO: 4635 - DNA, 600 bp, Homo sapiens; identical to SEQ ID NO: 362

SEQ ID NO: 4636 - DNA, 600 bp, Homo sapiens; identical to SEQ ID NO: 364

SEQ ID NO: 4637 - DNA, 1400 bp, Homo sapiens; identical to SEQ ID NO: 365

SEQ ID NO: 4638 - DNA, 1400 bp, Homo sapiens; identical to SEQ ID NO: 365

SEQ ID NO: 4639 - DNA, 600 bp, Homo sapiens; identical to SEQ ID NO: 367

SEQ ID NO: 4640 - DNA, 600 bp, Homo sapiens; identical to SEQ ID NO: 368

SEQ ID NO: 4641 - DNA, 600 bp, Homo sapiens; identical to SEQ ID NO: 368

SEQ ID NO: 4642 - DNA, 600 bp, Homo sapiens; identical to SEQ ID NO: 370

SEQ ID NO: 4643 - DNA, 1400 bp, Homo sapiens; identical to SEQ ID NO: 371

SEQ ID NO: 4644 - DNA, 1400 bp, Homo sapiens; identical to SEQ ID NO: 371

SEQ ID NO: 4645 - DNA, 1323 bp, Homo sapiens; identical to SEQ ID NO: 373
  misc_feature (47)..(47): n is a, c, g, or t
  misc_feature (1310)..(1310): n is a, c, g, or t

SEQ ID NO: 4646 - DNA, 1323 bp, Homo sapiens; identical to SEQ ID NO: 373
  misc_feature (47)..(47): n is a, c, g, or t
  misc_feature (1310)..(1310): n is a, c, g, or t

SEQ ID NO: 4647 - DNA, 1400 bp, Homo sapiens; identical to SEQ ID NO: 375

SEQ ID NO: 4648 - DNA, 600 bp, Homo sapiens; identical to SEQ ID NO: 376

SEQ ID NO: 4649 - DNA, 600 bp, Homo sapiens; identical to SEQ ID NO: 376

SEQ ID NO: 4650 - DNA, 600 bp, Homo sapiens; identical to SEQ ID NO: 378

SEQ ID NO: 4651 - DNA, 600 bp, Homo sapiens; identical to SEQ ID NO: 378

SEQ ID NO: 4652 - DNA, 600 bp, Homo sapiens; identical to SEQ ID NO: 380

SEQ ID NO: 4653 - DNA, 600 bp, Homo sapiens; identical to SEQ ID NO: 380

SEQ ID NO: 4654 - DNA, 1400 bp, Homo sapiens; identical to SEQ ID NO: 382

SEQ ID NO: 4655 - DNA, 1400 bp, Homo sapiens; identical to SEQ ID NO: 382

SEQ ID NO: 4656 - DNA, 1400 bp, Homo sapiens; identical to SEQ ID NO: 384

SEQ ID NO: 4657 - DNA, 1400 bp, Homo sapiens; identical to SEQ ID NO: 384

SEQ ID NO: 4658 - DNA, 134 bp, Homo sapiens; identical to SEQ ID NO: 386

SEQ ID NO: 4659 - DNA, 600 bp, Homo sapiens; identical to SEQ ID NO: 387

SEQ ID NO: 4660 - DNA, 600 bp, Homo sapiens; identical to SEQ ID NO: 387

SEQ ID NO: 4661 - DNA, 600 bp, Homo sapiens; identical to SEQ ID NO: 389

SEQ ID NO: 4662 - DNA, 600 bp, Homo sapiens; identical to SEQ ID NO: 389

SEQ ID NO: 4663 - DNA, 600 bp, Homo sapiens; identical to SEQ ID NO: 391

SEQ ID NO: 4664 - DNA, 600 bp, Homo sapiens; identical to SEQ ID NO: 391

SEQ ID NO: 4665 - DNA, 600 bp, Homo sapiens; identical to SEQ ID NO: 393

SEQ ID NO: 4666 - DNA, 600 bp, Homo sapiens; identical to SEQ ID NO: 393

SEQ ID NO: 4667 - DNA, 476 bp, Homo sapiens; identical to SEQ ID NO: 395

SEQ ID NO: 4668 - DNA, 476 bp, Homo sapiens; identical to SEQ ID NO: 395

SEQ ID NO: 4669 - DNA, 600 bp, Homo sapiens; identical to SEQ ID NO: 397

SEQ ID NO: 4670 - DNA, 600 bp, Homo sapiens; identical to SEQ ID NO: 398

SEQ ID NO: 4671 - DNA, 1400 bp, Homo sapiens; identical to SEQ ID NO: 399

SEQ ID NO: 4672 - DNA, 1400 bp, Homo sapiens; identical to SEQ ID NO: 399

SEQ ID NO: 4673 - DNA, 600 bp, Homo sapiens; identical to SEQ ID NO: 401
  misc_feature (370)..(370): n is a, c, g, or t
  misc_feature (379)..(379): n is a, c, g, or t
  misc_feature (467)..(467): n is a, c, g, or t
  misc_feature (544)..(544): n is a, c, g, or t
  misc_feature (579)..(579): n is a, c, g, or t
  misc_feature (584)..(584): n is a, c, g, or t
  misc_feature (587)..(587): n is a, c, g, or t

SEQ ID NO: 4674 - DNA, 600 bp, Homo sapiens; identical to SEQ ID NO: 401
  misc_feature (370)..(370): n is a, c, g, or t
  misc_feature (379)..(379): n is a, c, g, or t
  misc_feature (467)..(467): n is a, c, g, or t
  misc_feature (544)..(544): n is a, c, g, or t
  misc_feature (579)..(579): n is a, c, g, or t
  misc_feature (584)..(584): n is a, c, g, or t
  misc_feature (587)..(587): n is a, c, g, or t

SEQ ID NO: 4675 - DNA, 570 bp, Homo sapiens; identical to SEQ ID NO: 403

SEQ ID NO: 4676 - DNA, 600 bp, Homo sapiens; identical to SEQ ID NO: 404

SEQ ID NO: 4677 - DNA, 600 bp, Homo sapiens; identical to SEQ ID NO: 405

SEQ ID NO: 4678 - DNA, 600 bp, Homo sapiens; identical to SEQ ID NO: 405

SEQ ID NO: 4679 - DNA, 600 bp, Homo sapiens; identical to SEQ ID NO: 407

SEQ ID NO: 4680 - DNA, 600 bp, Homo sapiens; identical to SEQ ID NO: 408

SEQ ID NO: 4681 - DNA, 600 bp, Homo sapiens; identical to SEQ ID NO: 408

SEQ ID NO: 4682 - DNA, 600 bp, Homo sapiens; identical to SEQ ID NO: 410

SEQ ID NO: 4683 - DNA, 600 bp, Homo sapiens; identical to SEQ ID NO: 410

SEQ ID NO: 4684 - DNA, 1400 bp, Homo sapiens; identical to SEQ ID NO: 412

SEQ ID NO: 4685 - DNA, 600 bp, Homo sapiens; identical to SEQ ID NO: 413

SEQ ID NO: 4686 - DNA, 549 bp, Homo sapiens; identical to SEQ ID NO: 414

SEQ ID NO: 4687 - DNA, 600 bp, Homo sapiens; identical to SEQ ID NO: 415

SEQ ID NO: 4688 - DNA, 600 bp, Homo sapiens; identical to SEQ ID NO: 416
  misc_feature (513)..(514): n is a, c, g, or t
  misc_feature (517)..(517): n is a, c, g, or t
  misc_feature (552)..(552): n is a, c, g, or t
  misc_feature (562)..(562): n is a, c, g, or t
  misc_feature (568)..(568): n is a, c, g, or t
  misc_feature (572)..(572): n is a, c, g, or t
  misc_feature (583)..(583): n is a, c, g, or t
  misc_feature (587)..(588): n is a, c, g, or t
  misc_feature (592)..(592): n is a, c, g, or t
  misc_feature (597)..(597): n is a, c, g, or t
  misc_feature (599)..(599): n is a, c, g, or t

SEQ ID NO: 4689 - DNA, 600 bp, Homo sapiens; identical to SEQ ID NO: 416
  misc_feature (513)..(514): n is a, c, g, or t
  misc_feature (517)..(517): n is a, c, g, or t
  misc_feature (552)..(552): n is a, c, g, or t
  misc_feature (562)..(562): n is a, c, g, or t
  misc_feature (568)..(568): n is a, c, g, or t
  misc_feature (572)..(572): n is a, c, g, or t
  misc_feature (583)..(583): n is a, c, g, or t
  misc_feature (587)..(588): n is a, c, g, or t
  misc_feature (592)..(592): n is a, c, g, or t
  misc_feature (597)..(597): n is a, c, g, or t
  misc_feature (599)..(599): n is a, c, g, or t

SEQ ID NO: 4690 - DNA, 600 bp, Homo sapiens; identical to SEQ ID NO: 418

SEQ ID NO: 4691 - DNA, 600 bp, Homo sapiens; identical to SEQ ID NO: 419

SEQ ID NO: 4692 - DNA, 600 bp, Homo sapiens; identical to SEQ ID NO: 420

SEQ ID NO: 4693 - DNA, 600 bp, Homo sapiens; identical to SEQ ID NO: 420

SEQ ID NO: 4694 - DNA, 361 bp, Homo sapiens; identical to SEQ ID NO: 422

SEQ ID NO: 4695 - DNA, 361 bp, Homo sapiens; identical to SEQ ID NO: 422

SEQ ID NO: 4696 - DNA, 600 bp, Homo sapiens; identical to SEQ ID NO: 424

SEQ ID NO: 4697 - DNA, 1316 bp, Homo sapiens; identical to SEQ ID NO: 425

SEQ ID NO: 4698 - DNA, 1316 bp, Homo sapiens; identical to SEQ ID NO: 425

SEQ ID NO: 4699 - DNA, 600 bp, Homo sapiens; identical to SEQ ID NO: 427

SEQ ID NO: 4700 - DNA, 600 bp, Homo sapiens; identical to SEQ ID NO: 428

SEQ ID NO: 4701 - DNA, 600 bp, Homo sapiens; identical to SEQ ID NO: 429

SEQ ID NO: 4702 - DNA, 600 bp, Homo sapiens; identical to SEQ ID NO: 429

SEQ ID NO: 4703 - DNA, 600 bp, Homo sapiens; identical to SEQ ID NO: 431

SEQ ID NO: 4704 - DNA, 600 bp, Homo sapiens; identical to SEQ ID NO: 431

SEQ ID NO: 4705 - DNA, 600 bp, Homo sapiens; identical to SEQ ID NO: 433

SEQ ID NO: 4706 - DNA, 1280 bp, Homo sapiens; identical to SEQ ID NO: 434

SEQ ID NO: 4707 - DNA, 600 bp, Homo sapiens; identical to SEQ ID NO: 435

SEQ ID NO: 4708 - DNA, 1400 bp, Homo sapiens; identical to SEQ ID NO: 436

SEQ ID NO: 4709 - DNA, 1400 bp, Homo sapiens; identical to SEQ ID NO: 436

SEQ ID NO: 4710 - DNA, 1400 bp, Homo sapiens; identical to SEQ ID NO: 438

SEQ ID NO: 4711 - DNA, 600 bp, Homo sapiens; identical to SEQ ID NO: 439

SEQ ID NO: 4712 - DNA, 600 bp, Homo sapiens; identical to SEQ ID NO: 440
  misc_feature (164)..(164): n is a, c, g, or t
  misc_feature (166)..(167): n is a, c, g, or t
  misc_feature (187)..(187): n is a, c, g, or t
  misc_feature (191)..(191): n is a, c, g, or t
  misc_feature (196)..(196): n is a, c, g, or t
  misc_feature (198)..(198): n is a, c, g, or t
  misc_feature (462)..(462): n is a, c, g, or t
  misc_feature (485)..(485): n is a, c, g, or t
  misc_feature (506)..(506): n is a, c, g, or t

SEQ ID NO: 4713 - DNA, 600 bp, Homo sapiens; identical to SEQ ID NO: 440
  misc_feature (164)..(164): n is a, c, g, or t
  misc_feature (166)..(167): n is a, c, g, or t
  misc_feature (187)..(187): n is a, c, g, or t
  misc_feature (191)..(191): n is a, c, g, or t
  misc_feature (196)..(196): n is a, c, g, or t
  misc_feature (198)..(198): n is a, c, g, or t
  misc_feature (462)..(462): n is a, c, g, or t
  misc_feature (485)..(485): n is a, c, g, or t
  misc_feature (506)..(506): n is a, c, g, or t

SEQ ID NO: 4714 - DNA, 600 bp, Homo sapiens; identical to SEQ ID NO: 442
  misc_feature (434)..(436): n is a, c, g, or t
  misc_feature (482)..(482): n is a, c, g, or t
  misc_feature (499)..(499): n is a, c, g, or t
  misc_feature (502)..(502): n is a, c, g, or t
  misc_feature (506)..(506): n is a, c, g, or t
  misc_feature (516)..(516): n is a, c, g, or t
  misc_feature (524)..(524): n is a, c, g, or t
  misc_feature (528)..(528): n is a, c, g, or t
  misc_feature (586)..(586): n is a, c, g, or t
  misc_feature (592)..(592): n is a, c, g, or t

SEQ ID NO: 4715 - DNA, 600 bp, Homo sapiens; identical to SEQ ID NO: 442
  misc_feature (434)..(436): n is a, c, g, or t
  misc_feature (482)..(482): n is a, c, g, or t
  misc_feature (499)..(499): n is a, c, g, or t
  misc_feature (502)..(502): n is a, c, g, or t
  misc_feature (506)..(506): n is a, c, g, or t
  misc_feature (516)..(516): n is a, c, g, or t
  misc_feature (524)..(524): n is a, c, g, or t
  misc_feature (528)..(528): n is a, c, g, or t
  misc_feature (586)..(586): n is a, c, g, or t
  misc_feature (592)..(592): n is a, c, g, or t

SEQ ID NO: 4716 - DNA, 600 bp, Homo sapiens; identical to SEQ ID NO: 444

SEQ ID NO: 4717 - DNA, 600 bp, Homo sapiens; identical to SEQ ID NO: 444

SEQ ID NO: 4718 - DNA, 600 bp, Homo sapiens; identical to SEQ ID NO: 446

SEQ ID NO: 4719 - DNA, 600 bp, Homo sapiens; identical to SEQ ID NO: 446

SEQ ID NO: 4720 - DNA, 600 bp, Homo sapiens; identical to SEQ ID NO: 448

SEQ ID NO: 4721 - DNA, 600 bp, Homo sapiens; identical to SEQ ID NO: 449

SEQ ID NO: 4722 - DNA, 600 bp, Homo sapiens; identical to SEQ ID NO: 450

SEQ ID NO: 4723 - DNA, 600 bp, Homo sapiens; identical to SEQ ID NO: 450

SEQ ID NO: 4724 - DNA, 588 bp, Homo sapiens; identical to SEQ ID NO: 452

SEQ ID NO: 4725 - DNA, 588 bp, Homo sapiens; identical to SEQ ID NO: 452

SEQ ID NO: 4726 - DNA, 600 bp, Homo sapiens; identical to SEQ ID NO: 454

SEQ ID NO: 4727 - DNA, 600 bp, Homo sapiens; identical to SEQ ID NO: 455

SEQ ID NO: 4728 - DNA, 600 bp, Homo sapiens; identical to SEQ ID NO: 455

SEQ ID NO: 4729 - DNA, 380 bp, Homo sapiens; identical to SEQ ID NO: 457

SEQ ID NO: 4730 - DNA, 380 bp, Homo sapiens; identical to SEQ ID NO: 457

SEQ ID NO: 4731 - DNA, 600 bp, Homo sapiens; identical to SEQ ID NO: 459

SEQ ID NO: 4732 - DNA, 600 bp, Homo sapiens; identical to SEQ ID NO: 459

SEQ ID NO: 4733 - DNA, 453 bp, Homo sapiens; identical to SEQ ID NO: 461

SEQ ID NO: 4734 - DNA, 600 bp, Homo sapiens; identical to SEQ ID NO: 462

SEQ ID NO: 4735 - DNA, 600 bp, Homo sapiens; identical to SEQ ID NO: 463

SEQ ID NO: 4736 - DNA, 1400 bp, Homo sapiens; identical to SEQ ID NO: 464

SEQ ID NO: 4737 - DNA, 1400 bp, Homo sapiens; identical to SEQ ID NO: 464

SEQ ID NO: 4738 - DNA, 600 bp, Homo sapiens; identical to SEQ ID NO: 466

SEQ ID NO: 4739 - DNA, 600 bp, Homo sapiens; identical to SEQ ID NO: 466

SEQ ID NO: 4740 - DNA, 600 bp, Homo sapiens; identical to SEQ ID NO: 468

SEQ ID NO: 4741 - DNA, 600 bp, Homo sapiens; identical to SEQ ID NO: 468

SEQ ID NO: 4742 - DNA, 600 bp, Homo sapiens; identical to SEQ ID NO: 470

SEQ ID NO: 4743 - DNA, 600 bp, Homo sapiens; identical to SEQ ID NO: 470

SEQ ID NO: 4744 - DNA, 1400 bp, Homo sapiens; identical to SEQ ID NO: 472

SEQ ID NO: 4745 - DNA, 600 bp, Homo sapiens; identical to SEQ ID NO: 473

SEQ ID NO: 4746 - DNA, 1400 bp, Homo sapiens; identical to SEQ ID NO: 474

SEQ ID NO: 4747 - DNA, 1400 bp, Homo sapiens; identical to SEQ ID NO: 474

SEQ ID NO: 4748 - DNA, 600 bp, Homo sapiens; identical to SEQ ID NO: 476

SEQ ID NO: 4749 - DNA, 600 bp, Homo sapiens; identical to SEQ ID NO: 477

SEQ ID NO: 4750 - DNA, 600 bp, Homo sapiens; identical to SEQ ID NO: 478

SEQ ID NO: 4751 - DNA, 600 bp, Homo sapiens; identical to SEQ ID NO: 479

SEQ ID NO: 4752 - DNA, 600 bp, Homo sapiens; identical to SEQ ID NO: 479

SEQ ID NO: 4753 - DNA, 1400 bp, Homo sapiens; identical to SEQ ID NO: 481

SEQ ID NO: 4754 - DNA, 600 bp, Homo sapiens; identical to SEQ ID NO: 482

SEQ ID NO: 4755 - DNA, 600 bp, Homo sapiens; identical to SEQ ID NO: 483

SEQ ID NO: 4756 - DNA, 1400 bp, Homo sapiens; identical to SEQ ID NO: 484

SEQ ID NO: 4757 - DNA, 600 bp, Homo sapiens; identical to SEQ ID NO: 485

SEQ ID NO: 4758 - DNA, 1400 bp, Homo sapiens; identical to SEQ ID NO: 486

SEQ ID NO: 4759 - DNA, 600 bp, Homo sapiens; identical to SEQ ID NO: 487

SEQ ID NO: 4760 - DNA, 600 bp, Homo sapiens; identical to SEQ ID NO: 488

SEQ ID NO: 4761 - DNA, 600 bp, Homo sapiens; identical to SEQ ID NO: 489

SEQ ID NO: 4762 - DNA, 600 bp, Homo sapiens; identical to SEQ ID NO: 489

SEQ ID NO: 4763 - DNA, 576 bp, Homo sapiens; identical to SEQ ID NO: 491

SEQ ID NO: 4764 - DNA, 600 bp, Homo sapiens; identical to SEQ ID NO: 492

SEQ ID NO: 4765 - DNA, 600 bp, Homo sapiens; identical to SEQ ID NO: 493

SEQ ID NO: 4766 - DNA, 600 bp, Homo sapiens; identical to SEQ ID NO: 494

SEQ ID NO: 4767 - DNA, 600 bp, Homo sapiens; identical to SEQ ID NO: 495
  misc_feature (559)..(559): n is a, c, g, or t
  misc_feature (580)..(580): n is a, c, g, or t
  misc_feature (584)..(584): n is a, c, g, or t
  misc_feature (595)..(595): n is a, c, g, or t
  misc_feature (599)..(599): n is a, c, g, or t

SEQ ID NO: 4768 - DNA, 600 bp, Homo sapiens; identical to SEQ ID NO: 495
  misc_feature (559)..(559): n is a, c, g, or t
  misc_feature (580)..(580): n is a, c, g, or t
  misc_feature (584)..(584): n is a, c, g, or t
  misc_feature (595)..(595): n is a, c, g, or t
  misc_feature (599)..(599): n is a, c, g, or t

SEQ ID NO: 4769 - DNA, 1400 bp, Homo sapiens; identical to SEQ ID NO: 497
  misc_feature (1395)..(1396): n is a, c, g, or t

SEQ ID NO: 4770 - DNA, 1400 bp, Homo sapiens; identical to SEQ ID NO: 498

SEQ ID NO: 4771 - DNA, 600 bp, Homo sapiens; identical to SEQ ID NO: 499

SEQ ID NO: 4772 - DNA, 1400 bp, Homo sapiens; identical to SEQ ID NO: 500

SEQ ID NO: 4773 - DNA, 1400 bp, Homo sapiens; identical to SEQ ID NO: 500

SEQ ID NO: 4774 - DNA, 600 bp, Homo sapiens; identical to SEQ ID NO: 502

SEQ ID NO: 4775 - DNA, 600 bp, Homo sapiens; identical to SEQ ID NO: 503

SEQ ID NO: 4776 - DNA, 600 bp, Homo sapiens; identical to SEQ ID NO: 503

SEQ ID NO: 4777 - DNA, 600 bp, Homo sapiens; identical to SEQ ID NO: 505

SEQ ID NO: 4778 - DNA, 600 bp, Homo sapiens; identical to SEQ ID NO: 506

SEQ ID NO: 4779 - DNA, 1400 bp, Homo sapiens; identical to SEQ ID NO: 507

SEQ ID NO: 4780 - DNA, 600 bp, Homo sapiens; identical to SEQ ID NO: 508

SEQ ID NO: 4781 - DNA, 1400 bp, Homo sapiens; identical to SEQ ID NO: 509

SEQ ID NO: 4782 - DNA, 1400 bp, Homo sapiens; identical to SEQ ID NO: 510

SEQ ID NO: 4783 - DNA, 600 bp, Homo sapiens; identical to SEQ ID NO: 511

SEQ ID NO: 4784 - DNA, 600 bp, Homo sapiens; identical to SEQ ID NO: 511

SEQ ID NO: 4785 - DNA, 600 bp, Homo sapiens; identical to SEQ ID NO: 513

SEQ ID NO: 4786 - DNA, 600 bp, Homo sapiens; identical to SEQ ID NO: 513

SEQ ID NO: 4787 - DNA, 1400 bp, Homo sapiens; identical to SEQ ID NO: 515

SEQ ID NO: 4788 - DNA, 600 bp, Homo sapiens; identical to SEQ ID NO: 516

SEQ ID NO: 4789 - DNA, 600 bp, Homo sapiens; identical to SEQ ID NO: 517

SEQ ID NO: 4790 - DNA, 600 bp, Homo sapiens; identical to SEQ ID NO: 518

SEQ ID NO: 4791 - DNA, 600 bp, Homo sapiens; identical to SEQ ID NO: 518

SEQ ID NO: 4792 - DNA, 1400 bp, Homo sapiens; identical to SEQ ID NO: 520

SEQ ID NO: 4793 - DNA, 600 bp, Homo sapiens; identical to SEQ ID NO: 521

SEQ ID NO: 4794 - DNA, 600 bp, Homo sapiens; identical to SEQ ID NO: 521

SEQ ID NO: 4795 - DNA, 1400 bp, Homo sapiens; identical to SEQ ID NO: 523

SEQ ID NO: 4796 - DNA, 600 bp, Homo sapiens; identical to SEQ ID NO: 524

SEQ ID NO: 4797 - DNA, 600 bp, Homo sapiens; identical to SEQ ID NO: 525

SEQ ID NO: 4798 - DNA, 600 bp, Homo sapiens; identical to SEQ ID NO: 526

SEQ ID NO: 4799 - DNA, 600 bp, Homo sapiens; identical to SEQ ID NO: 526

SEQ ID NO: 4800 - DNA, 600 bp, Homo sapiens; identical to SEQ ID NO: 528

SEQ ID NO: 4801 - DNA, 600 bp, Homo sapiens; identical to SEQ ID NO: 529

SEQ ID NO: 4802 - DNA, 1400 bp, Homo sapiens; identical to SEQ ID NO: 530

SEQ ID NO: 4803 - DNA, 1400 bp, Homo sapiens; identical to SEQ ID NO: 531

SEQ ID NO: 4804 - DNA, 600 bp, Homo sapiens; identical to SEQ ID NO: 532

SEQ ID NO: 4805 - DNA, 600 bp, Homo sapiens; identical to SEQ ID NO: 532

SEQ ID NO: 4806 - DNA, 1400 bp, Homo sapiens; identical to SEQ ID NO: 534

SEQ ID NO: 4807 - DNA, 600 bp, Homo sapiens; identical to SEQ ID NO: 535

SEQ ID NO: 4808 - DNA, 600 bp, Homo sapiens; identical to SEQ ID NO: 536

SEQ ID NO: 4809 - DNA, 600 bp, Homo sapiens; identical to SEQ ID NO: 536

SEQ ID NO: 4810 - DNA, 600 bp, Homo sapiens; identical to SEQ ID NO: 538

SEQ ID NO: 4811 - DNA, 600 bp, Homo sapiens; identical to SEQ ID NO: 538

SEQ ID NO: 4812 - DNA, 1400 bp, Homo sapiens; identical to SEQ ID NO: 540

SEQ ID NO: 4813 - DNA, 1400 bp, Homo sapiens; identical to SEQ ID NO: 540

SEQ ID NO: 4814 - DNA, 600 bp, Homo sapiens; identical to SEQ ID NO: 542

SEQ ID NO: 4815 - DNA, 1400 bp, Homo sapiens; identical to SEQ ID NO: 543

SEQ ID NO: 4816 - DNA, 1400 bp, Homo sapiens; identical to SEQ ID NO: 544

SEQ ID NO: 4817 - DNA, 600 bp, Homo sapiens; identical to SEQ ID NO: 545

SEQ ID NO: 4818 - DNA, 600 bp, Homo sapiens; identical to SEQ ID NO: 546

SEQ ID NO: 4819 - DNA, 1400 bp, Homo sapiens; identical to SEQ ID NO: 547
  misc_feature (1397)..(1397): n is a, c, g, or t

SEQ ID NO: 4820 - DNA, 1400 bp, Homo sapiens; identical to SEQ ID NO: 547
  misc_feature (1397)..(1397): n is a, c, g, or t

SEQ ID NO: 4821 - DNA, 1400 bp, Homo sapiens; identical to SEQ ID NO: 549

SEQ ID NO: 4822 - DNA, 600 bp, Homo sapiens; identical to SEQ ID NO: 550

SEQ ID NO: 4823 - DNA, 600 bp, Homo sapiens; identical to SEQ ID NO: 550

SEQ ID NO: 4824 - DNA, 1400 bp, Homo sapiens; identical to SEQ ID NO: 552

SEQ ID NO: 4825 - DNA, 600 bp, Homo sapiens; identical to SEQ ID NO: 553

SEQ ID NO: 4826 - DNA, 600 bp, Homo sapiens; identical to SEQ ID NO: 554

SEQ ID NO: 4827 - DNA, 600 bp, Homo sapiens; identical to SEQ ID NO: 554

SEQ ID NO: 4828 - DNA, 1400 bp, Homo sapiens; identical to SEQ ID NO: 556

SEQ ID NO: 4829 - DNA, 1400 bp, Homo sapiens; identical to SEQ ID NO: 557

SEQ ID NO: 4830 - DNA, 600 bp, Homo sapiens; identical to SEQ ID NO: 558

SEQ ID NO: 4831 - DNA, 600 bp, Homo sapiens; identical to SEQ ID NO: 558

SEQ ID NO: 4832 - DNA, 1400 bp, Homo sapiens; identical to SEQ ID NO: 560

SEQ ID NO: 4833 - DNA, 1400 bp, Homo sapiens; identical to SEQ ID NO: 561

SEQ ID NO: 4834 - DNA, 1400 bp, Homo sapiens; identical to SEQ ID NO: 561

SEQ ID NO: 4835 - DNA, 600 bp, Homo sapiens; identical to SEQ ID NO: 563

SEQ ID NO: 4836 - DNA, 600 bp, Homo sapiens; identical to SEQ ID NO: 563

SEQ ID NO: 4837 - DNA, 1400 bp, Homo sapiens; identical to SEQ ID NO: 565

SEQ ID NO: 4838 - DNA, 1400 bp, Homo sapiens; identical to SEQ ID NO: 565

SEQ ID NO: 4839 - DNA, 1400 bp, Homo sapiens; identical to SEQ ID NO: 567

SEQ ID NO: 4840 - DNA, 1400 bp, Homo sapiens; identical to SEQ ID NO: 568

SEQ ID NO: 4841 - DNA, 1400 bp, Homo sapiens; identical to SEQ ID NO: 568

SEQ ID NO: 4842 - DNA, 1400 bp, Homo sapiens; identical to SEQ ID NO: 570

SEQ ID NO: 4843 - DNA, 1400 bp, Homo sapiens; identical to SEQ ID NO: 571

SEQ ID NO: 4844 - DNA, 600 bp, Homo sapiens; identical to SEQ ID NO: 572

SEQ ID NO: 4845 - DNA, 1400 bp, Homo sapiens; identical to SEQ ID NO: 573

SEQ ID NO: 4846 - DNA, 1400 bp, Homo sapiens; identical to SEQ ID NO: 574

SEQ ID NO: 4847 - DNA, 1400 bp, Homo sapiens; identical to SEQ ID NO: 575

SEQ ID NO: 4848 - DNA, 600 bp, Homo sapiens; identical to SEQ ID NO: 576

SEQ ID NO: 4849 - DNA, 600 bp, Homo sapiens; identical to SEQ ID NO: 576

SEQ ID NO: 4850 - DNA, 1400 bp, Homo sapiens; identical to SEQ ID NO: 578

SEQ ID NO: 4851 - DNA, 1400 bp, Homo sapiens; identical to SEQ ID NO: 579

SEQ ID NO: 4852 - DNA, 1400 bp, Homo sapiens; identical to SEQ ID NO: 579

SEQ ID NO: 4853 - DNA, 1400 bp, Homo sapiens; identical to SEQ ID NO: 581

SEQ ID NO: 4854 - DNA, 600 bp, Homo sapiens; identical to SEQ ID NO: 582

SEQ ID NO: 4855 - DNA, 600 bp, Homo sapiens; identical to SEQ ID NO: 582

SEQ ID NO: 4856 - DNA, 1400 bp, Homo sapiens; identical to SEQ ID NO: 584

SEQ ID NO: 4857 - DNA, 1400 bp, Homo sapiens; identical to SEQ ID NO: 585

SEQ ID NO: 4858 - DNA, 1400 bp, Homo sapiens; identical to SEQ ID NO: 586

SEQ ID NO: 4859 - DNA, 1400 bp, Homo sapiens; identical to SEQ ID NO: 586

SEQ ID NO: 4860 - DNA, 600 bp, Homo sapiens; identical to SEQ ID NO: 588

SEQ ID NO: 4861 - DNA, 1400 bp, Homo sapiens; identical to SEQ ID NO: 589

SEQ ID NO: 4862 - DNA, 600 bp, Homo sapiens; identical to SEQ ID NO: 590

SEQ ID NO: 4863 - DNA, 600 bp, Homo sapiens; identical to SEQ ID NO: 590

SEQ ID NO: 4864 - DNA, 1400 bp, Homo sapiens; identical to SEQ ID NO: 592

SEQ ID NO: 4865 - DNA, 1400 bp, Homo sapiens; identical to SEQ ID NO: 593

SEQ ID NO: 4866 - DNA, 1400 bp, Homo sapiens; identical to SEQ ID NO: 593

SEQ ID NO: 4867 - DNA, 415 bp, Homo sapiens; identical to SEQ ID NO: 595

SEQ ID NO: 4868 - DNA, 415 bp, Homo sapiens; identical to SEQ ID NO: 595

SEQ ID NO: 4869 - DNA, 1400 bp, Homo sapiens; identical to SEQ ID NO: 597

SEQ ID NO: 4870 - DNA, 600 bp, Homo sapiens; identical to SEQ ID NO: 598

SEQ ID NO: 4871 - DNA, 600 bp, Homo sapiens; identical to SEQ ID NO: 598

SEQ ID NO: 4872 - DNA, 600 bp, Homo sapiens; identical to SEQ ID NO: 600

SEQ ID NO: 4873 - DNA, 600 bp, Homo sapiens; identical to SEQ ID NO: 601

SEQ ID NO: 4874 - DNA, 600 bp, Homo sapiens; identical to SEQ ID NO: 601

SEQ ID NO: 4875 - DNA, 600 bp, Homo sapiens; identical to SEQ ID NO: 603

SEQ ID NO: 4876 - DNA, 600 bp, Homo sapiens; identical to SEQ ID NO: 604

SEQ ID NO: 4877 - DNA, 600 bp, Homo sapiens; identical to SEQ ID NO: 604

SEQ ID NO: 4878 - DNA, 600 bp, Homo sapiens; identical to SEQ ID NO: 606

SEQ ID NO: 4879 - DNA, 600 bp, Homo sapiens; identical to SEQ ID NO: 606

SEQ ID NO: 4880 - DNA, 1400 bp, Homo sapiens; identical to SEQ ID NO: 608

SEQ ID NO: 4881 - DNA, 1400 bp, Homo sapiens; identical to SEQ ID NO: 608

SEQ ID NO: 4882 - DNA, 1400 bp, Homo sapiens; identical to SEQ ID NO: 610

SEQ ID NO: 4883 - DNA, 600 bp, Homo sapiens; identical to SEQ ID NO: 611

SEQ ID NO: 4884 - DNA, 600 bp, Homo sapiens; identical to SEQ ID NO: 611

SEQ ID NO: 4885 - DNA, 600 bp, Homo sapiens; identical to SEQ ID NO: 613

SEQ ID NO: 4886 - DNA, 600 bp, Homo sapiens; identical to SEQ ID NO: 614

SEQ ID NO: 4887 - DNA, 600 bp, Homo sapiens; identical to SEQ ID NO: 615
  misc_feature (200)..(200): n is a, c, g, or t

SEQ ID NO: 4888 - DNA, 600 bp, Homo sapiens; identical to SEQ ID NO: 615
  misc_feature (200)..(200): n is a, c, g, or t

SEQ ID NO: 4889 - DNA, 600 bp, Homo sapiens; identical to SEQ ID NO: 617

SEQ ID NO: 4890 - DNA, 600 bp, Homo sapiens; identical to SEQ ID NO: 617

SEQ ID NO: 4891 - DNA, 600 bp, Homo sapiens; identical to SEQ ID NO: 619

SEQ ID NO: 4892 - DNA, 1400 bp, Homo sapiens; identical to SEQ ID NO: 620

SEQ ID NO: 4893 - DNA, 1400 bp, Homo sapiens; identical to SEQ ID NO: 620

SEQ ID NO: 4894 - DNA, 600 bp, Homo sapiens; identical to SEQ ID NO: 622

SEQ ID NO: 4895 - DNA, 600 bp, Homo sapiens; identical to SEQ ID NO: 623

SEQ ID NO: 4896 - DNA, 600 bp, Homo sapiens; identical to SEQ ID NO: 623

SEQ ID NO: 4897 - DNA, 1400 bp, Homo sapiens; identical to SEQ ID NO: 625

SEQ ID NO: 4898 - DNA, 1400 bp, Homo sapiens; identical to SEQ ID NO: 625

SEQ ID NO: 4899 - DNA, 600 bp, Homo sapiens; identical to SEQ ID NO: 627

SEQ ID NO: 4900 - DNA, 600 bp, Homo sapiens; identical to SEQ ID NO: 627

SEQ ID NO: 4901 - DNA, 600 bp, Homo sapiens; identical to SEQ ID NO: 629

SEQ ID NO: 4902 - DNA, 600 bp, Homo sapiens; identical to SEQ ID NO: 629

SEQ ID NO: 4903 - DNA, 600 bp, Homo sapiens; identical to SEQ ID NO: 631

SEQ ID NO: 4904 - DNA, 600 bp, Homo sapiens; identical to SEQ ID NO: 631

SEQ ID NO: 4905 - DNA, 600 bp, Homo sapiens; identical to SEQ ID NO: 633

SEQ ID NO: 4906 - DNA, 600 bp, Homo sapiens; identical to SEQ ID NO: 633

SEQ ID NO: 4907 - DNA, 600 bp, Homo sapiens; identical to SEQ ID NO: 635

SEQ ID NO: 4908 - DNA, 600 bp, Homo sapiens; identical to SEQ ID NO: 635

SEQ ID NO: 4909 - DNA, 600 bp, Homo sapiens; identical to SEQ ID NO: 637

SEQ ID NO: 4910 - DNA, 600 bp, Homo sapiens; identical to SEQ ID NO: 638

SEQ ID NO: 4911 - DNA, 600 bp, Homo sapiens; identical to SEQ ID NO: 639

SEQ ID NO: 4912 - DNA, 1400 bp, Homo sapiens; identical to SEQ ID NO: 640

SEQ ID NO: 4913 - DNA, 754 bp, Homo sapiens; identical to SEQ ID NO: 641
  misc_feature (7)..(7): n is a, c, g, or t
  misc_feature (665)..(665): n is a, c, g, or t
  misc_feature (683)..(683): n is a, c, g, or t
  misc_feature (726)..(726): n is a, c, g, or t

SEQ ID NO: 4914 - DNA, 754 bp, Homo sapiens; identical to SEQ ID NO: 641
  misc_feature (7)..(7): n is a, c, g, or t
  misc_feature (665)..(665): n is a, c, g, or t
  misc_feature (683)..(683): n is a, c, g, or t
  misc_feature (726)..(726): n is a, c, g, or t

SEQ ID NO: 4915 - DNA, 1400 bp, Homo sapiens; identical to SEQ ID NO: 643

SEQ ID NO: 4916 - DNA, 600 bp, Homo sapiens; identical to SEQ ID NO: 644

SEQ ID NO: 4917 - DNA, 1400 bp, Homo sapiens; identical to SEQ ID NO: 645

SEQ ID NO: 4918 - DNA, 1400 bp, Homo sapiens; identical to SEQ ID NO: 645

SEQ ID NO: 4919 - DNA, 1400 bp, Homo sapiens; identical to SEQ ID NO: 647

SEQ ID NO: 4920 - DNA, 1400 bp, Homo sapiens; identical to SEQ ID NO: 647

SEQ ID NO: 4921 - DNA, 600 bp, Homo sapiens; identical to SEQ ID NO: 649

SEQ ID NO: 4922 - DNA, 600 bp, Homo sapiens; identical to SEQ ID NO: 649

SEQ ID NO: 4923 - DNA, 600 bp, Homo sapiens; identical to SEQ ID NO: 651

SEQ ID NO: 4924 - DNA, 600 bp, Homo sapiens; identical to SEQ ID NO: 651

SEQ ID NO: 4925 - DNA, 600 bp, Homo sapiens; identical to SEQ ID NO: 653
  misc_feature (558)..(558): n is a, c, g, or t

SEQ ID NO: 4926 - DNA, 600 bp, Homo sapiens; identical to SEQ ID NO: 653
  misc_feature (558)..(558): n is a, c, g, or t

SEQ ID NO: 4927 - DNA, 1400 bp, Homo sapiens; identical to SEQ ID NO: 655

SEQ ID NO: 4928 - DNA, 600 bp, Homo sapiens; identical to SEQ ID NO: 656

SEQ ID NO: 4929 - DNA, 1400 bp, Homo sapiens; identical to SEQ ID NO: 657

SEQ ID NO: 4930 - DNA, 1400 bp, Homo sapiens; identical to SEQ ID NO: 657

SEQ ID NO: 4931 - DNA, 1400 bp, Homo sapiens; identical to SEQ ID NO: 659

SEQ ID NO: 4932 - DNA, 1264 bp, Homo sapiens; identical to SEQ ID NO: 660

SEQ ID NO: 4933 - DNA, 1264 bp, Homo sapiens; identical to SEQ ID NO: 660

SEQ ID NO: 4934 - DNA, 600 bp, Homo sapiens; identical to SEQ ID NO: 662

SEQ ID NO: 4935 - DNA, 600 bp, Homo sapiens; identical to SEQ ID NO: 662

SEQ ID NO: 4936 - DNA, 1400 bp, Homo sapiens; identical to SEQ ID NO: 664

SEQ ID NO: 4937 - DNA, 1400 bp, Homo sapiens; identical to SEQ ID NO: 664

SEQ ID NO: 4938 - DNA, 1400 bp, Homo sapiens; identical to SEQ ID NO: 666

SEQ ID NO: 4939 - DNA, 600 bp, Homo sapiens; identical to SEQ ID NO: 667

SEQ ID NO: 4940 - DNA, 600 bp, Homo sapiens; identical to SEQ ID NO: 667

SEQ ID NO: 4941 - DNA, 600 bp, Homo sapiens; identical to SEQ ID NO: 669

SEQ ID NO: 4942 - DNA, 600 bp, Homo sapiens; identical to SEQ ID NO: 669

SEQ ID NO: 4943 - DNA, 1400 bp, Homo sapiens; identical to SEQ ID NO: 671

SEQ ID NO: 4944 - DNA, 600 bp, Homo sapiens; identical to SEQ ID NO: 672

SEQ ID NO: 4945 - DNA, 600 bp, Homo sapiens; identical to SEQ ID NO: 673

SEQ ID NO: 4946 - DNA, 600 bp, Homo sapiens; identical to SEQ ID NO: 674

SEQ ID NO: 4947 - DNA, 600 bp, Homo sapiens; identical to SEQ ID NO: 674

SEQ ID NO: 4948 - DNA, 600 bp, Homo sapiens; identical to SEQ ID NO: 676

SEQ ID NO: 4949 - DNA, 600 bp, Homo sapiens; identical to SEQ ID NO: 676

SEQ ID NO: 4950 - DNA, 1400 bp, Homo sapiens; identical to SEQ ID NO: 678

SEQ ID NO: 4951 - DNA, 1400 bp, Homo sapiens; identical to SEQ ID NO: 679

SEQ ID NO: 4952 - DNA, 1400 bp, Homo sapiens; identical to SEQ ID NO: 680

SEQ ID NO: 4953 - DNA, 1400 bp, Homo sapiens; identical to SEQ ID NO: 680

SEQ ID NO: 4954 - DNA, 1400 bp, Homo sapiens; identical to SEQ ID NO: 682

SEQ ID NO: 4955 - DNA, 1400 bp, Homo sapiens; identical to SEQ ID NO: 683

SEQ ID NO: 4956 - DNA, 600 bp, Homo sapiens; identical to SEQ ID NO: 684

SEQ ID NO: 4957 - DNA, 600 bp, Homo sapiens; identical to SEQ ID NO: 684

SEQ ID NO: 4958 - DNA, 1400 bp, Homo sapiens; identical to SEQ ID NO: 686

SEQ ID NO: 4959 - DNA, 1400 bp, Homo sapiens; identical to SEQ ID NO: 687
  misc_feature (1398)..(1398): n is a, c, g, or t

SEQ ID NO: 4960 - DNA, 1400 bp, Homo sapiens; identical to SEQ ID NO: 688

SEQ ID NO: 4961 - DNA, 1400 bp, Homo sapiens; identical to SEQ ID NO: 689

SEQ ID NO: 4962 - DNA, 600 bp, Homo sapiens; identical to SEQ ID NO: 690

SEQ ID NO: 4963 - DNA, 600 bp, Homo sapiens; identical to SEQ ID NO: 690

SEQ ID NO: 4964 - DNA, 1400 bp, Homo sapiens; identical to SEQ ID NO: 692

SEQ ID NO: 4965 - DNA, 1400 bp, Homo sapiens; identical to SEQ ID NO: 693

SEQ ID NO: 4966 - DNA, 600 bp, Homo sapiens; identical to SEQ ID NO: 694

SEQ ID NO: 4967 - DNA, 600 bp, Homo sapiens; identical to SEQ ID NO: 695

SEQ ID NO: 4968 - DNA, 600 bp, Homo sapiens; identical to SEQ ID NO: 696

SEQ ID NO: 4969 - DNA, 600 bp, Homo sapiens; identical to SEQ ID NO: 696

SEQ ID NO: 4970 - DNA, 600 bp, Homo sapiens; identical to SEQ ID NO: 698

SEQ ID NO: 4971 - DNA, 1400 bp, Homo sapiens; identical to SEQ ID NO: 699

SEQ ID NO: 4972 - DNA, 1400 bp, Homo sapiens; identical to SEQ ID NO: 699

SEQ ID NO: 4973 - DNA, 1400 bp, Homo sapiens; identical to SEQ ID NO: 701

SEQ ID NO: 4974 - DNA, 600 bp, Homo sapiens; identical to SEQ ID NO: 702

SEQ ID NO: 4975 - DNA, 600 bp, Homo sapiens; identical to SEQ ID NO: 703

SEQ ID NO: 4976 - DNA, 600 bp, Homo sapiens; identical to SEQ ID NO: 703

SEQ ID NO: 4977 - DNA, 1400 bp, Homo sapiens; identical to SEQ ID NO: 705

SEQ ID NO: 4978 - DNA, 1400 bp, Homo sapiens; identical to SEQ ID NO: 706

SEQ ID NO: 4979 - DNA, 1400 bp, Homo sapiens; identical to SEQ ID NO: 707

SEQ ID NO: 4980 - DNA, 1400 bp, Homo sapiens; identical to SEQ ID NO: 708

SEQ ID NO: 4981 - DNA, 1400 bp, Homo sapiens; identical to SEQ ID NO: 709

SEQ ID NO: 4982 - DNA, 1400 bp, Homo sapiens; identical to SEQ ID NO: 710

SEQ ID NO: 4983 - DNA, 1400 bp, Homo sapiens; identical to SEQ ID NO: 711

SEQ ID NO: 4984 - DNA, 1400 bp, Homo sapiens; identical to SEQ ID NO: 712

SEQ ID NO: 4985 - DNA, 1400 bp, Homo sapiens; identical to SEQ ID NO: 713

SEQ ID NO: 4986 - DNA, 1400 bp, Homo sapiens; identical to SEQ ID NO: 714

SEQ ID NO: 4987 - DNA, 600 bp, Homo sapiens; identical to SEQ ID NO: 715

SEQ ID NO: 4988 - DNA, 600 bp, Homo sapiens; identical to SEQ ID NO: 715

SEQ ID NO: 4989 - DNA, 600 bp, Homo sapiens; identical to SEQ ID NO: 717

SEQ ID NO: 4990 - DNA, 600 bp, Homo sapiens; identical to SEQ ID NO: 717

SEQ ID NO: 4991 - DNA, 1400 bp, Homo sapiens; identical to SEQ ID NO: 719

SEQ ID NO: 4992 - DNA, 1400 bp, Homo sapiens; identical to SEQ ID NO: 720

SEQ ID NO: 4993 - DNA, 1400 bp, Homo sapiens; identical to SEQ ID NO: 721

SEQ ID NO: 4994 - DNA, 1400 bp, Homo sapiens; identical to SEQ ID NO: 721

SEQ ID NO: 4995 - DNA, 600 bp, Homo sapiens; identical to SEQ ID NO: 723

SEQ ID NO: 4996 - DNA, 600 bp, Homo sapiens; identical to SEQ ID NO: 723

SEQ ID NO: 4997 - DNA, 1400 bp, Homo sapiens; identical to SEQ ID NO: 725

SEQ ID NO: 4998 - DNA, 1400 bp, Homo sapiens; identical to SEQ ID NO: 726

SEQ ID NO: 4999 - DNA, 600 bp, Homo sapiens; identical to SEQ ID NO: 727

SEQ ID NO: 5000 - DNA, 600 bp, Homo sapiens; identical to SEQ ID NO: 727

SEQ ID NO: 5001 - DNA, 1400 bp, Homo sapiens; identical to SEQ ID NO: 729

SEQ ID NO: 5002 - DNA, 1400 bp, Homo sapiens; identical to SEQ ID NO: 729

SEQ ID NO: 5003 - DNA, 600 bp, Homo sapiens; identical to SEQ ID NO: 731

SEQ ID NO: 5004 - DNA, 600 bp, Homo sapiens; identical to SEQ ID NO: 732

SEQ ID NO: 5005 - DNA, 600 bp, Homo sapiens; identical to SEQ ID NO: 732

SEQ ID NO: 5006 - DNA, 600 bp, Homo sapiens; identical to SEQ ID NO: 734

SEQ ID NO: 5007 - DNA, 600 bp, Homo sapiens; identical to SEQ ID NO: 734

SEQ ID NO: 5008 - DNA, 600 bp, Homo sapiens; identical to SEQ ID NO: 736

SEQ ID NO: 5009 - DNA, 600 bp, Homo sapiens; identical to SEQ ID NO: 737

SEQ ID NO: 5010 - DNA, 1400 bp, Homo sapiens; identical to SEQ ID NO: 738

SEQ ID NO: 5011 - DNA, 1400 bp, Homo sapiens; identical to SEQ ID NO: 739

SEQ ID NO: 5012 - DNA, 600 bp, Homo sapiens; identical to SEQ ID NO: 740

SEQ ID NO: 5013 - DNA, 600 bp, Homo sapiens; identical to SEQ ID NO: 740

SEQ ID NO: 5014 - DNA, 1400 bp, Homo sapiens; identical to SEQ ID NO: 742

SEQ ID NO: 5015 - DNA, 600 bp, Homo sapiens; identical to SEQ ID NO: 743

SEQ ID NO: 5016 - DNA, 1400 bp, Homo sapiens; identical to SEQ ID NO: 744

SEQ ID NO: 5017 - DNA, 1400 bp, Homo sapiens; identical to SEQ ID NO: 744

SEQ ID NO: 5018 - DNA, 1400 bp, Homo sapiens; identical to SEQ ID NO: 746
  misc_feature (1008)..(1008): n is a, c, g, or t

SEQ ID NO: 5019 - DNA, 1400 bp, Homo sapiens; identical to SEQ ID NO: 747

SEQ ID NO: 5020 - DNA, 1400 bp, Homo sapiens; identical to SEQ ID NO: 748

SEQ ID NO: 5021 - DNA, 1400 bp, Homo sapiens; identical to SEQ ID NO: 748

SEQ ID NO: 5022 - DNA, 1400 bp, Homo sapiens; identical to SEQ ID NO: 750

SEQ ID NO: 5023 - DNA, 600 bp, Homo sapiens; identical to SEQ ID NO: 751

SEQ ID NO: 5024 - DNA, 600 bp, Homo sapiens; identical to SEQ ID NO: 751

SEQ ID NO: 5025 - DNA, 1400 bp, Homo sapiens; identical to SEQ ID NO: 753

SEQ ID NO: 5026 - DNA, 1400 bp, Homo sapiens; identical to SEQ ID NO: 754

SEQ ID NO: 5027 - DNA, 1400 bp, Homo sapiens; identical to SEQ ID NO: 754

SEQ ID NO: 5028 - DNA, 1400 bp, Homo sapiens; identical to SEQ ID NO: 756

SEQ ID NO: 5029 - DNA, 600 bp, Homo sapiens; identical to SEQ ID NO: 757

SEQ ID NO: 5030 - DNA, 600 bp, Homo sapiens; identical to SEQ ID NO: 757

SEQ ID NO: 5031 - DNA, 1400 bp, Homo sapiens; identical to SEQ ID NO: 759

SEQ ID NO: 5032 - DNA, 1400 bp, Homo sapiens; identical to SEQ ID NO: 759

SEQ ID NO: 5033 - DNA, 600 bp, Homo sapiens; identical to SEQ ID NO: 761

SEQ ID NO: 5034 - DNA, 1400 bp, Homo sapiens; identical to SEQ ID NO: 762

SEQ ID NO: 5035 - DNA, 1400 bp, Homo sapiens; identical to SEQ ID NO: 762

SEQ ID NO: 5036 - DNA, 1400 bp, Homo sapiens; identical to SEQ ID NO: 764
  misc_feature (1394)..(1394): n is a, c, g, or t

SEQ ID NO: 5037 - DNA, 600 bp, Homo sapiens; identical to SEQ ID NO: 765

SEQ ID NO: 5038 - DNA, 600 bp, Homo sapiens; identical to SEQ ID NO: 765

SEQ ID NO: 5039 - DNA, 1400 bp, Homo sapiens; identical to SEQ ID NO: 767

SEQ ID NO: 5040 - DNA, 600 bp, Homo sapiens; identical to SEQ ID NO: 768

SEQ ID NO: 5041 - DNA, 600 bp, Homo sapiens; identical to SEQ ID NO: 769
  misc_feature (582)..(582): n is a, c, g, or t

SEQ ID NO: 5042 - DNA, 600 bp, Homo sapiens; identical to SEQ ID NO: 769
  misc_feature (582)..(582): n is a, c, g, or t

SEQ ID NO: 5043 - DNA, 1400 bp, Homo sapiens; identical to SEQ ID NO: 771

SEQ ID NO: 5044 - DNA, 1400 bp, Homo sapiens; identical to SEQ ID NO: 772

SEQ ID NO: 5045 - DNA, 600 bp, Homo sapiens; identical to SEQ ID NO: 773

SEQ ID NO: 5046 - DNA, 1400 bp, Homo sapiens; identical to SEQ ID NO: 774

SEQ ID NO: 5047 - DNA, 1400 bp, Homo sapiens; identical to SEQ ID NO: 775

SEQ ID NO: 5048 - DNA, 1400 bp, Homo sapiens; identical to SEQ ID NO: 776

SEQ ID NO: 5049 - DNA, 600 bp, Homo sapiens; identical to SEQ ID NO: 777

SEQ ID NO: 5050 - DNA, 1400 bp, Homo sapiens; identical to SEQ ID NO: 778

SEQ ID NO: 5051 - DNA, 1400 bp, Homo sapiens; identical to SEQ ID NO: 778

SEQ ID NO: 5052 - DNA, 1400 bp, Homo sapiens; identical to SEQ ID NO: 780

SEQ ID NO: 5053 - DNA, 1400 bp, Homo sapiens; identical to SEQ ID NO: 780

SEQ ID NO: 5054 - DNA, 600 bp, Homo sapiens; identical to SEQ ID NO: 782

SEQ ID NO: 5055 - DNA, 600 bp, Homo sapiens; identical to SEQ ID NO: 783

SEQ ID NO: 5056 - DNA, 600 bp, Homo sapiens; identical to SEQ ID NO: 784

SEQ ID NO: 5057 - DNA, 600 bp, Homo sapiens; identical to SEQ ID NO: 784

SEQ ID NO: 5058 - DNA, 600 bp, Homo sapiens; identical to SEQ ID NO: 786

SEQ ID NO: 5059 - DNA, 600 bp, Homo sapiens; identical to SEQ ID NO: 786

SEQ ID NO: 5060 - DNA, 600 bp, Homo sapiens; identical to SEQ ID NO: 788

SEQ ID NO: 5061 - DNA, 600 bp, Homo sapiens; identical to SEQ ID NO: 788

SEQ ID NO: 5062 - DNA, 1400 bp, Homo sapiens; identical to SEQ ID NO: 790
  misc_feature (1313)..(1313): n is a, c, g, or t
  misc_feature (1396)..(1396): n is a, c, g, or t
  misc_feature (1399)..(1399): n is a, c, g, or t

SEQ ID NO: 5063 - DNA, 1400 bp, Homo sapiens; identical to SEQ ID NO: 790
  misc_feature (1313)..(1313): n is a, c, g, or t
  misc_feature (1396)..(1396): n is a, c, g, or t
  misc_feature (1399)..(1399): n is a, c, g, or t

SEQ ID NO: 5064 - DNA, 600 bp, Homo sapiens; identical to SEQ ID NO: 792

SEQ ID NO: 5065 - DNA, 600 bp, Homo sapiens; identical to SEQ ID NO: 792

SEQ ID NO: 5066 - DNA, 600 bp, Homo sapiens; identical to SEQ ID NO: 794

SEQ ID NO: 5067 - DNA, 600 bp, Homo sapiens; identical to SEQ ID NO: 794

SEQ ID NO: 5068 - DNA, 1400 bp, Homo sapiens; identical to SEQ ID NO: 796

SEQ ID NO: 5069 - DNA, 600 bp, Homo sapiens; identical to SEQ ID NO: 797

SEQ ID NO: 5070 - DNA, 1400 bp, Homo sapiens; identical to SEQ ID NO: 798

SEQ ID NO: 5071 - DNA, 1400 bp, Homo sapiens; identical to SEQ ID NO: 798

SEQ ID NO: 5072 - DNA, 600 bp, Homo sapiens; identical to SEQ ID NO: 800

SEQ ID NO: 5073 - DNA, 600 bp, Homo sapiens; identical to SEQ ID NO: 800

SEQ ID NO: 5074 - DNA, 600 bp, Homo sapiens; identical to SEQ ID NO: 802

SEQ ID NO: 5075 - DNA, 600 bp, Homo sapiens; identical to SEQ ID NO: 803

SEQ ID NO: 5076 - DNA, 600 bp, Homo sapiens; identical to SEQ ID NO: 804

SEQ ID NO: 5077 - DNA, 1032 bp, Homo sapiens; identical to SEQ ID NO: 805

SEQ ID NO: 5078 - DNA, 1032 bp, Homo sapiens; identical to SEQ ID NO: 805

SEQ ID NO: 5079 - DNA, 600 bp, Homo sapiens; identical to SEQ ID NO: 807

SEQ ID NO: 5080 - DNA, 600 bp, Homo sapiens; identical to SEQ ID NO: 807

SEQ ID NO: 5081 - DNA, 1400 bp, Homo sapiens; identical to SEQ ID NO: 809

SEQ ID NO: 5082 - DNA, 600 bp, Homo sapiens; identical to SEQ ID NO: 810

SEQ ID NO: 5083 - DNA, 1400 bp, Homo sapiens; identical to SEQ ID NO: 811

SEQ ID NO: 5084 - DNA, 1400 bp, Homo sapiens; identical to SEQ ID NO: 812

SEQ ID NO: 5085 - DNA, 600 bp, Homo sapiens; identical to SEQ ID NO: 813

SEQ ID NO: 5086 - DNA, 600 bp, Homo sapiens; identical to SEQ ID NO: 814

SEQ ID NO: 5087 - DNA, 600 bp, Homo sapiens; identical to SEQ ID NO: 814

SEQ ID NO: 5088 - DNA, 1400 bp, Homo sapiens; identical to SEQ ID NO: 816

SEQ ID NO: 5089 - DNA, 1400 bp, Homo sapiens; identical to SEQ ID NO: 817

SEQ ID NO: 5090 - DNA, 600 bp, Homo sapiens; identical to SEQ ID NO: 818

SEQ ID NO: 5091 - DNA, 1400 bp, Homo sapiens; identical to SEQ ID NO: 819

SEQ ID NO: 5092 - DNA, 1400 bp, Homo sapiens; identical to SEQ ID NO: 820

SEQ ID NO: 5093 - DNA, 1400 bp, Homo sapiens; identical to SEQ ID NO: 821

SEQ ID NO: 5094 - DNA, 1400 bp, Homo sapiens; identical to SEQ ID NO: 822

SEQ ID NO: 5095 - DNA, 1400 bp, Homo sapiens; identical to SEQ ID NO: 823

SEQ ID NO: 5096 - DNA, 1400 bp, Homo sapiens; identical to SEQ ID NO: 823

SEQ ID NO: 5097 - DNA, 600 bp, Homo sapiens; identical to SEQ ID NO: 825

SEQ ID NO: 5098 - DNA, 1400 bp, Homo sapiens; identical to SEQ ID NO: 826

SEQ ID NO: 5099 - DNA, 600 bp, Homo sapiens; identical to SEQ ID NO: 827

SEQ ID NO: 5100 - DNA, 600 bp, Homo sapiens; identical to SEQ ID NO: 827

SEQ ID NO: 5101 - DNA, 1400 bp, Homo sapiens; identical to SEQ ID NO: 829

SEQ ID NO: 5102 - DNA, 1400 bp, Homo sapiens; identical to SEQ ID NO: 829

SEQ ID NO: 5103 - DNA, 1400 bp, Homo sapiens; identical to SEQ ID NO: 831

SEQ ID NO: 5104 - DNA, 600 bp, Homo sapiens; identical to SEQ ID NO: 832

SEQ ID NO: 5105 - DNA, 600 bp, Homo sapiens; identical to SEQ ID NO: 833

SEQ ID NO: 5106 - DNA, 1400 bp, Homo sapiens; identical to SEQ ID NO: 834

SEQ ID NO: 5107 - DNA, 1400 bp, Homo sapiens; identical to SEQ ID NO: 834

SEQ ID NO: 5108 - DNA, 1400 bp, Homo sapiens; identical to SEQ ID NO: 836

SEQ ID NO: 5109 - DNA, 600 bp, Homo sapiens; identical to SEQ ID NO: 837

SEQ ID NO: 5110 - DNA, 600 bp, Homo sapiens; identical to SEQ ID NO: 838

SEQ ID NO: 5111 - DNA, 600 bp, Homo sapiens; identical to SEQ ID NO: 838

SEQ ID NO: 5112 - DNA, 1400 bp, Homo sapiens; identical to SEQ ID NO: 840

SEQ ID NO: 5113 - DNA, 1400 bp, Homo sapiens; identical to SEQ ID NO: 840

SEQ ID NO: 5114 - DNA, 600 bp, Homo sapiens; identical to SEQ ID NO: 842

SEQ ID NO: 5115 - DNA, 1400 bp, Homo sapiens; identical to SEQ ID NO: 843

SEQ ID NO: 5116 - DNA, 1400 bp, Homo sapiens; identical to SEQ ID NO: 844

SEQ ID NO: 5117 - DNA, 1400 bp, Homo sapiens; identical to SEQ ID NO: 845

SEQ ID NO: 5118 - DNA, 1400 bp, Homo sapiens; identical to SEQ ID NO: 846

SEQ ID NO: 5119 - DNA, 1400 bp, Homo sapiens; identical to SEQ ID NO: 846

SEQ ID NO: 5120 - DNA, 1400 bp, Homo sapiens; identical to SEQ ID NO: 848

SEQ ID NO: 5121 - DNA, 1400 bp, Homo sapiens; identical to SEQ ID NO: 849

SEQ ID NO: 5122 - DNA, 1400 bp, Homo sapiens; identical to SEQ ID NO: 849

SEQ ID NO: 5123 - DNA, 600 bp, Homo sapiens; identical to SEQ ID NO: 851

SEQ ID NO: 5124 - DNA, 600 bp, Homo sapiens; identical to SEQ ID NO: 852

SEQ ID NO: 5125 - DNA, 600 bp, Homo sapiens; identical to SEQ ID NO: 853
  misc_feature (540)..(540): n is a, c, g, or t

SEQ ID NO: 5126 - DNA, 600 bp, Homo sapiens; identical to SEQ ID NO: 854

SEQ ID NO: 5127 - DNA, 600 bp, Homo sapiens; identical to SEQ ID NO: 855

SEQ ID NO: 5128 - DNA, 600 bp, Homo sapiens; identical to SEQ ID NO: 855

SEQ ID NO: 5129 - DNA, 600 bp, Homo sapiens; identical to SEQ ID NO: 857

SEQ ID NO: 5130 - DNA, 600 bp, Homo sapiens; identical to SEQ ID NO: 858

SEQ ID NO: 5131 - DNA, 600 bp, Homo sapiens; identical to SEQ ID NO: 858

SEQ ID NO: 5132 - DNA, 600 bp, Homo sapiens; identical to SEQ ID NO: 860

SEQ ID NO: 5133 - DNA, 1400 bp, Homo sapiens; identical to SEQ ID NO: 861

SEQ ID NO: 5134 - DNA, 1400 bp, Homo sapiens; identical to SEQ ID NO: 861

SEQ ID NO: 5135 - DNA, 1400 bp, Homo sapiens; identical to SEQ ID NO: 863

SEQ ID NO: 5136 - DNA, 1400 bp, Homo sapiens; identical to SEQ ID NO: 864

SEQ ID NO: 5137 - DNA, 1400 bp, Homo sapiens; identical to SEQ ID NO: 865

SEQ ID NO: 5138 - DNA, 1400 bp, Homo sapiens; identical to SEQ ID NO: 866

SEQ ID NO: 5139 - DNA, 1400 bp, Homo sapiens; identical to SEQ ID NO: 866

SEQ ID NO: 5140 - DNA, 600 bp, Homo sapiens; identical to SEQ ID NO: 868

SEQ ID NO: 5141 - DNA, 600 bp, Homo sapiens; identical to SEQ ID NO: 869

SEQ ID NO: 5142 - DNA, 600 bp, Homo sapiens; identical to SEQ ID NO: 869

SEQ ID NO: 5143 - DNA, 600 bp, Homo sapiens; identical to SEQ ID NO: 871

SEQ ID NO: 5144 - DNA, 1400 bp, Homo sapiens; identical to SEQ ID NO: 872

SEQ ID NO: 5145 - DNA, 600 bp, Homo sapiens; identical to SEQ ID NO: 873
  misc_feature (486)..(486): n is a, c, g, or t
  misc_feature (513)..(513): n is a, c, g, or t
  misc_feature (550)..(550): n is a, c, g, or t
  misc_feature (561)..(561): n is a, c, g, or t

SEQ ID NO: 5146 - DNA, 600 bp, Homo sapiens; identical to SEQ ID NO: 873
  misc_feature (486)..(486): n is a, c, g, or t
  misc_feature (513)..(513): n is a, c, g, or t
  misc_feature (550)..(550): n is a, c, g, or t
  misc_feature (561)..(561): n is a, c, g, or t

SEQ ID NO: 5147 - DNA, 1400 bp, Homo sapiens; identical to SEQ ID NO: 875

SEQ ID NO: 5148 - DNA, 600 bp, Homo sapiens; identical to SEQ ID NO: 876

SEQ ID NO: 5149 - DNA, 600 bp, Homo sapiens; identical to SEQ ID NO: 876

SEQ ID NO: 5150 - DNA, 1400 bp, Homo sapiens; identical to SEQ ID NO: 878

SEQ ID NO: 5151 - DNA, 600 bp, Homo sapiens; identical to SEQ ID NO: 879

SEQ ID NO: 5152 - DNA, 600 bp, Homo sapiens; identical to SEQ ID NO: 879

SEQ ID NO: 5153 - DNA, 1400 bp, Homo sapiens; identical to SEQ ID NO: 881

SEQ ID NO: 5154 - DNA, 600 bp, Homo sapiens; identical to SEQ ID NO: 882

SEQ ID NO: 5155 - DNA, 1400 bp, Homo sapiens; identical to SEQ ID NO: 883

SEQ ID NO: 5156 - DNA, 600 bp, Homo sapiens; identical to SEQ ID NO: 884

SEQ ID NO: 5157 - DNA, 600 bp, Homo sapiens; identical to SEQ ID NO: 885

SEQ ID NO: 5158 - DNA, 1400 bp, Homo sapiens; identical to SEQ ID NO: 886

SEQ ID NO: 5159 - DNA, 1400 bp, Homo sapiens; identical to SEQ ID NO: 887

SEQ ID NO: 5160 - DNA, 1400 bp, Homo sapiens; identical to SEQ ID NO: 887

SEQ ID NO: 5161 - DNA, 1400 bp, Homo sapiens; identical to SEQ ID NO: 889

SEQ ID NO: 5162 - DNA, 1400 bp, Homo sapiens; identical to SEQ ID NO: 889

SEQ ID NO: 5163 - DNA, 1400 bp, Homo sapiens; identical to SEQ ID NO: 891

SEQ ID NO: 5164 - DNA, 600 bp, Homo sapiens; identical to SEQ ID NO: 892

SEQ ID NO: 5165 - DNA, 600 bp, Homo sapiens; identical to SEQ ID NO: 893

SEQ ID NO: 5166 - DNA, 600 bp, Homo sapiens; identical to SEQ ID NO: 894

SEQ ID NO: 5167 - DNA, 600 bp, Homo sapiens; identical to SEQ ID NO: 895

SEQ ID NO: 5168 - DNA, 600 bp, Homo sapiens; identical to SEQ ID NO: 896

SEQ ID NO: 5169 - DNA, 1400 bp, Homo sapiens; identical to SEQ ID NO: 897

SEQ ID NO: 5170 - DNA, 928 bp, Homo sapiens; identical to SEQ ID NO: 898

SEQ ID NO: 5171 - DNA, 1400 bp, Homo sapiens; identical to SEQ ID NO: 899

SEQ ID NO: 5172 - DNA, 1400 bp, Homo sapiens; identical to SEQ ID NO: 900

SEQ ID NO: 5173 - DNA, 1400 bp, Homo sapiens; identical to SEQ ID NO: 900

SEQ ID NO: 5174 - DNA, 1400 bp, Homo sapiens; identical to SEQ ID NO: 902

SEQ ID NO: 5175 - DNA, 600 bp, Homo sapiens; identical to SEQ ID NO: 903

SEQ ID NO: 5176 - DNA, 600 bp, Homo sapiens; identical to SEQ ID NO: 903

SEQ ID NO: 5177 - DNA, 600 bp, Homo sapiens; identical to SEQ ID NO: 905

SEQ ID NO: 5178 - DNA, 600 bp, Homo sapiens; identical to SEQ ID NO: 905

SEQ ID NO: 5179 - DNA, 1400 bp, Homo sapiens; identical to SEQ ID NO: 907

SEQ ID NO: 5180 - DNA, 1400 bp, Homo sapiens; identical to SEQ ID NO: 908

SEQ ID NO: 5181 - DNA, 577 bp, Homo sapiens; identical to SEQ ID NO: 909

SEQ ID NO: 5182 - DNA, 1400 bp, Homo sapiens; identical to SEQ ID NO: 910

SEQ ID NO: 5183 - DNA, 1400 bp, Homo sapiens; identical to SEQ ID NO: 910

SEQ ID NO: 5184 - DNA, 1400 bp, Homo sapiens; identical to SEQ ID NO: 912

SEQ ID NO: 5185 - DNA, 1400 bp, Homo sapiens; identical to SEQ ID NO: 912

SEQ ID NO: 5186 - DNA, 1400 bp, Homo sapiens; identical to SEQ ID NO: 914

SEQ ID NO: 5187 - DNA, 600 bp, Homo sapiens; identical to SEQ ID NO: 915

SEQ ID NO: 5188 - DNA, 600 bp, Homo sapiens; identical to SEQ ID NO: 915

SEQ ID NO: 5189 - DNA, 600 bp, Homo sapiens; identical to SEQ ID NO: 917

SEQ ID NO: 5190 - DNA, 1400 bp, Homo sapiens; identical to SEQ ID NO: 918

SEQ ID NO: 5191 - DNA, 1400 bp, Homo sapiens; identical to SEQ ID NO: 919

SEQ ID NO: 5192 - DNA, 1400 bp, Homo sapiens; identical to SEQ ID NO: 920

SEQ ID NO: 5193 - DNA, 1400 bp, Homo sapiens; identical to SEQ ID NO: 921

SEQ ID NO: 5194 - DNA, 1400 bp, Homo sapiens; identical to SEQ ID NO: 921

SEQ ID NO: 5195 - DNA, 600 bp, Homo sapiens; identical to SEQ ID NO: 923
  misc_feature (397)..(397): n is a, c, g, or t
  misc_feature (538)..(538): n is a, c, g, or t
  misc_feature (561)..(561): n is a, c, g, or t

SEQ ID NO: 5196 - DNA, 600 bp, Homo sapiens; identical to SEQ ID NO: 923
  misc_feature (397)..(397): n is a, c, g, or t
  misc_feature (538)..(538): n is a, c, g, or t
  misc_feature (561)..(561): n is a, c, g, or t

SEQ ID NO: 5197 - DNA, 839 bp, Homo sapiens; identical to SEQ ID NO: 925

SEQ ID NO: 5198 - DNA, 839 bp, Homo sapiens; identical to SEQ ID NO: 925

SEQ ID NO: 5199 - DNA, 600 bp, Homo sapiens; identical to SEQ ID NO: 927

SEQ ID NO: 5200 - DNA, 600 bp, Homo sapiens; identical to SEQ ID NO: 928

SEQ ID NO: 5201 - DNA, 600 bp, Homo sapiens; identical to SEQ ID NO: 929

SEQ ID NO: 5202 - DNA, 600 bp, Homo sapiens; identical to SEQ ID NO: 930

SEQ ID NO: 5203 - DNA, 1400 bp, Homo sapiens; identical to SEQ ID NO: 931

SEQ ID NO: 5204 - DNA, 1400 bp, Homo sapiens; identical to SEQ ID NO: 932

SEQ ID NO: 5205 - DNA, 1400 bp, Homo sapiens; identical to SEQ ID NO: 932

SEQ ID NO: 5206 - DNA, 600 bp, Homo sapiens; identical to SEQ ID NO: 934

SEQ ID NO: 5207 - DNA, 600 bp, Homo sapiens; identical to SEQ ID NO: 935
  misc_feature (531)..(531): n is a, c, g, or t
  misc_feature (596)..(596): n is a, c, g, or t

SEQ ID NO: 5208 - DNA, 600 bp, Homo sapiens; identical to SEQ ID NO: 935
  misc_feature (531)..(531): n is a, c, g, or t
  misc_feature (596)..(596): n is a, c, g, or t

SEQ ID NO: 5209 - DNA, 1400 bp, Homo sapiens; identical to SEQ ID NO: 937

SEQ ID NO: 5210 - DNA, 1374 bp, Homo sapiens; identical to SEQ ID NO: 938

SEQ ID NO: 5211 - DNA, 1400 bp, Homo sapiens; identical to SEQ ID NO: 939

SEQ ID NO: 5212 - DNA, 1400 bp, Homo sapiens; identical to SEQ ID NO: 939

SEQ ID NO: 5213 - DNA, 600 bp, Homo sapiens; identical to SEQ ID NO: 941

SEQ ID NO: 5214 - DNA, 600 bp, Homo sapiens; identical to SEQ ID NO: 941

SEQ ID NO: 5215 - DNA, 1400 bp, Homo sapiens; identical to SEQ ID NO: 943

SEQ ID NO: 5216 - DNA, 1400 bp, Homo sapiens; identical to SEQ ID NO: 944

SEQ ID NO: 5217 - DNA, 1400 bp, Homo sapiens; identical to SEQ ID NO: 944

SEQ ID NO: 5218 - DNA, 1400 bp, Homo sapiens; identical to SEQ ID NO: 946

SEQ ID NO: 5219 - DNA, 600 bp, Homo sapiens; identical to SEQ ID NO: 947

SEQ ID NO: 5220 - DNA, 1400 bp, Homo sapiens; identical to SEQ ID NO: 948

SEQ ID NO: 5221 - DNA, 600 bp, Homo sapiens; identical to SEQ ID NO: 949
  misc_feature (417)..(417): n is a, c, g, or t
  misc_feature (421)..(421): n is a, c, g, or t

SEQ ID NO: 5222 - DNA, 600 bp, Homo sapiens; identical to SEQ ID NO: 949
  misc_feature (417)..(417): n is a, c, g, or t
  misc_feature (421)..(421): n is a, c, g, or t

SEQ ID NO: 5223 - DNA, 600 bp, Homo sapiens; identical to SEQ ID NO: 951

SEQ ID NO: 5224 - DNA, 600 bp, Homo sapiens; identical to SEQ ID NO: 951

SEQ ID NO: 5225 - DNA, 600 bp, Homo sapiens; identical to SEQ ID NO: 953

SEQ ID NO: 5226 - DNA, 1400 bp, Homo sapiens; identical to SEQ ID NO: 954

SEQ ID NO: 5227 - DNA, 1400 bp, Homo sapiens; identical to SEQ ID NO: 955

SEQ ID NO: 5228 - DNA, 600 bp, Homo sapiens; identical to SEQ ID NO: 956

SEQ ID NO: 5229 - DNA, 600 bp, Homo sapiens; identical to SEQ ID NO: 957

SEQ ID NO: 5230 - DNA, 600 bp, Homo sapiens; identical to SEQ ID NO: 957

SEQ ID NO: 5231 - DNA, 600 bp, Homo sapiens; identical to SEQ ID NO: 959

SEQ ID NO: 5232 - DNA, 1400 bp, Homo sapiens; identical to SEQ ID NO: 960

SEQ ID NO: 5233 - DNA, 1400 bp, Homo sapiens; identical to SEQ ID NO: 960

SEQ ID NO: 5234 - DNA, 600 bp, Homo sapiens; identical to SEQ ID NO: 962

SEQ ID NO: 5235 - DNA, 600 bp, Homo sapiens; identical to SEQ ID NO: 962

SEQ ID NO: 5236 - DNA, 1400 bp, Homo sapiens; identical to SEQ ID NO: 964

SEQ ID NO: 5237 - DNA, 600 bp, Homo sapiens; identical to SEQ ID NO: 965

SEQ ID NO: 5238 - DNA, 600 bp, Homo sapiens; identical to SEQ ID NO: 965

SEQ ID NO: 5239 - DNA, 1400 bp, Homo sapiens; identical to SEQ ID NO: 967

SEQ ID NO: 5240 - DNA, 1400 bp, Homo sapiens; identical to SEQ ID NO: 968
  misc_feature (1347)..(1347): n is a, c, g, or t

SEQ ID NO: 5241 - DNA, 600 bp, Homo sapiens; identical to SEQ ID NO: 969

SEQ ID NO: 5242 - DNA, 600 bp, Homo sapiens; identical to SEQ ID NO: 969

SEQ ID NO: 5243 - DNA, 1400 bp, Homo sapiens; identical to SEQ ID NO: 971

SEQ ID NO: 5244 - DNA, 600 bp, Homo sapiens; identical to SEQ ID NO: 972

SEQ ID NO: 5245 - DNA, 600 bp, Homo sapiens; identical to SEQ ID NO: 972

SEQ ID NO: 5246 - DNA, 600 bp, Homo sapiens; identical to SEQ ID NO: 974

SEQ ID NO: 5247 - DNA, 600 bp, Homo sapiens; identical to SEQ ID NO: 975

SEQ ID NO: 5248 - DNA, 1400 bp, Homo sapiens; identical to SEQ ID NO: 976

SEQ ID NO: 5249 - DNA, 600 bp, Homo sapiens; identical to SEQ ID NO: 977

SEQ ID NO: 5250 - DNA, 600 bp, Homo sapiens; identical to SEQ ID NO: 978

SEQ ID NO: 5251 - DNA, 600 bp, Homo sapiens; identical to SEQ ID NO: 978

SEQ ID NO: 5252 - DNA, 600 bp, Homo sapiens; identical to SEQ ID NO: 980

SEQ ID NO: 5253 - DNA, 600 bp, Homo sapiens; identical to SEQ ID NO: 980

SEQ ID NO: 5254 - DNA, 1400 bp, Homo sapiens; identical to SEQ ID NO: 982

SEQ ID NO: 5255 - DNA, 1400 bp, Homo sapiens; identical to SEQ ID NO: 982

SEQ ID NO: 5256 - DNA, 600 bp, Homo sapiens; identical to SEQ ID NO: 984

SEQ ID NO: 5257 - DNA, 1400 bp, Homo sapiens; identical to SEQ ID NO: 985
  misc_feature (1399)..(1399): n is a, c, g, or t

SEQ ID NO: 5258 - DNA, 1400 bp, Homo sapiens; identical to SEQ ID NO: 986

SEQ ID NO: 5259 - DNA, 1292 bp, Homo sapiens; identical to SEQ ID NO: 987

SEQ ID NO: 5260 - DNA, 1292 bp, Homo sapiens; identical to SEQ ID NO: 987

SEQ ID NO: 5261 - DNA, 600 bp, Homo sapiens; identical to SEQ ID NO: 989

SEQ ID NO: 5262 - DNA, 1400 bp, Homo sapiens; identical to SEQ ID NO: 990

SEQ ID NO: 5263 - DNA, 600 bp, Homo sapiens; identical to SEQ ID NO: 991

SEQ ID NO: 5264 - DNA, 1372 bp, Homo sapiens; identical to SEQ ID NO: 992

SEQ ID NO: 5265 - DNA, 600 bp, Homo sapiens; identical to SEQ ID NO: 993

SEQ ID NO: 5266 - DNA, 600 bp, Homo sapiens; identical to SEQ ID NO: 993

SEQ ID NO: 5267 - DNA, 1400 bp, Homo sapiens; identical to SEQ ID NO: 995

SEQ ID NO: 5268 - DNA, 1400 bp, Homo sapiens; identical to SEQ ID NO: 995

SEQ ID NO: 5269 - DNA, 600 bp, Homo sapiens; identical to SEQ ID NO: 997

SEQ ID NO: 5270 - DNA, 600 bp, Homo sapiens; identical to SEQ ID NO: 997

SEQ ID NO: 5271 - DNA, 1400 bp, Homo sapiens; identical to SEQ ID NO: 999

SEQ ID NO: 5272 - DNA, 600 bp, Homo sapiens; identical to SEQ ID NO: 1000

SEQ ID NO: 5273 - DNA, 600 bp, Homo sapiens; identical to SEQ ID NO: 1000

SEQ ID NO: 5274 - DNA, 1400 bp, Homo sapiens; identical to SEQ ID NO: 1002

SEQ ID NO: 5275 - DNA, 600 bp, Homo sapiens; identical to SEQ ID NO: 1003

SEQ ID NO: 5276 - DNA, 1400 bp, Homo sapiens; identical to SEQ ID NO: 1004

SEQ ID NO: 5277 - DNA, 600 bp, Homo sapiens; identical to SEQ ID NO: 1005

SEQ ID NO: 5278 - DNA, 600 bp, Homo sapiens; identical to SEQ ID NO: 1005

SEQ ID NO: 5279 - DNA, 1300 bp, Homo sapiens; identical to SEQ ID NO: 1007

SEQ ID NO: 5280 - DNA, 600 bp, Homo sapiens; identical to SEQ ID NO: 1008

SEQ ID NO: 5281 - DNA, 600 bp, Homo sapiens; identical to SEQ ID NO: 1009

SEQ ID NO: 5282 - DNA, 600 bp, Homo sapiens; identical to SEQ ID NO: 1009

SEQ ID NO: 5283 - DNA, 600 bp, Homo sapiens; identical to SEQ ID NO: 1011

SEQ ID NO: 5284 - DNA, 600 bp, Homo sapiens; identical to SEQ ID NO: 1012

SEQ ID NO: 5285 - DNA, 600 bp, Homo sapiens; identical to SEQ ID NO: 1013

SEQ ID NO: 5286 - DNA, 600 bp, Homo sapiens; identical to SEQ ID NO: 1014

SEQ ID NO: 5287 - DNA, 1400 bp, Homo sapiens; identical to SEQ ID NO: 1015

SEQ ID NO: 5288 - DNA, 1400 bp, Homo sapiens; identical to SEQ ID NO: 1016

SEQ ID NO: 5289 - DNA, 1400 bp, Homo sapiens; identical to SEQ ID NO: 1016

SEQ ID NO: 5290 - DNA, 1400 bp, Homo sapiens; identical to SEQ ID NO: 1018

SEQ ID NO: 5291 - DNA, 1400 bp, Homo sapiens; identical to SEQ ID NO: 1018

SEQ ID NO: 5292 - DNA, 600 bp, Homo sapiens; identical to SEQ ID NO: 1020

SEQ ID NO: 5293 - DNA, 600 bp, Homo sapiens; identical to SEQ ID NO: 1021

SEQ ID NO: 5294 - DNA, 600 bp, Homo sapiens; identical to SEQ ID NO: 1022

SEQ ID NO: 5295 - DNA, 600 bp, Homo sapiens; identical to SEQ ID NO: 1022

SEQ ID NO: 5296 - DNA, 1400 bp, Homo sapiens; identical to SEQ ID NO: 1024

SEQ ID NO: 5297 - DNA, 600 bp, Homo sapiens; identical to SEQ ID NO: 1025

SEQ ID NO: 5298 - DNA, 600 bp, Homo sapiens; identical to SEQ ID NO: 1025

SEQ ID NO: 5299 - DNA, 600 bp, Homo sapiens; identical to SEQ ID NO: 1027

SEQ ID NO: 5300 - DNA, 600 bp, Homo sapiens; identical to SEQ ID NO: 1027

SEQ ID NO: 5301 - DNA, 1400 bp, Homo sapiens; identical to SEQ ID NO: 1029
  misc_feature (1387)..(1387): n is a, c, g, or t
  misc_feature (1394)..(1394): n is a, c, g, or t
  misc_feature (1397)..(1397): n is a, c, g, or t

SEQ ID NO: 5302 - DNA, 600 bp, Homo sapiens; identical to SEQ ID NO: 1030

SEQ ID NO: 5303 - DNA, 600 bp, Homo sapiens; identical to SEQ ID NO: 1031

SEQ ID NO: 5304 - DNA, 600 bp, Homo sapiens; identical to SEQ ID NO: 1031

SEQ ID NO: 5305 - DNA, 1400 bp, Homo sapiens; identical to SEQ ID NO: 1033

SEQ ID NO: 5306 - DNA, 1400 bp, Homo sapiens; identical to SEQ ID NO: 1033

SEQ ID NO: 5307 - DNA, 1400 bp, Homo sapiens; identical to SEQ ID NO: 1035

SEQ ID NO: 5308 - DNA, 1002 bp, Homo sapiens; identical to SEQ ID NO: 1036

SEQ ID NO: 5309 - DNA, 1002 bp, Homo sapiens; identical to SEQ ID NO: 1036

SEQ ID NO: 5310 - DNA, 600 bp, Homo sapiens; identical to SEQ ID NO: 1038

SEQ ID NO: 5311 - DNA, 600 bp, Homo sapiens; identical to SEQ ID NO: 1038

SEQ ID NO: 5312 - DNA, 1400 bp, Homo sapiens; identical to SEQ ID NO: 1040

SEQ ID NO: 5313 - DNA, 1400 bp, Homo sapiens; identical to SEQ ID NO: 1041

SEQ ID NO: 5314 - DNA, 600 bp, Homo sapiens; identical to SEQ ID NO: 1042

SEQ ID NO: 5315 - DNA, 600 bp, Homo sapiens; identical to SEQ ID NO: 1042

SEQ ID NO: 5316 - DNA, 1400 bp, Homo sapiens; identical to SEQ ID NO: 1044

SEQ ID NO: 5317 - DNA, 1400 bp, Homo sapiens; identical to SEQ ID NO: 1044

SEQ ID NO: 5318 - DNA, 600 bp, Homo sapiens; identical to SEQ ID NO: 1046

SEQ ID NO: 5319 - DNA, 600 bp, Homo sapiens; identical to SEQ ID NO: 1047

SEQ ID NO: 5320 - DNA, 600 bp, Homo sapiens; identical to SEQ ID NO: 1047

SEQ ID NO: 5321 - DNA, 600 bp, Homo sapiens; identical to SEQ ID NO: 1049

SEQ ID NO: 5322 - DNA, 1400 bp, Homo sapiens; identical to SEQ ID NO: 1050
  misc_feature (1389)..(1389): n is a, c, g, or t

SEQ ID NO: 5323 - DNA, 600 bp, Homo sapiens; identical to SEQ ID NO: 1051

SEQ ID NO: 5324 - DNA, 600 bp, Homo sapiens; identical to SEQ ID NO: 1051

SEQ ID NO: 5325 - DNA, 147 bp, Homo sapiens; identical to SEQ ID NO: 1053

SEQ ID NO: 5326 - DNA, 600 bp, Homo sapiens; identical to SEQ ID NO: 1054

SEQ ID NO: 5327 - DNA, 600 bp, Homo sapiens; identical to SEQ ID NO: 1055

SEQ ID NO: 5328 - DNA, 600 bp, Homo sapiens; identical to SEQ ID NO: 1056

SEQ ID NO: 5329 - DNA, 600 bp, Homo sapiens; identical to SEQ ID NO: 1057

SEQ ID NO: 5330 - DNA, 600 bp, Homo sapiens; identical to SEQ ID NO: 1058

SEQ ID NO: 5331 - DNA, 1400 bp, Homo sapiens; identical to SEQ ID NO: 1059

SEQ ID NO: 5332 - DNA, 101 bp, Homo sapiens; identical to SEQ ID NO: 1060

SEQ ID NO: 5333 - DNA, 600 bp, Homo sapiens; identical to SEQ ID NO: 1061

SEQ ID NO: 5334 - DNA, 1400 bp, Homo sapiens; identical to SEQ ID NO: 1062

SEQ ID NO: 5335 - DNA, 600 bp, Homo sapiens; identical to SEQ ID NO: 1063

SEQ ID NO: 5336 - DNA, 1400 bp, Homo sapiens; identical to SEQ ID NO: 1064

SEQ ID NO: 5337 - DNA, 600 bp, Homo sapiens; identical to SEQ ID NO: 1065

SEQ ID NO: 5338 - DNA, 600 bp, Homo sapiens; identical to SEQ ID NO: 1066

SEQ ID NO: 5339 - DNA, 1400 bp, Homo sapiens; identical to SEQ ID NO: 1067

SEQ ID NO: 5340 - DNA, 600 bp, Homo sapiens; identical to SEQ ID NO: 1068

SEQ ID NO: 5341 - DNA, 600 bp, Homo sapiens; identical to SEQ ID NO: 1069

SEQ ID NO: 5342 - DNA, 600 bp, Homo sapiens; identical to SEQ ID NO: 1070
  misc_feature (528)..(528): n is a, c, g, or t
  misc_feature (566)..(566): n is a, c, g, or t
  misc_feature (592)..(592): n is a, c, g, or t

SEQ ID NO: 5343 - DNA, 600 bp, Homo sapiens; identical to SEQ ID NO: 1071

SEQ ID NO: 5344 - DNA, 1400 bp, Homo sapiens; identical to SEQ ID NO: 1072

SEQ ID NO: 5345 - DNA, 600 bp, Homo sapiens; identical to SEQ ID NO: 1073

SEQ ID NO: 5346 - DNA, 1400 bp, Homo sapiens; identical to SEQ ID NO: 1074

SEQ ID NO: 5347 - DNA, 1400 bp, Homo sapiens; identical to SEQ ID NO: 1075

SEQ ID NO: 5348 - DNA, 600 bp, Homo sapiens; identical to SEQ ID NO: 1076

SEQ ID NO: 5349 - DNA, 1400 bp, Homo sapiens; identical to SEQ ID NO: 1077

SEQ ID NO: 5350 - DNA, 1400 bp, Homo sapiens; identical to SEQ ID NO: 1078

SEQ ID NO: 5351 - DNA, 124 bp, Homo sapiens; identical to SEQ ID NO: 1079

SEQ ID NO: 5352 - DNA, 600 bp, Homo sapiens; identical to SEQ ID NO: 1080

SEQ ID NO: 5353 - DNA, 600 bp, Homo sapiens; identical to SEQ ID NO: 1081

SEQ ID NO: 5354 - DNA, 600 bp, Homo sapiens; identical to SEQ ID NO: 1082

SEQ ID NO: 5355 - DNA, 1400 bp, Homo sapiens; identical to SEQ ID NO: 1083

SEQ ID NO: 5356 - DNA, 600 bp, Homo sapiens; identical to SEQ ID NO: 1084

SEQ ID NO: 5357 - DNA, 600 bp, Homo sapiens; identical to SEQ ID NO: 1085

SEQ ID NO: 5358 - DNA, 600 bp, Homo sapiens; identical to SEQ ID NO: 1086

SEQ ID NO: 5359 - DNA, 600 bp, Homo sapiens; identical to SEQ ID NO: 1087

SEQ ID NO: 5360 - DNA, 277 bp, Homo sapiens; identical to SEQ ID NO: 1088

SEQ ID NO: 5361 - DNA, 277 bp, Homo sapiens; identical to SEQ ID NO: 1088

SEQ ID NO: 5362 - DNA, 530 bp, Homo sapiens; identical to SEQ ID NO: 1090

SEQ ID NO: 5363 - DNA, 530 bp, Homo sapiens; identical to SEQ ID NO: 1090

SEQ ID NO: 5364 - DNA, 275 bp, Homo sapiens; identical to SEQ ID NO: 1092
  misc_feature (171)..(171): n is a, c, g, or t
  misc_feature (174)..(174): n is a, c, g, or t
  misc_feature (176)..(176): n is a, c, g, or t
  misc_feature (178)..(178): n is a, c, g, or t
  misc_feature (184)..(184): n is a, c, g, or t
  misc_feature (191)..(191): n is a, c, g, or t
  misc_feature (194)..(194): n is a, c, g, or t
  misc_feature (196)..(196): n is a, c, g, or t
  misc_feature (200)..(200): n is a, c, g, or t
  misc_feature (206)..(206): n is a, c, g, or t
  misc_feature (210)..(210): n is a, c, g, or t
  misc_feature (216)..(216): n is a, c, g, or t
  misc_feature (218)..(219): n is a, c, g, or t
  misc_feature (226)..(226): n is a, c, g, or t
  misc_feature (230)..(231): n is a, c, g, or t
  misc_feature (234)..(235): n is a, c, g, or t
  misc_feature (237)..(238): n is a, c, g, or t
  misc_feature (242)..(242): n is a, c, g, or t
  misc_feature (246)..(246): n is a, c, g, or t
  misc_feature (249)..(249): n is a, c, g, or t
  misc_feature (251)..(251): n is a, c, g, or t
  misc_feature (255)..(255): n is a, c, g, or t
  misc_feature (264)..(266): n is a, c, g, or t

SEQ ID NO: 5365 - DNA, 300 bp, Homo sapiens; identical to SEQ ID NO: 1093
  misc_feature (198)..(198): n is a, c, g, or t
  misc_feature (218)..(218): n is a, c, g, or t
  misc_feature (224)..(224): n is a, c, g, or t
  misc_feature (226)..(226): n is a, c, g, or t
  misc_feature (240)..(240): n is a, c, g, or t
  misc_feature (248)..(248): n is a, c, g, or t
  misc_feature (257)..(257): n is a, c, g, or t
  misc_feature (267)..(268): n is a, c, g, or t
  misc_feature (278)..(278): n is a, c, g, or t
  misc_feature (280)..(280): n is a, c, g, or t
  misc_feature (287)..(287): n is a, c, g, or t

SEQ ID NO: 5366 - DNA, 300 bp, Homo sapiens; identical to SEQ ID NO: 1093
  misc_feature (198)..(198): n is a, c, g, or t
  misc_feature (218)..(218): n is a, c, g, or t
  misc_feature (224)..(224): n is a, c, g, or t
  misc_feature (226)..(226): n is a, c, g, or t
  misc_feature (240)..(240): n is a, c, g, or t
  misc_feature (248)..(248): n is a, c, g, or t
  misc_feature (257)..(257): n is a, c, g, or t
  misc_feature (267)..(268): n is a, c, g, or t
  misc_feature (278)..(278): n is a, c, g, or t
  misc_feature (280)..(280): n is a, c, g, or t
  misc_feature (287)..(287): n is a, c, g, or t

SEQ ID NO: 5367 - DNA, 291 bp, Homo sapiens; identical to SEQ ID NO: 1095
  misc_feature (172)..(172): n is a, c, g, or t
  misc_feature (175)..(175): n is a, c, g, or t
  misc_feature (186)..(186): n is a, c, g, or t
  misc_feature (196)..(196): n is a, c, g, or t
  misc_feature (214)..(214): n is a, c, g, or t
  misc_feature (216)..(216): n is a, c, g, or t
  misc_feature (219)..(219): n is a, c, g, or t
  misc_feature (224)..(224): n is a, c, g, or t
  misc_feature (227)..(227): n is a, c, g, or t
  misc_feature (229)..(229): n is a, c, g, or t
  misc_feature (232)..(232): n is a, c, g, or t
  misc_feature (241)..(241): n is a, c, g, or t
  misc_feature (244)..(244): n is a, c, g, or t
  misc_feature (248)..(250): n is a, c, g, or t
  misc_feature (253)..(253): n is a, c, g, or t
  misc_feature (255)..(256): n is a, c, g, or t
  misc_feature (261)..(262): n is a, c, g, or t
  misc_feature (264)..(266): n is a, c, g, or t
  misc_feature (268)..(270): n is a, c, g, or t
  misc_feature (276)..(276): n is a, c, g, or t
  misc_feature (280)..(282): n is a, c, g, or t

SEQ ID NO: 5368 - DNA, 291 bp, Homo sapiens; identical to SEQ ID NO: 1095
  misc_feature (172)..(172): n is a, c, g, or t
  misc_feature (175)..(175): n is a, c, g, or t
  misc_feature (186)..(186): n is a, c, g, or t
  misc_feature (196)..(196): n is a, c, g, or t
  misc_feature (214)..(214): n is a, c, g, or t
  misc_feature (216)..(216): n is a, c, g, or t
  misc_feature (219)..(219): n is a, c, g, or t
  misc_feature (224)..(224): n is a, c, g, or t
  misc_feature (227)..(227): n is a, c, g, or t
  misc_feature (229)..(229): n is a, c, g, or t
  misc_feature (232)..(232): n is a, c, g, or t
  misc_feature (241)..(241): n is a, c, g, or t
  misc_feature (244)..(244): n is a, c, g, or t
  misc_feature (248)..(250): n is a, c, g, or t
  misc_feature (253)..(253): n is a, c, g, or t
  misc_feature (255)..(256): n is a, c, g, or t
  misc_feature (261)..(262): n is a, c, g, or t
  misc_feature (264)..(266): n is a, c, g, or t
  misc_feature (268)..(270): n is a, c, g, or t
  misc_feature (276)..(276): n is a, c, g, or t
  misc_feature (280)..(282): n is a, c, g, or t

SEQ ID NO: 5369 - DNA, 600 bp, Homo sapiens; identical to SEQ ID NO: 1097
  misc_feature (25)..(25): n is a, c, g, or t
  misc_feature (43)..(43): n is a, c, g, or t
  misc_feature (79)..(79): n is a, c, g, or t
  misc_feature (91)..(91): n is a, c, g, or t
  misc_feature (120)..(120): n is a, c, g, or t
  misc_feature (136)..(136): n is a, c, g, or t
  misc_feature (179)..(179): n is a, c, g, or t
  misc_feature (183)..(183): n is a, c, g, or t
  misc_feature (188)..(188): n is a, c, g, or t
  misc_feature (200)..(200): n is a, c, g, or t
  misc_feature (221)..(221): n is a, c, g, or t
  misc_feature (261)..(261): n is a, c, g, or t
  misc_feature (286)..(286): n is a, c, g, or t
  misc_feature (313)..(313): n is a, c, g, or t
  misc_feature (318)..(318): n is a, c, g, or t
  misc_feature (320)..(320): n is a, c, g, or t
  misc_feature (336)..(336): n is a, c, g, or t
  misc_feature (375)..(375): n is a, c, g, or t
  misc_feature (378)..(378): n is a, c, g, or t
  misc_feature (394)..(394): n is a, c, g, or t
  misc_feature (403)..(403): n is a, c, g, or t
  misc_feature (456)..(456): n is a, c, g, or t
  misc_feature (481)..(481): n is a, c, g, or t
  misc_feature (489)..(489): n is a, c, g, or t
  misc_feature (519)..(519): n is a, c, g, or t
  misc_feature (533)..(533): n is a, c, g, or t

SEQ ID NO: 5370 - DNA, 600 bp, Homo sapiens; identical to SEQ ID NO: 1098
  misc_feature (281)..(281): n is a, c, g, or t
  misc_feature (535)..(535): n is a, c, g, or t
  misc_feature (545)..(545): n is a, c, g, or t
  misc_feature (560)..(560): n is a, c, g, or t
  misc_feature (581)..(581): n is a, c, g, or t

SEQ ID NO: 5371 - DNA, 600 bp, Homo sapiens; identical to SEQ ID NO: 1098
  misc_feature (281)..(281): n is a, c, g, or t
  misc_feature (535)..(535): n is a, c, g, or t
  misc_feature (545)..(545): n is a, c, g, or t
  misc_feature (560)..(560): n is a, c, g, or t
  misc_feature (581)..(581): n is a, c, g, or t

SEQ ID NO: 5372 - DNA, 600 bp, Homo sapiens; identical to SEQ ID NO: 1100

SEQ ID NO: 5373 - DNA, 600 bp, Homo sapiens; identical to SEQ ID NO: 1101

SEQ ID NO: 5374 - DNA, 600 bp, Homo sapiens; identical to SEQ ID NO: 1101

SEQ ID NO: 5375 - DNA, 238 bp, Homo sapiens; identical to SEQ ID NO: 1103
  misc_feature (88)..(88): n is a, c, g, or t
  misc_feature (139)..(139): n is a, c, g, or t
  misc_feature (157)..(157): n is a, c, g, or t
  misc_feature (191)..(191): n is a, c, g, or t
  misc_feature (210)..(210): n is a, c, g, or t
  misc_feature (228)..(228): n is a, c, g, or t
  misc_feature (233)..(233): n is a, c, g, or t

SEQ ID NO: 5376 - DNA, 269 bp, Homo sapiens; identical to SEQ ID NO: 1104
  misc_feature (40)..(40): n is a, c, g, or t
  misc_feature (88)..(88): n is a, c, g, or t
  misc_feature (119)..(119): n is a, c, g, or t
  misc_feature (124)..(124): n is a, c, g, or t
  misc_feature (148)..(148): n is a, c, g, or t
  misc_feature (227)..(227): n is a, c, g, or t
  misc_feature (244)..(244): n is a, c, g, or t
  misc_feature (262)..(262): n is a, c, g, or t
  misc_feature (265)..(265): n is a, c, g, or t

SEQ ID NO: 5377 - DNA, 269 bp, Homo sapiens; identical to SEQ ID NO: 1104
  misc_feature (40)..(40): n is a, c, g, or t
  misc_feature (88)..(88): n is a, c, g, or t
  misc_feature (119)..(119): n is a, c, g, or t
  misc_feature (124)..(124): n is a, c, g, or t
  misc_feature (148)..(148): n is a, c, g, or t
  misc_feature (227)..(227): n is a, c, g, or t
  misc_feature (244)..(244): n is a, c, g, or t
  misc_feature (262)..(262): n is a, c, g, or t
  misc_feature (265)..(265): n is a, c, g, or t

SEQ ID NO: 5378 - DNA, 600 bp, Homo sapiens; identical to SEQ ID NO: 1106
  misc_feature (544)..(544): n is a, c, g, or t

SEQ ID NO: 5379 - DNA, 600 bp, Homo sapiens; identical to SEQ ID NO: 1106
  misc_feature (544)..(544): n is a, c, g, or t

SEQ ID NO: 5380 - DNA, 316 bp, Homo sapiens; identical to SEQ ID NO: 1108
  misc_feature (151)..(160): n is a, c, g, or t

SEQ ID NO: 5381 - DNA, 316 bp, Homo sapiens; identical to SEQ ID NO: 1108
  misc_feature (151)..(160): n is a, c, g, or t

SEQ ID NO: 5382 - DNA, 508 bp, Homo sapiens; identical to SEQ ID NO: 1110

SEQ ID NO: 5383 - DNA, 508 bp, Homo sapiens; identical to SEQ ID NO: 1110

SEQ ID NO: 5384 - DNA, 1400 bp, Homo sapiens; identical to SEQ ID NO: 1112

SEQ ID NO: 5385 - DNA, 1400 bp, Homo sapiens; identical to SEQ ID NO: 1112

SEQ ID NO: 5386 - DNA, 600 bp, Homo sapiens; identical to SEQ ID NO: 1114

SEQ ID NO: 5387 - DNA, 600 bp, Homo sapiens; identical to SEQ ID NO: 1114

SEQ ID NO: 5388 - DNA, 600 bp, Homo sapiens; identical to SEQ ID NO: 1116

SEQ ID NO: 5389 - DNA, 600 bp, Homo sapiens; identical to SEQ ID NO: 1116

SEQ ID NO: 5390 - DNA, 600 bp, Homo sapiens; identical to SEQ ID NO: 1118

SEQ ID NO: 5391 - DNA, 600 bp, Homo sapiens; identical to SEQ ID NO: 1118

SEQ ID NO: 5392 - DNA, 1224 bp, Homo sapiens; identical to SEQ ID NO: 1120

SEQ ID NO: 5393 - DNA, 1400 bp, Homo sapiens; identical to SEQ ID NO: 1121

SEQ ID NO: 5394 - DNA, 561 bp, Homo sapiens; identical to SEQ ID NO: 1122

SEQ ID NO: 5395 - DNA, 561 bp, Homo sapiens; identical to SEQ ID NO: 1122

SEQ ID NO: 5396 - DNA, 600 bp, Homo sapiens; identical to SEQ ID NO: 1124
  misc_feature (221)..(221): n is a, c, g, or t
  misc_feature (291)..(291): n is a, c, g, or t
  misc_feature (421)..(421): n is a, c, g, or t

SEQ ID NO: 5397 - DNA, 1400 bp, Homo sapiens; identical to SEQ ID NO: 1125

SEQ ID NO: 5398 - DNA, 600 bp, Homo sapiens; identical to SEQ ID NO: 1126

SEQ ID NO: 5399 - DNA, 594 bp, Homo sapiens; identical to SEQ ID NO: 1127

SEQ ID NO: 5400 - DNA, 552 bp, Homo sapiens; identical to SEQ ID NO: 1128

SEQ ID NO: 5401 - DNA, 1400 bp, Homo sapiens; identical to SEQ ID NO: 1129

SEQ ID NO: 5402 - DNA, 1400 bp, Homo sapiens; identical to SEQ ID NO: 1129

SEQ ID NO: 5403 - DNA, 600 bp, Homo sapiens; identical to SEQ ID NO: 1131

SEQ ID NO: 5404 - DNA, 600 bp, Homo sapiens; identical to SEQ ID NO: 1131

SEQ ID NO: 5405 - DNA, 382 bp, Homo sapiens; identical to SEQ ID NO: 1133

SEQ ID NO: 5406 - DNA, 368 bp, Homo sapiens; identical to SEQ ID NO: 1134

SEQ ID NO: 5407 - DNA, 405 bp, Homo sapiens; identical to SEQ ID NO: 1135

SEQ ID NO: 5408 - DNA, 405 bp, Homo sapiens; identical to SEQ ID NO: 1135

SEQ ID NO: 5409 - DNA, 383 bp, Homo sapiens; identical to SEQ ID NO: 1137

SEQ ID NO: 5410 - DNA, 383 bp, Homo sapiens; identical to SEQ ID NO: 1137

SEQ ID NO: 5411 - DNA, 600 bp, Homo sapiens; identical to SEQ ID NO: 1139

SEQ ID NO: 5412 - DNA, 600 bp, Homo sapiens; identical to SEQ ID NO: 1139

SEQ ID NO: 5413 - DNA, 211 bp, Homo sapiens; identical to SEQ ID NO: 1141

SEQ ID NO: 5414 - DNA, 405 bp, Homo sapiens; identical to SEQ ID NO: 1142
  misc_feature (227)..(227): n is a, c, g, or t

SEQ ID NO: 5415 - DNA, 405 bp, Homo sapiens; identical to SEQ ID NO: 1142
  misc_feature (227)..(227): n is a, c, g, or t

SEQ ID NO: 5416 - DNA, 332 bp, Homo sapiens; identical to SEQ ID NO: 1144

SEQ ID NO: 5417 - DNA, 403 bp, Homo sapiens; identical to SEQ ID NO: 1145
  misc_feature (33)..(33): n is a, c, g, or t

SEQ ID NO: 5418 - DNA, 403 bp, Homo sapiens; identical to SEQ ID NO: 1145
  misc_feature (33)..(33): n is a, c, g, or t

SEQ ID NO: 5419 - DNA, 385 bp, Homo sapiens; identical to SEQ ID NO: 1147

SEQ ID NO: 5420 - DNA, 297 bp, Homo sapiens; identical to SEQ ID NO: 1148

SEQ ID NO: 5421 - DNA, 366 bp, Homo sapiens; identical to SEQ ID NO: 1149
  misc_feature (275)..(276): n is a, c, g, or t

SEQ ID NO: 5422 - DNA, 366 bp, Homo sapiens; identical to SEQ ID NO: 1149
  misc_feature (275)..(276): n is a, c, g, or t

SEQ ID NO: 5423 - DNA, 302 bp, Homo sapiens; identical to SEQ ID NO: 1151

SEQ ID NO: 5424 - DNA, 302 bp, Homo sapiens; identical to SEQ ID NO: 1151

SEQ ID NO: 5425 - DNA, 195 bp, Homo sapiens; identical to SEQ ID NO: 1153

SEQ ID NO: 5426 - DNA, 455 bp, Homo sapiens; identical to SEQ ID NO: 1154

SEQ ID NO: 5427 - DNA, 455 bp, Homo sapiens; identical to SEQ ID NO: 1154

SEQ ID NO: 5428 - DNA, 424 bp, Homo sapiens; identical to SEQ ID NO: 1156
  misc_feature (358)..(358): n is a, c, g, or t

SEQ ID NO: 5429 - DNA, 424 bp, Homo sapiens; identical to SEQ ID NO: 1156
  misc_feature (358)..(358): n is a, c, g, or t

SEQ ID NO: 5430 - DNA, 142 bp, Homo sapiens; identical to SEQ ID NO: 1158

SEQ ID NO: 5431 - DNA, 142 bp, Homo sapiens; identical to SEQ ID NO: 1158

SEQ ID NO: 5432 - DNA, 231 bp, Homo sapiens; identical to SEQ ID NO: 1160

SEQ ID NO: 5433 - DNA, 373 bp, Homo sapiens; identical to SEQ ID NO: 1161

SEQ ID NO: 5434 - DNA, 373 bp, Homo sapiens; identical to SEQ ID NO: 1161

SEQ ID NO: 5435 - DNA, 343 bp, Homo sapiens; identical to SEQ ID NO: 1163

SEQ ID NO: 5436 - DNA, 343 bp, Homo sapiens; identical to SEQ ID NO: 1163

SEQ ID NO: 5437 - DNA, 278 bp, Homo sapiens; identical to SEQ ID NO: 1165

SEQ ID NO: 5438 - DNA, 278 bp, Homo sapiens; identical to SEQ ID NO: 1165

SEQ ID NO: 5439 - DNA, 464 bp, Homo sapiens; identical to SEQ ID NO: 1167

SEQ ID NO: 5440 - DNA, 600 bp, Homo sapiens; identical to SEQ ID NO: 1168

SEQ ID NO: 5441 - DNA, 600 bp, Homo sapiens; identical to SEQ ID NO: 1168

SEQ ID NO: 5442 - DNA, 1300 bp, Homo sapiens; identical to SEQ ID NO: 1170

SEQ ID NO: 5443 - DNA, 1300 bp, Homo sapiens; identical to SEQ ID NO: 1170

SEQ ID NO: 5444 - DNA, 1313 bp, Homo sapiens; identical to SEQ ID NO: 1172

SEQ ID NO: 5445 - DNA, 1313 bp, Homo sapiens; identical to SEQ ID NO: 1172

SEQ ID NO: 5446 - DNA, 600 bp, Homo sapiens; identical to SEQ ID NO: 1174

SEQ ID NO: 5447 - DNA, 600 bp, Homo sapiens; identical to SEQ ID NO: 1174

SEQ ID NO: 5448 - DNA, 600 bp, Homo sapiens; identical to SEQ ID NO: 1176

SEQ ID NO: 5449 - DNA, 600 bp, Homo sapiens; identical to SEQ ID NO: 1177

SEQ ID NO: 5450 - DNA, 600 bp, Homo sapiens; identical to SEQ ID NO: 1177

SEQ ID NO: 5451 - DNA, 600 bp, Homo sapiens; identical to SEQ ID NO: 1179
  misc_feature (592)..(592): n is a, c, g, or t

SEQ ID NO: 5452 - DNA, 600 bp, Homo sapiens; identical to SEQ ID NO: 1179
  misc_feature (592)..(592): n is a, c, g, or t

SEQ ID NO: 5453 - DNA, 1400 bp, Homo sapiens; identical to SEQ ID NO: 1181
  misc_feature (1395)..(1395): n is a, c, g, or t
  misc_feature (1397)..(1397): n is a, c, g, or t

SEQ ID NO: 5454 - DNA, 1400 bp, Homo sapiens; identical to SEQ ID NO: 1181
  misc_feature (1395)..(1395): n is a, c, g, or t
  misc_feature (1397)..(1397): n is a, c, g, or t

SEQ ID NO: 5455 - DNA, 388 bp, Homo sapiens; identical to SEQ ID NO: 1183
  misc_feature (1)..(1): n is a, c, g, or t
  misc_feature (388)..(388): n is a, c, g, or t

SEQ ID NO: 5456 - DNA, 388 bp, Homo sapiens; identical to SEQ ID NO: 1183
  misc_feature (1)..(1): n is a, c, g, or t
  misc_feature (388)..(388): n is a, c, g, or t

SEQ ID NO: 5457 - DNA, 600 bp, Homo sapiens; identical to SEQ ID NO: 1185

SEQ ID NO: 5458 - DNA, 600 bp, Homo sapiens; identical to SEQ ID NO: 1185

SEQ ID NO: 5459 - DNA, 371 bp, Homo sapiens; identical to SEQ ID NO: 1187
  misc_feature (1)..(1): n is a, c, g, or t

SEQ ID NO: 5460 - DNA, 477 bp, Homo sapiens; identical to SEQ ID NO: 1188

SEQ ID NO: 5461 - DNA, 477 bp, Homo sapiens; identical to SEQ ID NO: 1188

SEQ ID NO: 5462 - DNA, 401 bp, Homo sapiens; identical to SEQ ID NO: 1190
  misc_feature (1)..(1): n is a, c, g, or t

SEQ ID NO: 5463 - DNA, 401 bp, Homo sapiens; identical to SEQ ID NO: 1190
  misc_feature (1)..(1): n is a, c, g, or t

SEQ ID NO: 5464 - DNA, 362 bp, Homo sapiens; identical to SEQ ID NO: 1192
  misc_feature (1)..(2): n is a, c, g, or t

SEQ ID NO: 5465 - DNA, 362 bp, Homo sapiens; identical to SEQ ID NO: 1192
  misc_feature (1)..(2): n is a, c, g, or t

SEQ ID NO: 5466 - DNA, 600 bp, Homo sapiens; identical to SEQ ID NO: 1194

SEQ ID NO: 5467 - DNA, 600 bp, Homo sapiens; identical to SEQ ID NO: 1195

SEQ ID NO: 5468 - DNA, 289 bp, Homo sapiens; identical to SEQ ID NO: 1196
  misc_feature (1)..(1): n is a, c, g, or t

SEQ ID NO: 5469 - DNA, 289 bp, Homo sapiens; identical to SEQ ID NO: 1196
  misc_feature (1)..(1): n is a, c, g, or t

SEQ ID NO: 5470 - DNA, 600 bp, Homo sapiens; identical to SEQ ID NO: 1198

SEQ ID NO: 5471 - DNA, 600 bp, Homo sapiens; identical to SEQ ID NO: 1198

SEQ ID NO: 5472 - DNA, 600 bp, Homo sapiens; identical to SEQ ID NO: 1200

SEQ ID NO: 5473 - DNA, 273 bp, Homo sapiens; identical to SEQ ID NO: 1201

SEQ ID NO: 5474 - DNA, 600 bp, Homo sapiens; identical to SEQ ID NO: 1202

SEQ ID NO: 5475 - DNA, 600 bp, Homo sapiens; identical to SEQ ID NO: 1203

SEQ ID NO: 5476 - DNA, 600 bp, Homo sapiens; identical to SEQ ID NO: 1203

SEQ ID NO: 5477 - DNA, 598 bp, Homo sapiens; identical to SEQ ID NO: 1205

SEQ ID NO: 5478 - DNA, 598 bp, Homo sapiens; identical to SEQ ID NO: 1205

SEQ ID NO: 5479 - DNA, 566 bp, Homo sapiens; identical to SEQ ID NO: 1207
  misc_feature (27)..(27): n is a, c, g, or t

SEQ ID NO: 5480 - DNA, 566 bp, Homo sapiens; identical to SEQ ID NO: 1207
  misc_feature (27)..(27): n is a, c, g, or t

SEQ ID NO: 5481 - DNA, 443 bp, Homo sapiens; identical to SEQ ID NO: 1209

SEQ ID NO: 5482 - DNA, 1345 bp, Homo sapiens; identical to SEQ ID NO: 1210
  misc_feature (1324)..(1324): n is a, c, g, or t
  misc_feature (1326)..(1326): n is a, c, g, or t
  misc_feature (1338)..(1338): n is a, c, g, or t
  misc_feature (1344)..(1344): n is a, c, g, or t

SEQ ID NO: 5483 - DNA, 1345 bp, Homo sapiens; identical to SEQ ID NO: 1210
  misc_feature (1324)..(1324): n is a, c, g, or t
  misc_feature (1326)..(1326): n is a, c, g, or t
  misc_feature (1338)..(1338): n is a, c, g, or t
  misc_feature (1344)..(1344): n is a, c, g, or t

SEQ ID NO: 5484 - DNA, 600 bp, Homo sapiens; identical to SEQ ID NO: 1212
  misc_feature (158)..(158): n is a, c, g, or t

SEQ ID NO: 5485 - DNA, 600 bp, Homo sapiens; identical to SEQ ID NO: 1213

SEQ ID NO: 5486 - DNA, 1400 bp, Homo sapiens; identical to SEQ ID NO: 1214

SEQ ID NO: 5487 - DNA, 388 bp, Homo sapiens; identical to SEQ ID NO: 1215
  misc_feature (205)..(205): n is a, c, g, or t
  misc_feature (339)..(339): n is a, c, g, or t
  misc_feature (344)..(344): n is a, c, g, or t
  misc_feature (364)..(364): n is a, c, g, or t
  misc_feature (382)..(382): n is a, c, g, or t

SEQ ID NO: 5488 - DNA, 388 bp, Homo sapiens; identical to SEQ ID NO: 1215
  misc_feature (205)..(205): n is a, c, g, or t
  misc_feature (339)..(339): n is a, c, g, or t
  misc_feature (344)..(344): n is a, c, g, or t
  misc_feature (364)..(364): n is a, c, g, or t
  misc_feature (382)..(382): n is a, c, g, or t

SEQ ID NO: 5489 - DNA, 1400 bp, Homo sapiens; identical to SEQ ID NO: 1217

SEQ ID NO: 5490 - DNA, 97 bp, Homo sapiens; identical to SEQ ID NO: 1218

SEQ ID NO: 5491 - DNA, 97 bp, Homo sapiens; identical to SEQ ID NO: 1218

SEQ ID NO: 5492 - DNA, 600 bp, Homo sapiens; identical to SEQ ID NO: 1220

SEQ ID NO: 5493 - DNA, 600 bp, Homo sapiens; identical to SEQ ID NO: 1220

SEQ ID NO: 5494 - DNA, 287 bp, Homo sapiens; identical to SEQ ID NO: 1222

SEQ ID NO: 5495 - DNA, 322 bp, Homo sapiens; identical to SEQ ID NO: 1223

SEQ ID NO: 5496 - DNA, 322 bp, Homo sapiens; identical to SEQ ID NO: 1223

SEQ ID NO: 5497 - DNA, 288 bp, Homo sapiens; identical to SEQ ID NO: 1225

SEQ ID NO: 5498 - DNA, 288 bp, Homo sapiens; identical to SEQ ID NO: 1225

SEQ ID NO: 5499 - DNA, 407 bp, Homo sapiens; identical to SEQ ID NO: 1227

SEQ ID NO: 5500 - DNA, 407 bp, Homo sapiens; identical to SEQ ID NO: 1227

SEQ ID NO: 5501 - DNA, 600 bp, Homo sapiens; identical to SEQ ID NO: 1229

SEQ ID NO: 5502 - DNA, 600 bp, Homo sapiens; identical to SEQ ID NO: 1229

SEQ ID NO: 5503 - DNA, 1400 bp, Homo sapiens; identical to SEQ ID NO: 1231

SEQ ID NO: 5504 - DNA, 1400 bp, Homo sapiens; identical to SEQ ID NO: 1231

SEQ ID NO: 5505 - DNA, 600 bp, Homo sapiens; identical to SEQ ID NO: 1233

SEQ ID NO: 5506 - DNA, 600 bp, Homo sapiens; identical to SEQ ID NO: 1234

SEQ ID NO: 5507 - DNA, 600 bp, Homo sapiens; identical to SEQ ID NO: 1235

SEQ ID NO: 5508 - DNA, 195 bp, Homo sapiens; identical to SEQ ID NO: 1236

SEQ ID NO: 5509 - DNA, 600 bp, Homo sapiens; identical to SEQ ID NO: 1237
  misc_feature (140)..(140): n is a, c, g, or t
  misc_feature (433)..(433): n is a, c, g, or t
  misc_feature (513)..(513): n is a, c, g, or t
  misc_feature (545)..(545): n is a, c, g, or t
  misc_feature (588)..(588): n is a, c, g, or t

SEQ ID NO: 5510 - DNA, 600 bp, Homo sapiens; identical to SEQ ID NO: 1237
  misc_feature (140)..(140): n is a, c, g, or t
  misc_feature (433)..(433): n is a, c, g, or t
  misc_feature (513)..(513): n is a, c, g, or t
  misc_feature (545)..(545): n is a, c, g, or t
  misc_feature (588)..(588): n is a, c, g, or t

SEQ ID NO: 5511 - DNA, 600 bp, Homo sapiens; identical to SEQ ID NO: 1239

SEQ ID NO: 5512 - DNA, 600 bp, Homo sapiens; identical to SEQ ID NO: 1240
  misc_feature (597)..(597): n is a, c, g, or t

SEQ ID NO: 5513 - DNA, 600 bp, Homo sapiens; identical to SEQ ID NO: 1240
  misc_feature (597)..(597): n is a, c, g, or t

SEQ ID NO: 5514 - DNA, 551 bp, Homo sapiens; identical to SEQ ID NO: 1242
  misc_feature (2)..(2): n is a, c, g, or t
  misc_feature (15)..(15): n is a, c, g, or t

SEQ ID NO: 5515 - DNA, 449 bp, Homo sapiens; identical to SEQ ID NO: 1243

SEQ ID NO: 5516 - DNA, 449 bp, Homo sapiens; identical to SEQ ID NO: 1243

SEQ ID NO: 5517 - DNA, 1400 bp, Homo sapiens; identical to SEQ ID NO: 1245
  misc_feature (955)..(955): n is a, c, g, or t
  misc_feature (1242)..(1242): n is a, c, g, or t

SEQ ID NO: 5518 - DNA, 600 bp, Homo sapiens; identical to SEQ ID NO: 1246

SEQ ID NO: 5519 - DNA, 600 bp, Homo sapiens; identical to SEQ ID NO: 1247

SEQ ID NO: 5520 - DNA, 600 bp, Homo sapiens; identical to SEQ ID NO: 1247

SEQ ID NO: 5521 - DNA, 600 bp, Homo sapiens; identical to SEQ ID NO: 1249

SEQ ID NO: 5522 - DNA, 600 bp, Homo sapiens; identical to SEQ ID NO: 1249

SEQ ID NO: 5523 - DNA, 1400 bp, Homo sapiens; identical to SEQ ID NO: 1251

SEQ ID NO: 5524 - DNA, 1400 bp, Homo sapiens; identical to SEQ ID NO: 1251

SEQ ID NO: 5525 - DNA, 600 bp, Homo sapiens; identical to SEQ ID NO: 1253

SEQ ID NO: 5526 - DNA, 600 bp, Homo sapiens; identical to SEQ ID NO: 1254

SEQ ID NO: 5527 - DNA, 600 bp, Homo sapiens; identical to SEQ ID NO: 1255

SEQ ID NO: 5528 - DNA, 600 bp, Homo sapiens; identical to SEQ ID NO: 1255

SEQ ID NO: 5529 - DNA, 348 bp, Homo sapiens; identical to SEQ ID NO: 1257

SEQ ID NO: 5530 - DNA, 348 bp, Homo sapiens; identical to SEQ ID NO: 1257

SEQ ID NO: 5531 - DNA, 600 bp, Homo sapiens; identical to SEQ ID NO: 1259

SEQ ID NO: 5532 - DNA, 600 bp, Homo sapiens; identical to SEQ ID NO: 1259

SEQ ID NO: 5533 - DNA, 600 bp, Homo sapiens; identical to SEQ ID NO: 1261

SEQ ID NO: 5534 - DNA, 600 bp, Homo sapiens; identical to SEQ ID NO: 1261

SEQ ID NO: 5535 - DNA, 1400 bp, Homo sapiens; identical to SEQ ID NO: 1263

SEQ ID NO: 5536 - DNA, 1400 bp, Homo sapiens; identical to SEQ ID NO: 1263

SEQ ID NO: 5537 - DNA, 600 bp, Homo sapiens; identical to SEQ ID NO: 1265

SEQ ID NO: 5538 - DNA, 600 bp, Homo sapiens; identical to SEQ ID NO: 1265

SEQ ID NO: 5539 - DNA, 600 bp, Homo sapiens; identical to SEQ ID NO: 1267

SEQ ID NO: 5540 - DNA, 1400 bp, Homo sapiens; identical to SEQ ID NO: 1268

SEQ ID NO: 5541 - DNA, 1400 bp, Homo sapiens; identical to SEQ ID NO: 1268

SEQ ID NO: 5542 - DNA, 600 bp, Homo sapiens; identical to SEQ ID NO: 1270

SEQ ID NO: 5543 - DNA, 600 bp, Homo sapiens; identical to SEQ ID NO: 1270

SEQ ID NO: 5544 - DNA, 1400 bp, Homo sapiens; identical to SEQ ID NO: 1272

SEQ ID NO: 5545 - DNA, 520 bp, Homo sapiens; identical to SEQ ID NO: 1273

SEQ ID NO: 5546 - DNA, 520 bp, Homo sapiens; identical to SEQ ID NO: 1273

SEQ ID NO: 5547 - DNA, 474 bp, Homo sapiens; identical to SEQ ID NO: 1275

SEQ ID NO: 5548 - DNA, 483 bp, Homo sapiens; identical to SEQ ID NO: 1276

SEQ ID NO: 5549 - DNA, 483 bp, Homo sapiens; identical to SEQ ID NO: 1276

SEQ ID NO: 5550 - DNA, 1400 bp, Homo sapiens; identical to SEQ ID NO: 1278

SEQ ID NO: 5551 - DNA, 300 bp, Homo sapiens; identical to SEQ ID NO: 1279
  misc_feature (197)..(197): n is a, c, g, or t

SEQ ID NO: 5552 - DNA, 487 bp, Homo sapiens; identical to SEQ ID NO: 1280

SEQ ID NO: 5553 - DNA, 487 bp, Homo sapiens; identical to SEQ ID NO: 1280

SEQ ID NO: 5554 - DNA, 476 bp, Homo sapiens; identical to SEQ ID NO: 1282

SEQ ID NO: 5555 - DNA, 302 bp, Homo sapiens; identical to SEQ ID NO: 1283
  misc_feature (220)..(220): n is a, c, g, or t
  misc_feature (282)..(282): n is a, c, g, or t
  misc_feature (302)..(302): n is a, c, g, or t

SEQ ID NO: 5556 - DNA, 101 bp, Homo sapiens; identical to SEQ ID NO: 1284

SEQ ID NO: 5557 - DNA, 159 bp, Homo sapiens; identical to SEQ ID NO: 1285

SEQ ID NO: 5558 - DNA, 159 bp, Homo sapiens; identical to SEQ ID NO: 1285

SEQ ID NO: 5559 - DNA, 600 bp, Homo sapiens; identical to SEQ ID NO: 1287

SEQ ID NO: 5560 - DNA, 600 bp, Homo sapiens; identical to SEQ ID NO: 1287

SEQ ID NO: 5561 - DNA, 600 bp, Homo sapiens; identical to SEQ ID NO: 1289

SEQ ID NO: 5562 - DNA, 600 bp, Homo sapiens; identical to SEQ ID NO: 1290

SEQ ID NO: 5563 - DNA, 826 bp, Homo sapiens; identical to SEQ ID NO: 1291

SEQ ID NO: 5564 - DNA, 206 bp, Homo sapiens; identical to SEQ ID NO: 1292

SEQ ID NO: 5565 - DNA, 1400 bp, Homo sapiens; identical to SEQ ID NO: 1293

SEQ ID NO: 5566 - DNA, 1400 bp, Homo sapiens; identical to SEQ ID NO: 1294

SEQ ID NO: 5567 - DNA, 1400 bp, Homo sapiens; identical to SEQ ID NO: 1294

SEQ ID NO: 5568 - DNA, 600 bp, Homo sapiens; identical to SEQ ID NO: 1296

SEQ ID NO: 5569 - DNA, 600 bp, Homo sapiens; identical to SEQ ID NO: 1297

SEQ ID NO: 5570 - DNA, 600 bp, Homo sapiens; identical to SEQ ID NO: 1298

SEQ ID NO: 5571 - DNA, 600 bp, Homo sapiens; identical to SEQ ID NO: 1298

SEQ ID NO: 5572 - DNA, 1400 bp, Homo sapiens; identical to SEQ ID NO: 1300

SEQ ID NO: 5573 - DNA, 1400 bp, Homo sapiens; identical to SEQ ID NO: 1300

SEQ ID NO: 5574 - DNA, 600 bp, Homo sapiens; identical to SEQ ID NO: 1302

SEQ ID NO: 5575 - DNA, 600 bp, Homo sapiens; identical to SEQ ID NO: 1303

SEQ ID NO: 5576 - DNA, 600 bp, Homo sapiens; identical to SEQ ID NO: 1303

SEQ ID NO: 5577 - DNA, 936 bp, Homo sapiens; identical to SEQ ID NO: 1305

SEQ ID NO: 5578 - DNA, 431 bp, Homo sapiens; identical to SEQ ID NO: 1306
  misc_feature (369)..(369): n is a, c, g, or t
  misc_feature (404)..(404): n is a, c, g, or t

SEQ ID NO: 5579 - DNA, 431 bp, Homo sapiens; identical to SEQ ID NO: 1306
  misc_feature (369)..(369): n is a, c, g, or t
  misc_feature (404)..(404): n is a, c, g, or t

SEQ ID NO: 5580 - DNA, 347 bp, Homo sapiens; identical to SEQ ID NO: 1308

SEQ ID NO: 5581 - DNA, 347 bp, Homo sapiens; identical to SEQ ID NO: 1308

SEQ ID NO: 5582 - DNA, 600 bp, Homo sapiens; identical to SEQ ID NO: 1310

SEQ ID NO: 5583 - DNA, 600 bp, Homo sapiens; identical to SEQ ID NO: 1311

SEQ ID NO: 5584 - DNA, 600 bp, Homo sapiens; identical to SEQ ID NO: 1311

SEQ ID NO: 5585 - DNA, 600 bp, Homo sapiens; identical to SEQ ID NO: 1313

SEQ ID NO: 5586 - DNA, 600 bp, Homo sapiens; identical to SEQ ID NO: 1313

SEQ ID NO: 5587 - DNA, 600 bp, Homo sapiens; identical to SEQ ID NO: 1315

SEQ ID NO: 5588 - DNA, 600 bp, Homo sapiens; identical to SEQ ID NO: 1316

SEQ ID NO: 5589 - DNA, 600 bp, Homo sapiens; identical to SEQ ID NO: 1316

SEQ ID NO: 5590 - DNA, 600 bp, Homo sapiens; identical to SEQ ID NO: 1318

SEQ ID NO: 5591 - DNA, 600 bp, Homo sapiens; identical to SEQ ID NO: 1318

SEQ ID NO: 5592 - DNA, 498 bp, Homo sapiens; identical to SEQ ID NO: 1320
  misc_feature (5)..(5): n is a, c, g, or t
  misc_feature (10)..(10): n is a, c, g, or t
  misc_feature (13)..(13): n is a, c, g, or t
  misc_feature (32)..(32): n is a, c, g, or t
  misc_feature (63)..(63): n is a, c, g, or t
  misc_feature (72)..(72): n is a, c, g, or t
  misc_feature (154)..(154): n is a, c, g, or t

SEQ ID NO: 5593 - DNA, 498 bp, Homo sapiens; identical to SEQ ID NO: 1320
  misc_feature (5)..(5): n is a, c, g, or t
  misc_feature (10)..(10): n is a, c, g, or t
  misc_feature (13)..(13): n is a, c, g, or t
  misc_feature (32)..(32): n is a, c, g, or t
  misc_feature (63)..(63): n is a, c, g, or t
  misc_feature (72)..(72): n is a, c, g, or t
  misc_feature (154)..(154): n is a, c, g, or t

SEQ ID NO: 5594 - DNA, 440 bp, Homo sapiens; identical to SEQ ID NO: 1322

SEQ ID NO: 5595 - DNA, 285 bp, Homo sapiens; identical to SEQ ID NO: 1323

SEQ ID NO: 5596 - DNA, 600 bp, Homo sapiens; identical to SEQ ID NO: 1324

SEQ ID NO: 5597 - DNA, 380 bp, Homo sapiens; identical to SEQ ID NO: 1325

SEQ ID NO: 5598 - DNA, 380 bp, Homo sapiens; identical to SEQ ID NO: 1325

SEQ ID NO: 5599 - DNA, 600 bp, Homo sapiens; identical to SEQ ID NO: 1327

SEQ ID NO: 5600 - DNA, 600 bp, Homo sapiens; identical to SEQ ID NO: 1327

SEQ ID NO: 5601 - DNA, 502 bp, Homo sapiens; identical to SEQ ID NO: 1329

SEQ ID NO: 5602 - DNA, 502 bp, Homo sapiens; identical to SEQ ID NO: 1329

SEQ ID NO: 5603 - DNA, 266 bp, Homo sapiens; identical to SEQ ID NO: 1331

SEQ ID NO: 5604 - DNA, 415 bp, Homo sapiens; identical to SEQ ID NO: 1332

SEQ ID NO: 5605 - DNA, 415 bp, Homo sapiens; identical to SEQ ID NO: 1332

SEQ ID NO: 5606 - DNA, 489 bp, Homo sapiens; identical to SEQ ID NO: 1334

SEQ ID NO: 5607 - DNA, 489 bp, Homo sapiens; identical to SEQ ID NO: 1334

SEQ ID NO: 5608 - DNA, 600 bp, Homo sapiens; identical to SEQ ID NO: 1336

SEQ ID NO: 5609 - DNA, 600 bp, Homo sapiens; identical to SEQ ID NO: 1336

SEQ ID NO: 5610 - DNA, 600 bp, Homo sapiens; identical to SEQ ID NO: 1338
  misc_feature (460)..(460): n is a, c, g, or t
  misc_feature (520)..(520): n is a, c, g, or t
  misc_feature (530)..(530): n is a, c, g, or t

SEQ ID NO: 5611 - DNA, 600 bp, Homo sapiens; identical to SEQ ID NO: 1338
  misc_feature (460)..(460): n is a, c, g, or t
  misc_feature (520)..(520): n is a, c, g, or t
  misc_feature (530)..(530): n is a, c, g, or t

SEQ ID NO: 5612 - DNA, 600 bp, Homo sapiens; identical to SEQ ID NO: 1340

SEQ ID NO: 5613 - DNA, 600 bp, Homo sapiens; identical to SEQ ID NO: 1340

SEQ ID NO: 5614 - DNA, 600 bp, Homo sapiens; identical to SEQ ID NO: 1342

SEQ ID NO: 5615 - DNA, 333 bp, Homo sapiens; identical to SEQ ID NO: 1343

SEQ ID NO: 5616 - DNA, 333 bp, Homo sapiens; identical to SEQ ID NO: 1343

SEQ ID NO: 5617 - DNA, 600 bp, Homo sapiens; identical to SEQ ID NO: 1345

SEQ ID NO: 5618 - DNA, 458 bp, Homo sapiens; identical to SEQ ID NO: 1346

SEQ ID NO: 5619 - DNA, 458 bp, Homo sapiens; identical to SEQ ID NO: 1346

SEQ ID NO: 5620 - DNA, 476 bp, Homo sapiens; identical to SEQ ID NO: 1348

SEQ ID NO: 5621 - DNA, 490 bp, Homo sapiens; identical to SEQ ID NO: 1349

SEQ ID NO: 5622 - DNA, 482 bp, Homo sapiens; identical to SEQ ID NO: 1350

SEQ ID NO: 5623 - DNA, 482 bp, Homo sapiens; identical to SEQ ID NO: 1350

SEQ ID NO: 5624 - DNA, 445 bp, Homo sapiens; identical to SEQ ID NO: 1352

SEQ ID NO: 5625 - DNA, 445 bp, Homo sapiens; identical to SEQ ID NO: 1352

SEQ ID NO: 5626 - DNA, 446 bp, Homo sapiens; identical to SEQ ID NO: 1354

SEQ ID NO: 5627 - DNA, 446 bp, Homo sapiens; identical to SEQ ID NO: 1354

SEQ ID NO: 5628 - DNA, 387 bp, Homo sapiens; identical to SEQ ID NO: 1356

SEQ ID NO: 5629 - DNA, 387 bp, Homo sapiens; identical to SEQ ID NO: 1356

SEQ ID NO: 5630 - DNA, 406 bp, Homo sapiens; identical to SEQ ID NO: 1358

SEQ ID NO: 5631 - DNA, 463 bp, Homo sapiens; identical to SEQ ID NO: 1359

SEQ ID NO: 5632 - DNA, 433 bp, Homo sapiens; identical to SEQ ID NO: 1360

SEQ ID NO: 5633 - DNA, 433 bp, Homo sapiens; identical to SEQ ID NO: 1360

SEQ ID NO: 5634 - DNA, 415 bp, Homo sapiens; identical to SEQ ID NO: 1362

SEQ ID NO: 5635 - DNA, 367 bp, Homo sapiens; identical to SEQ ID NO: 1363

SEQ ID NO: 5636 - DNA, 367 bp, Homo sapiens; identical to SEQ ID NO: 1363

SEQ ID NO: 5637 - DNA, 600 bp, Homo sapiens; identical to SEQ ID NO: 1365

SEQ ID NO: 5638 - DNA, 483 bp, Homo sapiens; identical to SEQ ID NO: 1366

SEQ ID NO: 5639 - DNA, 483 bp, Homo sapiens; identical to SEQ ID NO: 1366

SEQ ID NO: 5640 - DNA, 477 bp, Homo sapiens; identical to SEQ ID NO: 1368

SEQ ID NO: 5641 - DNA, 477 bp, Homo sapiens; identical to SEQ ID NO: 1368

SEQ ID NO: 5642 - DNA, 397 bp, Homo sapiens; identical to SEQ ID NO: 1370

SEQ ID NO: 5643 - DNA, 485 bp, Homo sapiens; identical to SEQ ID NO: 1371

SEQ ID NO: 5644 - DNA, 485 bp, Homo sapiens; identical to SEQ ID NO: 1371

SEQ ID NO: 5645 - DNA, 563 bp, Homo sapiens; identical to SEQ ID NO: 1373

SEQ ID NO: 5646 - DNA, 563 bp, Homo sapiens; identical to SEQ ID NO: 1373

SEQ ID NO: 5647 - DNA, 586 bp, Homo sapiens; identical to SEQ ID NO: 1375

SEQ ID NO: 5648 - DNA, 586 bp, Homo sapiens; identical to SEQ ID NO: 1375

SEQ ID NO: 5649 - DNA, 592 bp, Homo sapiens; identical to SEQ ID NO: 1377

SEQ ID NO: 5650 - DNA, 528 bp, Homo sapiens; identical to SEQ ID NO: 1378

SEQ ID NO: 5651 - DNA, 528 bp, Homo sapiens; identical to SEQ ID NO: 1378

SEQ ID NO: 5652 - DNA, 514 bp, Homo sapiens; identical to SEQ ID NO: 1380

SEQ ID NO: 5653 - DNA, 562 bp, Homo sapiens; identical to SEQ ID NO: 1381

SEQ ID NO: 5654 - DNA, 562 bp, Homo sapiens; identical to SEQ ID NO: 1381

SEQ ID NO: 5655 - DNA, 565 bp, Homo sapiens; identical to SEQ ID NO: 1383

SEQ ID NO: 5656 - DNA, 212 bp, Homo sapiens; identical to SEQ ID NO: 1384

SEQ ID NO: 5657 - DNA, 472 bp, Homo sapiens; identical to SEQ ID NO: 1385

SEQ ID NO: 5658 - DNA, 481 bp, Homo sapiens; identical to SEQ ID NO: 1386

SEQ ID NO: 5659 - DNA, 481 bp, Homo sapiens; identical to SEQ ID NO: 1386

SEQ ID NO: 5660 - DNA, 463 bp, Homo sapiens; identical to SEQ ID NO: 1388

SEQ ID NO: 5661 - DNA, 463 bp, Homo sapiens; identical to SEQ ID NO: 1388

SEQ ID NO: 5662 - DNA, 387 bp, Homo sapiens; identical to SEQ ID NO: 1390

SEQ ID NO: 5663 - DNA, 387 bp, Homo sapiens; identical to SEQ ID NO: 1390

SEQ ID NO: 5664 - DNA, 485 bp, Homo sapiens; identical to SEQ ID NO: 1392

SEQ ID NO: 5665 - DNA, 485 bp, Homo sapiens; identical to SEQ ID NO: 1392

SEQ ID NO: 5666 - DNA, 482 bp, Homo sapiens; identical to SEQ ID NO: 1394

SEQ ID NO: 5667 - DNA, 482 bp, Homo sapiens; identical to SEQ ID NO: 1394

SEQ ID NO: 5668 - DNA, 482 bp, Homo sapiens; identical to SEQ ID NO: 1396

SEQ ID NO: 5669 - DNA, 482 bp, Homo sapiens; identical to SEQ ID NO: 1396

SEQ ID NO: 5670 - DNA, 466 bp, Homo sapiens; identical to SEQ ID NO: 1398

SEQ ID NO: 5671 - DNA, 449 bp, Homo sapiens; identical to SEQ ID NO: 1399

SEQ ID NO: 5672 - DNA, 469 bp, Homo sapiens; identical to SEQ ID NO: 1400

SEQ ID NO: 5673 - DNA, 469 bp, Homo sapiens; identical to SEQ ID NO: 1400

SEQ ID NO: 5674 - DNA, 471 bp, Homo sapiens; identical to SEQ ID NO: 1402

SEQ ID NO: 5675 - DNA, 471 bp, Homo sapiens; identical to SEQ ID NO: 1402

SEQ ID NO: 5676 - DNA, 474 bp, Homo sapiens; identical to SEQ ID NO: 1404

SEQ ID NO: 5677 - DNA, 474 bp, Homo sapiens; identical to SEQ ID NO: 1404

SEQ ID NO: 5678 - DNA, 482 bp, Homo sapiens; identical to SEQ ID NO: 1406

SEQ ID NO: 5679 - DNA, 482 bp, Homo sapiens; identical to SEQ ID NO: 1406

SEQ ID NO: 5680 - DNA, 471 bp, Homo sapiens; identical to SEQ ID NO: 1408

SEQ ID NO: 5681 - DNA, 471 bp, Homo sapiens; identical to SEQ ID NO: 1408

SEQ ID NO: 5682 - DNA, 555 bp, Homo sapiens; identical to SEQ ID NO: 1410

SEQ ID NO: 5683 - DNA, 555 bp, Homo sapiens; identical to SEQ ID NO: 1410

SEQ ID NO: 5684 - DNA, 530 bp, Homo sapiens; identical to SEQ ID NO: 1412

SEQ ID NO: 5685 - DNA, 530 bp, Homo sapiens; identical to SEQ ID NO: 1412

SEQ ID NO: 5686 - DNA, 598 bp, Homo sapiens; identical to SEQ ID NO: 1414

SEQ ID NO: 5687 - DNA, 598 bp, Homo sapiens; identical to SEQ ID NO: 1414

SEQ ID NO: 5688 - DNA, 513 bp, Homo sapiens; identical to SEQ ID NO: 1416

SEQ ID NO: 5689 - DNA, 513 bp, Homo sapiens; identical to SEQ ID NO: 1416

SEQ ID NO: 5690 - DNA, 581 bp, Homo sapiens; identical to SEQ ID NO: 1418

SEQ ID NO: 5691 - DNA, 581 bp, Homo sapiens; identical to SEQ ID NO: 1418

SEQ ID NO: 5692 - DNA, 551 bp, Homo sapiens; identical to SEQ ID NO: 1420

SEQ ID NO: 5693 - DNA, 551 bp, Homo sapiens; identical to SEQ ID NO: 1420

SEQ ID NO: 5694 - DNA, 515 bp, Homo sapiens; identical to SEQ ID NO: 1422

SEQ ID NO: 5695 - DNA, 515 bp, Homo sapiens; identical to SEQ ID NO: 1422

SEQ ID NO: 5696 - DNA, 534 bp, Homo sapiens; identical to SEQ ID NO: 1424

SEQ ID NO: 5697 - DNA, 534 bp, Homo sapiens; identical to SEQ ID NO: 1424

SEQ ID NO: 5698 - DNA, 577 bp, Homo sapiens; identical to SEQ ID NO: 1426

SEQ ID NO: 5699 - DNA, 577 bp, Homo sapiens; identical to SEQ ID NO: 1426

SEQ ID NO: 5700 - DNA, 502 bp, Homo sapiens; identical to SEQ ID NO: 1428

SEQ ID NO: 5701 - DNA, 502 bp, Homo sapiens; identical to SEQ ID NO: 1428

SEQ ID NO: 5702 - DNA, 572 bp, Homo sapiens; identical to SEQ ID NO: 1430

SEQ ID NO: 5703 - DNA, 572 bp, Homo sapiens; identical to SEQ ID NO: 1430

SEQ ID NO: 5704 - DNA, 294 bp, Homo sapiens; identical to SEQ ID NO: 1432

SEQ ID NO: 5705 - DNA, 137 bp, Homo sapiens; identical to SEQ ID NO: 1433

SEQ ID NO: 5706 - DNA, 118 bp, Homo sapiens; identical to SEQ ID NO: 1434

SEQ ID NO: 5707 - DNA, 178 bp, Homo sapiens; identical to SEQ ID NO: 1435

SEQ ID NO: 5708 - DNA, 76 bp, Homo sapiens; identical to SEQ ID NO: 1436

SEQ ID NO: 5709 - DNA, 600 bp, Homo sapiens; identical to SEQ ID NO: 1437

SEQ ID NO: 5710 - DNA, 600 bp, Homo sapiens; identical to SEQ ID NO: 1437

SEQ ID NO: 5711 - DNA, 1369 bp, Homo sapiens; identical to SEQ ID NO: 1439

SEQ ID NO: 5712 - DNA, 1369 bp, Homo sapiens; identical to SEQ ID NO: 1439

SEQ ID NO: 5713 - DNA, 600 bp, Homo sapiens; identical to SEQ ID NO: 1441

SEQ ID NO: 5714 - DNA, 600 bp, Homo sapiens; identical to SEQ ID NO: 1441

SEQ ID NO: 5715 - DNA, 1400 bp, Homo sapiens; identical to SEQ ID NO: 1443

SEQ ID NO: 5716 - DNA, 1400 bp, Homo sapiens; identical to SEQ ID NO: 1443

SEQ ID NO: 5717 - DNA, 459 bp, Homo sapiens; identical to SEQ ID NO: 1445

SEQ ID NO: 5718 - DNA, 459 bp, Homo sapiens; identical to SEQ ID NO: 1445

SEQ ID NO: 5719 - DNA, 1400 bp, Homo sapiens; identical to SEQ ID NO: 1447

SEQ ID NO: 5720 - DNA, 1400 bp, Homo sapiens; identical to SEQ ID NO: 1447

SEQ ID NO: 5721 - DNA, 1275 bp, Homo sapiens; identical to SEQ ID NO: 1449

SEQ ID NO: 5722 - DNA, 1275 bp, Homo sapiens; identical to SEQ ID NO: 1449

SEQ ID NO: 5723 - DNA, 1400 bp, Homo sapiens; identical to SEQ ID NO: 1451

SEQ ID NO: 5724 - DNA, 1400 bp, Homo sapiens; identical to SEQ ID NO: 1451

SEQ ID NO: 5725 - DNA, 518 bp, Homo sapiens; identical to SEQ ID NO: 1453

SEQ ID NO: 5726 - DNA, 518 bp, Homo sapiens; identical to SEQ ID NO: 1453

SEQ ID NO: 5727 - DNA, 172 bp, Homo sapiens; identical to SEQ ID NO: 1455

SEQ ID NO: 5728 - DNA, 600 bp, Homo sapiens; identical to SEQ ID NO: 1456

SEQ ID NO: 5729 - DNA, 600 bp, Homo sapiens; identical to SEQ ID NO: 1456

SEQ ID NO: 5730 - DNA, 600 bp, Homo sapiens; identical to SEQ ID NO: 1458

SEQ ID NO: 5731 - DNA, 600 bp, Homo sapiens; identical to SEQ ID NO: 1458

SEQ ID NO: 5732 - DNA, 506 bp, Homo sapiens; identical to SEQ ID NO: 1460

SEQ ID NO: 5733 - DNA, 600 bp, Homo sapiens; identical to SEQ ID NO: 1461

SEQ ID NO: 5734 - DNA, 600 bp, Homo sapiens; identical to SEQ ID NO: 1461

SEQ ID NO: 5735 - DNA, 1400 bp, Homo sapiens; identical to SEQ ID NO: 1463

SEQ ID NO: 5736 - DNA, 1400 bp, Homo sapiens; identical to SEQ ID NO: 1463

SEQ ID NO: 5737 - DNA, 160 bp, Homo sapiens; identical to SEQ ID NO: 1465

SEQ ID NO: 5738 - DNA, 147 bp, Homo sapiens; identical to SEQ ID NO: 1466

SEQ ID NO: 5739 - DNA, 600 bp, Homo sapiens; identical to SEQ ID NO: 1467

SEQ ID NO: 5740 - DNA, 418 bp, Homo sapiens; identical to SEQ ID NO: 1468

SEQ ID NO: 5741 - DNA, 418 bp, Homo sapiens; identical to SEQ ID NO: 1468

SEQ ID NO: 5742 - DNA, 143 bp, Homo sapiens; identical to SEQ ID NO: 1470
  misc_feature (55)..(55): n is a, c, g, or t
  misc_feature (87)..(87): n is a, c, g, or t

SEQ ID NO: 5743 - DNA, 216 bp, Homo sapiens; identical to SEQ ID NO: 1471

SEQ ID NO: 5744 - DNA, 135 bp, Homo sapiens; identical to SEQ ID NO: 1472

SEQ ID NO: 5745 - DNA, 1400 bp, Homo sapiens; identical to SEQ ID NO: 1473

SEQ ID NO: 5746 - DNA, 1400 bp, Homo sapiens; identical to SEQ ID NO: 1473

SEQ ID NO: 5747 - DNA, 142 bp, Homo sapiens; identical to SEQ ID NO: 1475
  misc_feature (25)..(25): n is a, c, g, or t
  misc_feature (32)..(32): n is a, c, g, or t

SEQ ID NO: 5748 - DNA, 142 bp, Homo sapiens; identical to SEQ ID NO: 1475
  misc_feature (25)..(25): n is a, c, g, or t
  misc_feature (32)..(32): n is a, c, g, or t

SEQ ID NO: 5749 - DNA, 600 bp, Homo sapiens; identical to SEQ ID NO: 1477

SEQ ID NO: 5750 - DNA, 600 bp, Homo sapiens; identical to SEQ ID NO: 1477

SEQ ID NO: 5751 - DNA, 600 bp, Homo sapiens; identical to SEQ ID NO: 1479

SEQ ID NO: 5752 - DNA, 600 bp, Homo sapiens; identical to SEQ ID NO: 1479

SEQ ID NO: 5753 - DNA, 600 bp, Homo sapiens; identical to SEQ ID NO: 1481

SEQ ID NO: 5754 - DNA, 600 bp, Homo sapiens; identical to SEQ ID NO: 1481

SEQ ID NO: 5755 - DNA, 1290 bp, Homo sapiens; identical to SEQ ID NO: 1483

SEQ ID NO: 5756 - DNA, 1400 bp, Homo sapiens; identical to SEQ ID NO: 1484

SEQ ID NO: 5757 - DNA, 1400 bp, Homo sapiens; identical to SEQ ID NO: 1484

SEQ ID NO: 5758 - DNA, 1400 bp, Homo sapiens; identical to SEQ ID NO: 1486

SEQ ID NO: 5759 - DNA, 1400 bp, Homo sapiens; identical to SEQ ID NO: 1486

SEQ ID NO: 5760 - DNA, 600 bp, Homo sapiens; identical to SEQ ID NO: 1488

SEQ ID NO: 5761 - DNA, 600 bp, Homo sapiens; identical to SEQ ID NO: 1488

SEQ ID NO: 5762 - DNA, 321 bp, Homo sapiens; identical to SEQ ID NO: 1490

SEQ ID NO: 5763 - DNA, 600 bp, Homo sapiens; identical to SEQ ID NO: 1491

SEQ ID NO: 5764 - DNA, 600 bp, Homo sapiens; identical to SEQ ID NO: 1491

SEQ ID NO: 5765 - DNA, 1400 bp, Homo sapiens; identical to SEQ ID NO: 1493

SEQ ID NO: 5766 - DNA, 975 bp, Homo sapiens; identical to SEQ ID NO: 1494

SEQ ID NO: 5767 - DNA, 600 bp, Homo sapiens; identical to SEQ ID NO: 1495

SEQ ID NO: 5768 - DNA, 600 bp, Homo sapiens; identical to SEQ ID NO: 1495

SEQ ID NO: 5769 - DNA, 467 bp, Homo sapiens; identical to SEQ ID NO: 1497

SEQ ID NO: 5770 - DNA, 600 bp, Homo sapiens; identical to SEQ ID NO: 1498

SEQ ID NO: 5771 - DNA, 600 bp, Homo sapiens; identical to SEQ ID NO: 1498

SEQ ID NO: 5772 - DNA, 600 bp, Homo sapiens; identical to SEQ ID NO: 1500

SEQ ID NO: 5773 - DNA, 600 bp, Homo sapiens; identical to SEQ ID NO: 1500

SEQ ID NO: 5774 - DNA, 600 bp, Homo sapiens; identical to SEQ ID NO: 1502

SEQ ID NO: 5775 - DNA, 600 bp, Homo sapiens; identical to SEQ ID NO: 1503

SEQ ID NO: 5776 - DNA, 600 bp, Homo sapiens; identical to SEQ ID NO: 1503

SEQ ID NO: 5777 - DNA, 600 bp, Homo sapiens; identical to SEQ ID NO: 1505

SEQ ID NO: 5778 - DNA, 600 bp, Homo sapiens; identical to SEQ ID NO: 1505

SEQ ID NO: 5779 - DNA, 600 bp, Homo sapiens; identical to SEQ ID NO: 1507

SEQ ID NO: 5780 - DNA, 600 bp, Homo sapiens; identical to SEQ ID NO: 1507

SEQ ID NO: 5781 - DNA, 600 bp, Homo sapiens; identical to SEQ ID NO: 1509

SEQ ID NO: 5782 - DNA, 600 bp, Homo sapiens; identical to SEQ ID NO: 1509

SEQ ID NO: 5783 - DNA, 600 bp, Homo sapiens; identical to SEQ ID NO: 1511

SEQ ID NO: 5784 - DNA, 600 bp, Homo sapiens; identical to SEQ ID NO: 1512

SEQ ID NO: 5785 - DNA, 600 bp, Homo sapiens; identical to SEQ ID NO: 1512

SEQ ID NO: 5786 - DNA, 600 bp, Homo sapiens; identical to SEQ ID NO: 1514

SEQ ID NO: 5787 - DNA, 600 bp, Homo sapiens; identical to SEQ ID NO: 1514

SEQ ID NO: 5788 - DNA, 271 bp, Homo sapiens; identical to SEQ ID NO: 1516
  misc_feature (16)..(16): n is a, c, g, or t
  misc_feature (204)..(204): n is a, c, g, or t
  misc_feature (237)..(237): n is a, c, g, or t

SEQ ID NO: 5789 - DNA, 1400 bp, Homo sapiens; identical to SEQ ID NO: 1517

SEQ ID NO: 5790 - DNA, 1400 bp, Homo sapiens; identical to SEQ ID NO: 1518
  misc_feature (241)..(241): n is a, c, g, or t

SEQ ID NO: 5791 - DNA, 1400 bp, Homo sapiens; identical to SEQ ID NO: 1518
  misc_feature (241)..(241): n is a, c, g, or t

SEQ ID NO: 5792 - DNA, 600 bp, Homo sapiens; identical to SEQ ID NO: 1520

SEQ ID NO: 5793 - DNA, 600 bp, Homo sapiens; identical to SEQ ID NO: 1520

SEQ ID NO: 5794 - DNA, 133 bp, Homo sapiens; identical to SEQ ID NO: 1522

SEQ ID NO: 5795 - DNA, 133 bp, Homo sapiens; identical to SEQ ID NO: 1522

SEQ ID NO: 5796 - DNA, 600 bp, Homo sapiens; identical to SEQ ID NO: 1524

SEQ ID NO: 5797 - DNA, 600 bp, Homo sapiens; identical to SEQ ID NO: 1524

SEQ ID NO: 5798 - DNA, 417 bp, Homo sapiens; identical to SEQ ID NO: 1526
  misc_feature (315)..(315): n is a, c, g, or t
  misc_feature (370)..(370): n is a, c, g, or t
  misc_feature (377)..(377): n is a, c, g, or t
  misc_feature (417)..(417): n is a, c, g, or t

SEQ ID NO: 5799 - DNA, 417 bp, Homo sapiens; identical to SEQ ID NO: 1526
  misc_feature (315)..(315): n is a, c, g, or t
  misc_feature (370)..(370): n is a, c, g, or t
  misc_feature (377)..(377): n is a, c, g, or t
  misc_feature (417)..(417): n is a, c, g, or t

SEQ ID NO: 5800 - DNA, 222 bp, Homo sapiens; identical to SEQ ID NO: 1528
  misc_feature (55)..(55): n is a, c, g, or t
  misc_feature (194)..(194): n is a, c, g, or t

SEQ ID NO: 5801 - DNA, 222 bp, Homo sapiens; identical to SEQ ID NO: 1528
  misc_feature (55)..(55): n is a, c, g, or t
  misc_feature (194)..(194): n is a, c, g, or t

SEQ ID NO: 5802 - DNA, 386 bp, Homo sapiens; identical to SEQ ID NO: 1530
  misc_feature (11)..(11): n is a, c, g, or t
  misc_feature (39)..(39): n is a, c, g, or t
  misc_feature (128)..(128): n is a, c, g, or t
  misc_feature (215)..(215): n is a, c, g, or t
  misc_feature (223)..(223): n is a, c, g, or t
  misc_feature (252)..(252): n is a, c, g, or t
  misc_feature (303)..(303): n is a, c, g, or t
  misc_feature (335)..(335): n is a, c, g, or t
  misc_feature (377)..(377): n is a, c, g, or t
  misc_feature (386)..(386): n is a, c, g, or t

SEQ ID NO: 5803 - DNA, 1400 bp, Homo sapiens; identical to SEQ ID NO: 1531

SEQ ID NO: 5804 - DNA, 600 bp, Homo sapiens; identical to SEQ ID NO: 1532

SEQ ID NO: 5805 - DNA, 1317 bp, Homo sapiens; identical to SEQ ID NO: 1533

SEQ ID NO: 5806 - DNA, 1317 bp, Homo sapiens; identical to SEQ ID NO: 1533

SEQ ID NO: 5807 - DNA, 600 bp, Homo sapiens; identical to SEQ ID NO: 1535

SEQ ID NO: 5808 - DNA, 600 bp, Homo sapiens; identical to SEQ ID NO: 1535

SEQ ID NO: 5809 - DNA, 1400 bp, Homo sapiens; identical to SEQ ID NO: 1537

SEQ ID NO: 5810 - DNA, 304 bp, Homo sapiens; identical to SEQ ID NO: 1538

SEQ ID NO: 5811 - DNA, 304 bp, Homo sapiens; identical to SEQ ID NO: 1538

SEQ ID NO: 5812 - DNA, 243 bp, Homo sapiens; identical to SEQ ID NO: 1540

SEQ ID NO: 5813 - DNA, 1400 bp, Homo sapiens; identical to SEQ ID NO: 1541

SEQ ID NO: 5814 - DNA, 1400 bp, Homo sapiens; identical to SEQ ID NO: 1541

SEQ ID NO: 5815 - DNA, 240 bp, Homo sapiens; identical to SEQ ID NO: 1543

SEQ ID NO: 5816 - DNA, 240 bp, Homo sapiens; identical to SEQ ID NO: 1543

SEQ ID NO: 5817 - DNA, 600 bp, Homo sapiens; identical to SEQ ID NO: 1545

SEQ ID NO: 5818 - DNA, 600 bp, Homo sapiens; identical to SEQ ID NO: 1545

SEQ ID NO: 5819 - DNA, 600 bp, Homo sapiens; identical to SEQ ID NO: 1547

SEQ ID NO: 5820 - DNA, 600 bp, Homo sapiens; identical to SEQ ID NO: 1547

SEQ ID NO: 5821 - DNA, 600 bp, Homo sapiens; identical to SEQ ID NO: 1549
  misc_feature (115)..(115): n is a, c, g, or t
  misc_feature (161)..(161): n is a, c, g, or t
  misc_feature (179)..(179): n is a, c, g, or t
  misc_feature (186)..(186): n is a, c, g, or t
  misc_feature (201)..(201): n is a, c, g, or t
  misc_feature (279)..(279): n is a, c, g, or t
  misc_feature (331)..(331): n is a, c, g, or t
  misc_feature (403)..(403): n is a, c, g, or t
  misc_feature (425)..(425): n is a, c, g, or t
  misc_feature (429)..(429): n is a, c, g, or t
  misc_feature (437)..(437): n is a, c, g, or t
  misc_feature (443)..(443): n is a, c, g, or t
  misc_feature (451)..(451): n is a, c, g, or t
  misc_feature (463)..(463): n is a, c, g, or t
  misc_feature (484)..(484): n is a, c, g, or t
  misc_feature (496)..(500): n is a, c, g, or t
  misc_feature (503)..(504): n is a, c, g, or t
  misc_feature (527)..(527): n is a, c, g, or t
  misc_feature (533)..(533): n is a, c, g, or t
  misc_feature (538)..(538): n is a, c, g, or t
  misc_feature (554)..(554): n is a, c, g, or t
  misc_feature (560)..(560): n is a, c, g, or t
  misc_feature (565)..(566): n is a, c, g, or t
  misc_feature (571)..(572): n is a, c, g, or t
  misc_feature (587)..(587): n is a, c, g, or t
  misc_feature (590)..(590): n is a, c, g, or t
  misc_feature (593)..(595): n is a, c, g, or t

SEQ ID NO: 5822 - DNA, 600 bp, Homo sapiens; identical to SEQ ID NO: 1549
  misc_feature (115)..(115): n is a, c, g, or t
  misc_feature (161)..(161): n is a, c, g, or t
  misc_feature (179)..(179): n is a, c, g, or t
  misc_feature (186)..(186): n is a, c, g, or t
  misc_feature (201)..(201): n is a, c, g, or t
  misc_feature (279)..(279): n is a, c, g, or t
  misc_feature (331)..(331): n is a, c, g, or t
  misc_feature (403)..(403): n is a, c, g, or t
  misc_feature (425)..(425): n is a, c, g, or t
  misc_feature (429)..(429): n is a, c, g, or t
  misc_feature (437)..(437): n is a, c, g, or t
  misc_feature (443)..(443): n is a, c, g, or t
  misc_feature (451)..(451): n is a, c, g, or t
  misc_feature (463)..(463): n is a, c, g, or t
  misc_feature (484)..(484): n is a, c, g, or t
  misc_feature (496)..(500): n is a, c, g, or t
  misc_feature (503)..(504): n is a, c, g, or t
  misc_feature (527)..(527): n is a, c, g, or t
  misc_feature (533)..(533): n is a, c, g, or t
  misc_feature (538)..(538): n is a, c, g, or t
  misc_feature (554)..(554): n is a, c, g, or t
  misc_feature (560)..(560): n is a, c, g, or t
  misc_feature (565)..(566): n is a, c, g, or t
  misc_feature (571)..(572): n is a, c, g, or t
  misc_feature (587)..(587): n is a, c, g, or t
  misc_feature (590)..(590): n is a, c, g, or t
  misc_feature (593)..(595): n is a, c, g, or t

SEQ ID NO: 5823 - DNA, 600 bp, Homo sapiens; identical to SEQ ID NO: 1551

SEQ ID NO: 5824 - DNA, 600 bp, Homo sapiens; identical to SEQ ID NO: 1551

SEQ ID NO: 5825 - DNA, 1253 bp, Homo sapiens; identical to SEQ ID NO: 1553
  misc_feature (53)..(53): n is a, c, g, or t

SEQ ID NO: 5826 - DNA, 1253 bp, Homo sapiens; identical to SEQ ID NO: 1553
  misc_feature (53)..(53): n is a, c, g, or t

SEQ ID NO: 5827 - DNA, 1299 bp, Homo sapiens; identical to SEQ ID NO: 1555

SEQ ID NO: 5828 - DNA, 1299 bp, Homo sapiens; identical to SEQ ID NO: 1555

SEQ ID NO: 5829 - DNA, 600 bp, Homo sapiens; identical to SEQ ID NO: 1557

SEQ ID NO: 5830 - DNA, 600 bp, Homo sapiens; identical to SEQ ID NO: 1558

SEQ ID NO: 5831 - DNA, 407 bp, Homo sapiens; identical to SEQ ID NO: 1559

SEQ ID NO: 5832 - DNA, 407 bp, Homo sapiens; identical to SEQ ID NO: 1559

SEQ ID NO: 5833 - DNA, 339 bp, Homo sapiens; identical to SEQ ID NO: 1561

SEQ ID NO: 5834 - DNA, 339 bp, Homo sapiens; identical to SEQ ID NO: 1561

SEQ ID NO: 5835 - DNA, 1400 bp, Homo sapiens; identical to SEQ ID NO: 1563

SEQ ID NO: 5836 - DNA, 1400 bp, Homo sapiens; identical to SEQ ID NO: 1563

SEQ ID NO: 5837 - DNA, 1400 bp, Homo sapiens; identical to SEQ ID NO: 1565

SEQ ID NO: 5838 - DNA, 326 bp, Homo sapiens; identical to SEQ ID NO: 1566

SEQ ID NO: 5839 - DNA, 257 bp, Homo sapiens; identical to SEQ ID NO: 1567

SEQ ID NO: 5840 - DNA, 257 bp, Homo sapiens; identical to SEQ ID NO: 1567

SEQ ID NO: 5841 - DNA, 268 bp, Homo sapiens; identical to SEQ ID NO: 1569

SEQ ID NO: 5842 - DNA, 268 bp, Homo sapiens; identical to SEQ ID NO: 1569

SEQ ID NO: 5843 - DNA, 195 bp, Homo sapiens; identical to SEQ ID NO: 1571

SEQ ID NO: 5844 - DNA, 156 bp, Homo sapiens; identical to SEQ ID NO: 1572

SEQ ID NO: 5845 - DNA, 198 bp, Homo sapiens; identical to SEQ ID NO: 1573

SEQ ID NO: 5846 - DNA, 198 bp, Homo sapiens; identical to SEQ ID NO: 1573

SEQ ID NO: 5847 - DNA, 405 bp, Homo sapiens; identical to SEQ ID NO: 1575

SEQ ID NO: 5848 - DNA, 1400 bp, Homo sapiens; identical to SEQ ID NO: 1576

SEQ ID NO: 5849 - DNA, 1400 bp, Homo sapiens; identical to SEQ ID NO: 1576

SEQ ID NO: 5850 - DNA, 1400 bp, Homo sapiens; identical to SEQ ID NO: 1578

SEQ ID NO: 5851 - DNA, 1400 bp, Homo sapiens; identical to SEQ ID NO: 1578

SEQ ID NO: 5852 - DNA, 1091 bp, Homo sapiens; identical to SEQ ID NO: 1580
  misc_feature (1082)..(1082): n is a, c, g, or t

SEQ ID NO: 5853 - DNA, 1091 bp, Homo sapiens; identical to SEQ ID NO: 1580
  misc_feature (1082)..(1082): n is a, c, g, or t

SEQ ID NO: 5854 - DNA, 1400 bp, Homo sapiens; identical to SEQ ID NO: 1582
  misc_feature (677)..(677): n is a, c, g, or t

SEQ ID NO: 5855 - DNA, 1400 bp, Homo sapiens; identical to SEQ ID NO: 1582
  misc_feature (677)..(677): n is a, c, g, or t

SEQ ID NO: 5856 - DNA, 382 bp, Homo sapiens; identical to SEQ ID NO: 1584

SEQ ID NO: 5857 - DNA, 382 bp, Homo sapiens; identical to SEQ ID NO: 1584

SEQ ID NO: 5858 - DNA, 1400 bp, Homo sapiens; identical to SEQ ID NO: 1586

SEQ ID NO: 5859 - DNA, 1400 bp, Homo sapiens; identical to SEQ ID NO: 1586

SEQ ID NO: 5860 - DNA, 1400 bp, Homo sapiens; identical to SEQ ID NO: 1588

SEQ ID NO: 5861 - DNA, 600 bp, Homo sapiens; identical to SEQ ID NO: 1589

SEQ ID NO: 5862 - DNA, 600 bp, Homo sapiens; identical to SEQ ID NO: 1589

SEQ ID NO: 5863 - DNA, 600 bp, Homo sapiens; identical to SEQ ID NO: 1591

SEQ ID NO: 5864 - DNA, 600 bp, Homo sapiens; identical to SEQ ID NO: 1591

SEQ ID NO: 5865 - DNA, 406 bp, Homo sapiens; identical to SEQ ID NO: 1593

SEQ ID NO: 5866 - DNA, 362 bp, Homo sapiens; identical to SEQ ID NO: 1594

SEQ ID NO: 5867 - DNA, 362 bp, Homo sapiens; identical to SEQ ID NO: 1594

SEQ ID NO: 5868 - DNA, 600 bp, Homo sapiens; identical to SEQ ID NO: 1596

SEQ ID NO: 5869 - DNA, 600 bp, Homo sapiens; identical to SEQ ID NO: 1596

SEQ ID NO: 5870 - DNA, 1400 bp, Homo sapiens; identical to SEQ ID NO: 1598

SEQ ID NO: 5871 - DNA, 1400 bp, Homo sapiens; identical to SEQ ID NO: 1598

SEQ ID NO: 5872 - DNA, 1400 bp, Homo sapiens; identical to SEQ ID NO: 1600

SEQ ID NO: 5873 - DNA, 600 bp, Homo sapiens; identical to SEQ ID NO: 1601

SEQ ID NO: 5874 - DNA, 600 bp, Homo sapiens; identical to SEQ ID NO: 1601

SEQ ID NO: 5875 - DNA, 600 bp, Homo sapiens; identical to SEQ ID NO: 1603

SEQ ID NO: 5876 - DNA, 600 bp, Homo sapiens; identical to SEQ ID NO: 1604

SEQ ID NO: 5877 - DNA, 738 bp, Homo sapiens; identical to SEQ ID NO: 1605

SEQ ID NO: 5878 - DNA, 738 bp, Homo sapiens; identical to SEQ ID NO: 1605

SEQ ID NO: 5879 - DNA, 600 bp, Homo sapiens; identical to SEQ ID NO: 1607

SEQ ID NO: 5880 - DNA, 600 bp, Homo sapiens; identical to SEQ ID NO: 1607

SEQ ID NO: 5881 - DNA, 600 bp, Homo sapiens; identical to SEQ ID NO: 1609

SEQ ID NO: 5882 - DNA, 600 bp, Homo sapiens; identical to SEQ ID NO: 1609

SEQ ID NO: 5883 - DNA, 600 bp, Homo sapiens; identical to SEQ ID NO: 1611

SEQ ID NO: 5884 - DNA, 600 bp, Homo sapiens; identical to SEQ ID NO: 1612

SEQ ID NO: 5885 - DNA, 600 bp, Homo sapiens; identical to SEQ ID NO: 1612

SEQ ID NO: 5886 - DNA, 301 bp, Homo sapiens; identical to SEQ ID NO: 1614

SEQ ID NO: 5887 - DNA, 600 bp, Homo sapiens; identical to SEQ ID NO: 1615

SEQ ID NO: 5888 - DNA, 600 bp, Homo sapiens; identical to SEQ ID NO: 1615

SEQ ID NO: 5889 - DNA, 1400 bp, Homo sapiens; identical to SEQ ID NO: 1617

SEQ ID NO: 5890 - DNA, 1400 bp, Homo sapiens; identical to SEQ ID NO: 1617

SEQ ID NO: 5891 - DNA, 600 bp, Homo sapiens; identical to SEQ ID NO: 1619

SEQ ID NO: 5892 - DNA, 600 bp, Homo sapiens; identical to SEQ ID NO: 1620

SEQ ID NO: 5893 - DNA, 600 bp, Homo sapiens; identical to SEQ ID NO: 1620

SEQ ID NO: 5894 - DNA, 600 bp, Homo sapiens; identical to SEQ ID NO: 1622

SEQ ID NO: 5895 - DNA, 600 bp, Homo sapiens; identical to SEQ ID NO: 1622

SEQ ID NO: 5896 - DNA, 280 bp, Homo sapiens; identical to SEQ ID NO: 1624
  misc_feature (124)..(125): n is a, c, g, or t
  misc_feature (137)..(137): n is a, c, g, or t
  misc_feature (146)..(146): n is a, c, g, or t
  misc_feature (154)..(154): n is a, c, g, or t
  misc_feature (156)..(156): n is a, c, g, or t
  misc_feature (159)..(159): n is a, c, g, or t
  misc_feature (161)..(161): n is a, c, g, or t
  misc_feature (163)..(163): n is a, c, g, or t
  misc_feature (174)..(174): n is a, c, g, or t
  misc_feature (177)..(177): n is a, c, g, or t
  misc_feature (181)..(181): n is a, c, g, or t
  misc_feature (185)..(185): n is a, c, g, or t
  misc_feature (188)..(188): n is a, c, g, or t
  misc_feature (190)..(191): n is a, c, g, or t
  misc_feature (196)..(196): n is a, c, g, or t
  misc_feature (198)..(198): n is a, c, g, or t
  misc_feature (203)..(203): n is a, c, g, or t
  misc_feature (212)..(212): n is a, c, g, or t
  misc_feature (214)..(215): n is a, c, g, or t
  misc_feature (218)..(219): n is a, c, g, or t
  misc_feature (221)..(223): n is a, c, g, or t
  misc_feature (225)..(226): n is a, c, g, or t
  misc_feature (228)..(230): n is a, c, g, or t
  misc_feature (238)..(238): n is a, c, g, or t
  misc_feature (240)..(240): n is a, c, g, or t
  misc_feature (242)..(243): n is a, c, g, or t
  misc_feature (246)..(246): n is a, c, g, or t
  misc_feature (250)..(250): n is a, c, g, or t
  misc_feature (254)..(257): n is a, c, g, or t
  misc_feature (260)..(260): n is a, c, g, or t
  misc_feature (264)..(264): n is a, c, g, or t
  misc_feature (266)..(268): n is a, c, g, or t
  misc_feature (274)..(274): n is a, c, g, or t

SEQ ID NO: 5897 - DNA, 280 bp, Homo sapiens; identical to SEQ ID NO: 1624
  misc_feature (124)..(125): n is a, c, g, or t
  misc_feature (137)..(137): n is a, c, g, or t
  misc_feature (146)..(146): n is a, c, g, or t
  misc_feature (154)..(154): n is a, c, g, or t
  misc_feature (156)..(156): n is a, c, g, or t
  misc_feature (159)..(159): n is a, c, g, or t
  misc_feature (161)..(161): n is a, c, g, or t
  misc_feature (163)..(163): n is a, c, g, or t
  misc_feature (174)..(174): n is a, c, g, or t
  misc_feature (177)..(177): n is a, c, g, or t
  misc_feature (181)..(181): n is a, c, g, or t
  misc_feature (185)..(185): n is a, c, g, or t
  misc_feature (188)..(188): n is a, c, g, or t
  misc_feature (190)..(191): n is a, c, g, or t
  misc_feature (196)..(196): n is a, c, g, or t
  misc_feature (198)..(198): n is a, c, g, or t
  misc_feature (203)..(203): n is a, c, g, or t
  misc_feature (212)..(212): n is a, c, g, or t
  misc_feature (214)..(215): n is a, c, g, or t
  misc_feature (218)..(219): n is a, c, g, or t
  misc_feature (221)..(223): n is a, c, g, or t
  misc_feature (225)..(226): n is a, c, g, or t
  misc_feature (228)..(230): n is a, c, g, or t
  misc_feature (238)..(238): n is a, c, g, or t
  misc_feature (240)..(240): n is a, c, g, or t
  misc_feature (242)..(243): n is a, c, g, or t
  misc_feature (246)..(246): n is a, c, g, or t
  misc_feature (250)..(250): n is a, c, g, or t
  misc_feature (254)..(257): n is a, c, g, or t
  misc_feature (260)..(260): n is a, c, g, or t
  misc_feature (264)..(264): n is a, c, g, or t
  misc_feature (266)..(268): n is a, c, g, or t
  misc_feature (274)..(274): n is a, c, g, or t

SEQ ID NO: 5898 - DNA, 281 bp, Homo sapiens; identical to SEQ ID NO: 1626
  misc_feature (117)..(117): n is a, c, g, or t
  misc_feature (123)..(123): n is a, c, g, or t
  misc_feature (135)..(136): n is a, c, g, or t
  misc_feature (145)..(145): n is a, c, g, or t
  misc_feature (151)..(151): n is a, c, g, or t
  misc_feature (153)..(153): n is a, c, g, or t
  misc_feature (171)..(171): n is a, c, g, or t
  misc_feature (180)..(181): n is a, c, g, or t
  misc_feature (192)..(192): n is a, c, g, or t
  misc_feature (194)..(194): n is a, c, g, or t
  misc_feature (198)..(198): n is a, c, g, or t
  misc_feature (221)..(221): n is a, c, g, or t
  misc_feature (223)..(223): n is a, c, g, or t
  misc_feature (225)..(226): n is a, c, g, or t
  misc_feature (228)..(228): n is a, c, g, or t
  misc_feature (231)..(232): n is a, c, g, or t
  misc_feature (234)..(235): n is a, c, g, or t
  misc_feature (237)..(238): n is a, c, g, or t
  misc_feature (243)..(243): n is a, c, g, or t
  misc_feature (247)..(247): n is a, c, g, or t
  misc_feature (249)..(249): n is a, c, g, or t
  misc_feature (255)..(256): n is a, c, g, or t
  misc_feature (258)..(258): n is a, c, g, or t
  misc_feature (263)..(263): n is a, c, g, or t
  misc_feature (267)..(267): n is a, c, g, or t
  misc_feature (274)..(275): n is a, c, g, or t

SEQ ID NO: 5899 - DNA, 300 bp, Homo sapiens; identical to SEQ ID NO: 1627

SEQ ID NO: 5900 - DNA, 300 bp, Homo sapiens; identical to SEQ ID NO: 1627

SEQ ID NO: 5901 - DNA, 600 bp, Homo sapiens; identical to SEQ ID NO: 1629
  misc_feature (447)..(447): n is a, c, g, or t
  misc_feature (453)..(453): n is a, c, g, or t
  misc_feature (480)..(480): n is a, c, g, or t
  misc_feature (485)..(485): n is a, c, g, or t
  misc_feature (505)..(505): n is a, c, g, or t
  misc_feature (516)..(516): n is a, c, g, or t
  misc_feature (523)..(524): n is a, c, g, or t
  misc_feature (548)..(549): n is a, c, g, or t
  misc_feature (551)..(551): n is a, c, g, or t
  misc_feature (560)..(560): n is a, c, g, or t
  misc_feature (568)..(568): n is a, c, g, or t
  misc_feature (581)..(581): n is a, c, g, or t
  misc_feature (583)..(583): n is a, c, g, or t
  misc_feature (585)..(585): n is a, c, g, or t
  misc_feature (587)..(587): n is a, c, g, or t

SEQ ID NO: 5902 - DNA, 600 bp, Homo sapiens; identical to SEQ ID NO: 1629
  misc_feature (447)..(447): n is a, c, g, or t
  misc_feature (453)..(453): n is a, c, g, or t
  misc_feature (480)..(480): n is a, c, g, or t
  misc_feature (485)..(485): n is a, c, g, or t
  misc_feature (505)..(505): n is a, c, g, or t
  misc_feature (516)..(516): n is a, c, g, or t
  misc_feature (523)..(524): n is a, c, g, or t
  misc_feature (548)..(549): n is a, c, g, or t
  misc_feature (551)..(551): n is a, c, g, or t
  misc_feature (560)..(560): n is a, c, g, or t
  misc_feature (568)..(568): n is a, c, g, or t
  misc_feature (581)..(581): n is a, c, g, or t
  misc_feature (583)..(583): n is a, c, g, or t
  misc_feature (585)..(585): n is a, c, g, or t
  misc_feature (587)..(587): n is a, c, g, or t

SEQ ID NO: 5903 - DNA, 600 bp, Homo sapiens; identical to SEQ ID NO: 1631
  misc_feature (2)..(2): n is a, c, g, or t
  misc_feature (5)..(5): n is a, c, g, or t
  misc_feature (10)..(10): n is a, c, g, or t
  misc_feature (29)..(29): n is a, c, g, or t
  misc_feature (37)..(37): n is a, c, g, or t
  misc_feature (59)..(59): n is a, c, g, or t
  misc_feature (63)..(63): n is a, c, g, or t
  misc_feature (78)..(78): n is a, c, g, or t
  misc_feature (154)..(154): n is a, c, g, or t
  misc_feature (163)..(163): n is a, c, g, or t
  misc_feature (175)..(175): n is a, c, g, or t
  misc_feature (182)..(183): n is a, c, g, or t
  misc_feature (188)..(188): n is a, c, g, or t
  misc_feature (197)..(197): n is a, c, g, or t
  misc_feature (217)..(217): n is a, c, g, or t
  misc_feature (219)..(219): n is a, c, g, or t
  misc_feature (224)..(224): n is a, c, g, or t
  misc_feature (231)..(231): n is a, c, g, or t
  misc_feature (245)..(245): n is a, c, g, or t
  misc_feature (260)..(260): n is a, c, g, or t
  misc_feature (262)..(262): n is a, c, g, or t
  misc_feature (278)..(278): n is a, c, g, or t
  misc_feature (288)..(288): n is a, c, g, or t
  misc_feature (309)..(309): n is a, c, g, or t
  misc_feature (327)..(327): n is a, c, g, or t
  misc_feature (341)..(341): n is a, c, g, or t
  misc_feature (357)..(357): n is a, c, g, or t
  misc_feature (361)..(361): n is a, c, g, or t
  misc_feature (378)..(378): n is a, c, g, or t
  misc_feature (380)..(380): n is a, c, g, or t
  misc_feature (386)..(387): n is a, c, g, or t
  misc_feature (394)..(394): n is a, c, g, or t
  misc_feature (400)..(400): n is a, c, g, or t
  misc_feature (407)..(407): n is a, c, g, or t
  misc_feature (410)..(411): n is a, c, g, or t
  misc_feature (420)..(420): n is a, c, g, or t
  misc_feature (428)..(428): n is a, c, g, or t
  misc_feature (448)..(448): n is a, c, g, or t
  misc_feature (463)..(463): n is a, c, g, or t
  misc_feature (471)..(471): n is a, c, g, or t
  misc_feature (487)..(487): n is a, c, g, or t
  misc_feature (490)..(490): n is a, c, g, or t
  misc_feature (510)..(510): n is a, c, g, or t
  misc_feature (523)..(523): n is a, c, g, or t
  misc_feature (548)..(548): n is a, c, g, or t
  misc_feature (567)..(567): n is a, c, g, or t
  misc_feature (578)..(579): n is a, c, g, or t
  misc_feature (585)..(585): n is a, c, g, or t
  misc_feature (587)..(587): n is a, c, g, or t
  misc_feature (597)..(597): n is a, c, g, or t

SEQ ID NO: 5904 - DNA, 538 bp, Homo sapiens; identical to SEQ ID NO: 1632
  misc_feature (336)..(336): n is a, c, g, or t
  misc_feature (485)..(485): n is a, c, g, or t

SEQ ID NO: 5905 - DNA, 424 bp, Homo sapiens; identical to SEQ ID NO: 1633

SEQ ID NO: 5906 - DNA, 1400 bp, Homo sapiens; identical to SEQ ID NO: 1634

SEQ ID NO: 5907 - DNA, 1400 bp, Homo sapiens; identical to SEQ ID NO: 1634

SEQ ID NO: 5908 - DNA, 1400 bp, Homo sapiens; identical to SEQ ID NO: 1636

SEQ ID NO: 5909 - DNA, 600 bp, Homo sapiens; identical to SEQ ID NO: 1637

SEQ ID NO: 5910 - DNA, 118 bp, Homo sapiens; identical to SEQ ID NO: 1638

SEQ ID NO: 5911 - DNA, 118 bp, Homo sapiens; identical to SEQ ID NO: 1638

SEQ ID NO: 5912 - DNA, 110 bp, Homo sapiens; identical to SEQ ID NO: 1640

SEQ ID NO: 5913 - DNA, 1400 bp, Homo sapiens; identical to SEQ ID NO: 1641

SEQ ID NO: 5914 - DNA, 1400 bp, Homo sapiens; identical to SEQ ID NO: 1642
  misc_feature (290)..(290): n is a, c, g, or t
  misc_feature (293)..(293): n is a, c, g, or t

SEQ ID NO: 5915 - DNA, 600 bp, Homo sapiens; identical to SEQ ID NO: 1643

SEQ ID NO: 5916 - DNA, 600 bp, Homo sapiens; identical to SEQ ID NO: 1643

SEQ ID NO: 5917 - DNA, 600 bp, Homo sapiens; identical to SEQ ID NO: 1645

SEQ ID NO: 5918 - DNA, 600 bp, Homo sapiens; identical to SEQ ID NO: 1645

SEQ ID NO: 5919 - DNA, 600 bp, Homo sapiens; identical to SEQ ID NO: 1647

SEQ ID NO: 5920 - DNA, 600 bp, Homo sapiens; identical to SEQ ID NO: 1647

SEQ ID NO: 5921 - DNA, 295 bp, Homo sapiens; identical to SEQ ID NO: 1649

SEQ ID NO: 5922 - DNA, 295 bp, Homo sapiens; identical to SEQ ID NO: 1649

SEQ ID NO: 5923 - DNA, 1400 bp, Homo sapiens; identical to SEQ ID NO: 1651

SEQ ID NO: 5924 - DNA, 1400 bp, Homo sapiens; identical to SEQ ID NO: 1652

SEQ ID NO: 5925 - DNA, 1400 bp, Homo sapiens; identical to SEQ ID NO: 1652

SEQ ID NO: 5926 - DNA, 235 bp, Homo sapiens; identical to SEQ ID NO: 1654
  misc_feature (44)..(44): n is a, c, g, or t
  misc_feature (51)..(51): n is a, c, g, or t
  misc_feature (63)..(63): n is a, c, g, or t
  misc_feature (82)..(82): n is a, c, g, or t
  misc_feature (129)..(129): n is a, c, g, or t
  misc_feature (153)..(153): n is a, c, g, or t
  misc_feature (161)..(161): n is a, c, g, or t
  misc_feature (197)..(197): n is a, c, g, or t
  misc_feature (199)..(200): n is a, c, g, or t
  misc_feature (217)..(217): n is a, c, g, or t
  misc_feature (224)..(224): n is a, c, g, or t
  misc_feature (231)..(231): n is a, c, g, or t

SEQ ID NO: 5927 - DNA, 600 bp, Homo sapiens; identical to SEQ ID NO: 1655
  misc_feature (7)..(7): n is a, c, g, or t
  misc_feature (20)..(21): n is a, c, g, or t
  misc_feature (40)..(40): n is a, c, g, or t
  misc_feature (59)..(59): n is a, c, g, or t
  misc_feature (136)..(136): n is a, c, g, or t
  misc_feature (235)..(235): n is a, c, g, or t
  misc_feature (266)..(266): n is a, c, g, or t
  misc_feature (277)..(277): n is a, c, g, or t
  misc_feature (279)..(279): n is a, c, g, or t
  misc_feature (284)..(284): n is a, c, g, or t
  misc_feature (295)..(296): n is a, c, g, or t
  misc_feature (302)..(302): n is a, c, g, or t
  misc_feature (327)..(327): n is a, c, g, or t
  misc_feature (338)..(338): n is a, c, g, or t
  misc_feature (376)..(376): n is a, c, g, or t
  misc_feature (385)..(385): n is a, c, g, or t
  misc_feature (388)..(388): n is a, c, g, or t
  misc_feature (404)..(404): n is a, c, g, or t
  misc_feature (421)..(422): n is a, c, g, or t
  misc_feature (439)..(439): n is a, c, g, or t
  misc_feature (441)..(441): n is a, c, g, or t
  misc_feature (444)..(444): n is a, c, g, or t
  misc_feature (452)..(452): n is a, c, g, or t
  misc_feature (454)..(454): n is a, c, g, or t
  misc_feature (464)..(464): n is a, c, g, or t
  misc_feature (469)..(469): n is a, c, g, or t
  misc_feature (474)..(474): n is a, c, g, or t
  misc_feature (482)..(482): n is a, c, g, or t
  misc_feature (484)..(484): n is a, c, g, or t
  misc_feature (488)..(489): n is a, c, g, or t
  misc_feature (491)..(491): n is a, c, g, or t
  misc_feature (493)..(493): n is a, c, g, or t
  misc_feature (505)..(505): n is a, c, g, or t
  misc_feature (508)..(508): n is a, c, g, or t
  misc_feature (512)..(513): n is a, c, g, or t
  misc_feature (519)..(522): n is a, c, g, or t
  misc_feature (528)..(528): n is a, c, g, or t
  misc_feature (530)..(530): n is a, c, g, or t
  misc_feature (538)..(538): n is a, c, g, or t
  misc_feature (542)..(542): n is a, c, g, or t
  misc_feature (547)..(547): n is a, c, g, or t
  misc_feature (559)..(559): n is a, c, g, or t
  misc_feature (563)..(565): n is a, c, g, or t
  misc_feature (571)..(571): n is a, c, g, or t
  misc_feature (573)..(573): n is a, c, g, or t
  misc_feature (576)..(576): n is a, c, g, or t
  misc_feature (584)..(586): n is a, c, g, or t
  misc_feature (595)..(595): n is a, c, g, or t
  misc_feature (597)..(597): n is a, c, g, or t

SEQ ID NO: 5928 - DNA, 218 bp, Homo sapiens; identical to SEQ ID NO: 1656
  misc_feature (27)..(27): n is a, c, g, or t
  misc_feature (50)..(50): n is a, c, g, or t
  misc_feature (172)..(172): n is a, c, g, or t

SEQ ID NO: 5929 - DNA, 600 bp, Homo sapiens; identical to SEQ ID NO: 1657

SEQ ID NO: 5930 - DNA, 1023 bp, Homo sapiens; identical to SEQ ID NO: 1658

SEQ ID NO: 5931 - DNA, 1400 bp, Homo sapiens; identical to SEQ ID NO: 1659

SEQ ID NO: 5932 - DNA, 600 bp, Homo sapiens; identical to SEQ ID NO: 1660

SEQ ID NO: 5933 - DNA, 600 bp, Homo sapiens; identical to SEQ ID NO: 1660

SEQ ID NO: 5934 - DNA, 1326 bp, Homo sapiens; identical to SEQ ID NO: 1662

SEQ ID NO: 5935 - DNA, 915 bp, Homo sapiens; identical to SEQ ID NO: 1663

SEQ ID NO: 5936 - DNA, 915 bp, Homo sapiens; identical to SEQ ID NO: 1663

SEQ ID NO: 5937 - DNA, 1400 bp, Homo sapiens; identical to SEQ ID NO: 1665

SEQ ID NO: 5938 - DNA, 600 bp, Homo sapiens; identical to SEQ ID NO: 1666

SEQ ID NO: 5939 - DNA, 600 bp, Homo sapiens; identical to SEQ ID NO: 1667

SEQ ID NO: 5940 - DNA, 1400 bp, Homo sapiens; identical to SEQ ID NO: 1668

SEQ ID NO: 5941 - DNA, 1400 bp, Homo sapiens; identical to SEQ ID NO: 1668

SEQ ID NO: 5942 - DNA, 600 bp, Homo sapiens; identical to SEQ ID NO: 1670
  misc_feature (452)..(452): n is a, c, g, or t
  misc_feature (457)..(457): n is a, c, g, or t
  misc_feature (474)..(474): n is a, c, g, or t
  misc_feature (546)..(546): n is a, c, g, or t

SEQ ID NO: 5943 - DNA, 600 bp, Homo sapiens; identical to SEQ ID NO: 1670
  misc_feature (452)..(452): n is a, c, g, or t
  misc_feature (457)..(457): n is a, c, g, or t
  misc_feature (474)..(474): n is a, c, g, or t
  misc_feature (546)..(546): n is a, c, g, or t

SEQ ID NO: 5944 - DNA, 1400 bp, Homo sapiens; identical to SEQ ID NO: 1672

SEQ ID NO: 5945 - DNA, 1400 bp, Homo sapiens; identical to SEQ ID NO: 1672

SEQ ID NO: 5946 - DNA, 470 bp, Homo sapiens; identical to SEQ ID NO: 1674
  misc_feature (447)..(447): n is a, c, g, or t
  misc_feature (459)..(459): n is a, c, g, or t
  misc_feature (462)..(467): n is a, c, g, or t

SEQ ID NO: 5947 - DNA, 1400 bp, Homo sapiens; identical to SEQ ID NO: 1675

SEQ ID NO: 5948 - DNA, 600 bp, Homo sapiens; identical to SEQ ID NO: 1676

SEQ ID NO: 5949 - DNA, 1400 bp, Homo sapiens; identical to SEQ ID NO: 1677

SEQ ID NO: 5950 - DNA, 1400 bp, Homo sapiens; identical to SEQ ID NO: 1677

SEQ ID NO: 5951 - DNA, 1400 bp, Homo sapiens; identical to SEQ ID NO: 1679

SEQ ID NO: 5952 - DNA, 600 bp, Homo sapiens; identical to SEQ ID NO: 1680

SEQ ID NO: 5953 - DNA, 600 bp, Homo sapiens; identical to SEQ ID NO: 1680

SEQ ID NO: 5954 - DNA, 1400 bp, Homo sapiens; identical to SEQ ID NO: 1682

SEQ ID NO: 5955 - DNA, 1400 bp, Homo sapiens; identical to SEQ ID NO: 1682

SEQ ID NO: 5956 - DNA, 422 bp, Homo sapiens; identical to SEQ ID NO: 1684

SEQ ID NO: 5957 - DNA, 600 bp, Homo sapiens; identical to SEQ ID NO: 1685

SEQ ID NO: 5958 - DNA, 600 bp, Homo sapiens; identical to SEQ ID NO: 1685

SEQ ID NO: 5959 - DNA, 600 bp, Homo sapiens; identical to SEQ ID NO: 1687

SEQ ID NO: 5960 - DNA, 600 bp, Homo sapiens; identical to SEQ ID NO: 1688

SEQ ID NO: 5961 - DNA, 600 bp, Homo sapiens; identical to SEQ ID NO: 1688

SEQ ID NO: 5962 - DNA, 600 bp, Homo sapiens; identical to SEQ ID NO: 1690

SEQ ID NO: 5963 - DNA, 600 bp, Homo sapiens; identical to SEQ ID NO: 1691

SEQ ID NO: 5964 - DNA, 600 bp, Homo sapiens; identical to SEQ ID NO: 1691

SEQ ID NO: 5965 - DNA, 1400 bp, Homo sapiens; identical to SEQ ID NO: 1693

SEQ ID NO: 5966 - DNA, 1400 bp, Homo sapiens; identical to SEQ ID NO: 1693

SEQ ID NO: 5967 - DNA, 350 bp, Homo sapiens; identical to SEQ ID NO: 1695

SEQ ID NO: 5968 - DNA, 600 bp, Homo sapiens; identical to SEQ ID NO: 1696
  misc_feature (363)..(363): n is a, c, g, or t

SEQ ID NO: 5969 - DNA, 600 bp, Homo sapiens; identical to SEQ ID NO: 1696
  misc_feature (363)..(363): n is a, c, g, or t

SEQ ID NO: 5970 - DNA, 600 bp, Homo sapiens; identical to SEQ ID NO: 1698

SEQ ID NO: 5971 - DNA, 600 bp, Homo sapiens; identical to SEQ ID NO: 1699

SEQ ID NO: 5972 - DNA, 600 bp, Homo sapiens; identical to SEQ ID NO: 1699

SEQ ID NO: 5973 - DNA, 600 bp, Homo sapiens; identical to SEQ ID NO: 1701

SEQ ID NO: 5974 - DNA, 600 bp, Homo sapiens; identical to SEQ ID NO: 1702

SEQ ID NO: 5975 - DNA, 600 bp, Homo sapiens; identical to SEQ ID NO: 1702

SEQ ID NO: 5976 - DNA, 600 bp, Homo sapiens; identical to SEQ ID NO: 1704

SEQ ID NO: 5977 - DNA, 600 bp, Homo sapiens; identical to SEQ ID NO: 1705

SEQ ID NO: 5978 - DNA, 600 bp, Homo sapiens; identical to SEQ ID NO: 1706

SEQ ID NO: 5979 - DNA, 600 bp, Homo sapiens; identical to SEQ ID NO: 1706

SEQ ID NO: 5980 - DNA, 600 bp, Homo sapiens; identical to SEQ ID NO: 1708

SEQ ID NO: 5981 - DNA, 487 bp, Homo sapiens; identical to SEQ ID NO: 1709

SEQ ID NO: 5982 - DNA, 487 bp, Homo sapiens; identical to SEQ ID NO: 1709

SEQ ID NO: 5983 - DNA, 487 bp, Homo sapiens; identical to SEQ ID NO: 1711

SEQ ID NO: 5984 - DNA, 487 bp, Homo sapiens; identical to SEQ ID NO: 1711

SEQ ID NO: 5985 - DNA, 487 bp, Homo sapiens; identical to SEQ ID NO: 1713

SEQ ID NO: 5986 - DNA, 487 bp, Homo sapiens; identical to SEQ ID NO: 1713

SEQ ID NO: 5987 - DNA, 1400 bp, Homo sapiens; identical to SEQ ID NO: 1715

SEQ ID NO: 5988 - DNA, 1400 bp, Homo sapiens; identical to SEQ ID NO: 1716

SEQ ID NO: 5989 - DNA, 1400 bp, Homo sapiens; identical to SEQ ID NO: 1716

SEQ ID NO: 5990 - DNA, 600 bp, Homo sapiens; identical to SEQ ID NO: 1718

SEQ ID NO: 5991 - DNA, 600 bp, Homo sapiens; identical to SEQ ID NO: 1719

SEQ ID NO: 5992 - DNA, 600 bp, Homo sapiens; identical to SEQ ID NO: 1720

SEQ ID NO: 5993 - DNA, 600 bp, Homo sapiens; identical to SEQ ID NO: 1720

SEQ ID NO: 5994 - DNA, 600 bp, Homo sapiens; identical to SEQ ID NO: 1722
  misc_feature (309)..(309): n is a, c, g, or t
  misc_feature (321)..(341): n is a, c, g, or t
  misc_feature (367)..(367): n is a, c, g, or t
  misc_feature (394)..(394): n is a, c, g, or t
  misc_feature (400)..(400): n is a, c, g, or t
  misc_feature (541)..(541): n is a, c, g, or t

SEQ ID NO: 5995 - DNA, 600 bp, Homo sapiens; identical to SEQ ID NO: 1722
  misc_feature (309)..(309): n is a, c, g, or t
  misc_feature (321)..(341): n is a, c, g, or t
  misc_feature (367)..(367): n is a, c, g, or t
  misc_feature (394)..(394): n is a, c, g, or t
  misc_feature (400)..(400): n is a, c, g, or t
  misc_feature (541)..(541): n is a, c, g, or t

SEQ ID NO: 5996 - DNA, 600 bp, Homo sapiens; identical to SEQ ID NO: 1724

SEQ ID NO: 5997 - DNA, 600 bp, Homo sapiens; identical to SEQ ID NO: 1724

SEQ ID NO: 5998 - DNA, 570 bp, Homo sapiens; identical to SEQ ID NO: 1726

SEQ ID NO: 5999 - DNA, 570 bp, Homo sapiens; identical to SEQ ID NO: 1726

SEQ ID NO: 6000 - DNA, 526 bp, Homo sapiens; identical to SEQ ID NO: 1728

SEQ ID NO: 6001 - DNA, 600 bp, Homo sapiens; identical to SEQ ID NO: 1729

SEQ ID NO: 6002 - DNA, 600 bp, Homo sapiens; identical to SEQ ID NO: 1729

SEQ ID NO: 6003 - DNA, 1277 bp, Homo sapiens; identical to SEQ ID NO: 1731

SEQ ID NO: 6004 - DNA, 1286 bp, Homo sapiens; identical to SEQ ID NO: 1732

SEQ ID NO: 6005 - DNA, 600 bp, Homo sapiens; identical to SEQ ID NO: 1733

SEQ ID NO: 6006 - DNA, 600 bp, Homo sapiens; identical to SEQ ID NO: 1733

SEQ ID NO: 6007 - DNA, 600 bp, Homo sapiens; identical to SEQ ID NO: 1735

SEQ ID NO: 6008 - DNA, 600 bp, Homo sapiens; identical to SEQ ID NO: 1735

SEQ ID NO: 6009 - DNA, 600 bp, Homo sapiens; identical to SEQ ID NO: 1737

SEQ ID NO: 6010 - DNA, 600 bp, Homo sapiens; identical to SEQ ID NO: 1737

SEQ ID NO: 6011 - DNA, 1038 bp, Homo sapiens; identical to SEQ ID NO: 1739

SEQ ID NO: 6012 - DNA, 600 bp, Homo sapiens; identical to SEQ ID NO: 1740

SEQ ID NO: 6013 - DNA, 600 bp, Homo sapiens; identical to SEQ ID NO: 1741

SEQ ID NO: 6014 - DNA, 600 bp, Homo sapiens; identical to SEQ ID NO: 1741

SEQ ID NO: 6015 - DNA, 600 bp, Homo sapiens; identical to SEQ ID NO: 1743

SEQ ID NO: 6016 - DNA, 600 bp, Homo sapiens; identical to SEQ ID NO: 1743

SEQ ID NO: 6017 - DNA, 600 bp, Homo sapiens; identical to SEQ ID NO: 1745

SEQ ID NO: 6018 - DNA, 600 bp, Homo sapiens; identical to SEQ ID NO: 1745

SEQ ID NO: 6019 - DNA, 600 bp, Homo sapiens; identical to SEQ ID NO: 1747

SEQ ID NO: 6020 - DNA, 600 bp, Homo sapiens; identical to SEQ ID NO: 1747

SEQ ID NO: 6021 - DNA, 600 bp, Homo sapiens; identical to SEQ ID NO: 1749

SEQ ID NO: 6022 - DNA, 600 bp, Homo sapiens; identical to SEQ ID NO: 1749

SEQ ID NO: 6023 - DNA, 600 bp, Homo sapiens; identical to SEQ ID NO: 1751

SEQ ID NO: 6024 - DNA, 600 bp, Homo sapiens; identical to SEQ ID NO: 1751

SEQ ID NO: 6025 - DNA, 492 bp, Homo sapiens; identical to SEQ ID NO: 1753
  misc_feature (450)..(450): n is a, c, g, or t

SEQ ID NO: 6026 - DNA, 492 bp, Homo sapiens; identical to SEQ ID NO: 1753
  misc_feature (450)..(450): n is a, c, g, or t

SEQ ID NO: 6027 - DNA, 600 bp, Homo sapiens; identical to SEQ ID NO: 1755

SEQ ID NO: 6028 - DNA, 600 bp, Homo sapiens; identical to SEQ ID NO: 1755

SEQ ID NO: 6029 - DNA, 600 bp, Homo sapiens; identical to SEQ ID NO: 1757

SEQ ID NO: 6030 - DNA, 600 bp, Homo sapiens; identical to SEQ ID NO: 1758

SEQ ID NO: 6031 - DNA, 600 bp, Homo sapiens; identical to SEQ ID NO: 1758

SEQ ID NO: 6032 - DNA, 1400 bp, Homo sapiens; identical to SEQ ID NO: 1760

SEQ ID NO: 6033 - DNA, 600 bp, Homo sapiens; identical to SEQ ID NO: 1761

SEQ ID NO: 6034 - DNA, 1400 bp, Homo sapiens; identical to SEQ ID NO: 1762

SEQ ID NO: 6035 - DNA, 600 bp, Homo sapiens; identical to SEQ ID NO: 1763

SEQ ID NO: 6036 - DNA, 600 bp, Homo sapiens; identical to SEQ ID NO: 1764

SEQ ID NO: 6037 - DNA, 600 bp, Homo sapiens; identical to SEQ ID NO: 1764

SEQ ID NO: 6038 - DNA, 600 bp, Homo sapiens; identical to SEQ ID NO: 1766

SEQ ID NO: 6039 - DNA, 600 bp, Homo sapiens; identical to SEQ ID NO: 1766

SEQ ID NO: 6040 - DNA, 600 bp, Homo sapiens; identical to SEQ ID NO: 1768

SEQ ID NO: 6041 - DNA, 600 bp, Homo sapiens; identical to SEQ ID NO: 1768

SEQ ID NO: 6042 - DNA, 1400 bp, Homo sapiens; identical to SEQ ID NO: 1770

SEQ ID NO: 6043 - DNA, 1400 bp, Homo sapiens; identical to SEQ ID NO: 1770

SEQ ID NO: 6044 - DNA, 600 bp, Homo sapiens; identical to SEQ ID NO: 1772

SEQ ID NO: 6045 - DNA, 1400 bp, Homo sapiens; identical to SEQ ID NO: 1773

SEQ ID NO: 6046 - DNA, 1400 bp, Homo sapiens; identical to SEQ ID NO: 1773

SEQ ID NO: 6047 - DNA, 1400 bp, Homo sapiens; identical to SEQ ID NO: 1775

SEQ ID NO: 6048 - DNA, 1400 bp, Homo sapiens; identical to SEQ ID NO: 1776

SEQ ID NO: 6049 - DNA, 1400 bp, Homo sapiens; identical to SEQ ID NO: 1776

SEQ ID NO: 6050 - DNA, 1400 bp, Homo sapiens; identical to SEQ ID NO: 1778

SEQ ID NO: 6051 - DNA, 1251 bp, Homo sapiens; identical to SEQ ID NO: 1779

SEQ ID NO: 6052 - DNA, 453 bp, Homo sapiens; identical to SEQ ID NO: 1780

SEQ ID NO: 6053 - DNA, 225 bp, Homo sapiens; identical to SEQ ID NO: 1781

SEQ ID NO: 6054 - DNA, 225 bp, Homo sapiens; identical to SEQ ID NO: 1781

SEQ ID NO: 6055 - DNA, 600 bp, Homo sapiens; identical to SEQ ID NO: 1783

SEQ ID NO: 6056 - DNA, 600 bp, Homo sapiens; identical to SEQ ID NO: 1783

SEQ ID NO: 6057 - DNA, 600 bp, Homo sapiens; identical to SEQ ID NO: 1785

SEQ ID NO: 6058 - DNA, 600 bp, Homo sapiens; identical to SEQ ID NO: 1785

SEQ ID NO: 6059 - DNA, 354 bp, Homo sapiens; identical to SEQ ID NO: 1787
  misc_feature (230)..(230): n is a, c, g, or t

SEQ ID NO: 6060 - DNA, 354 bp, Homo sapiens; identical to SEQ ID NO: 1787
  misc_feature (230)..(230): n is a, c, g, or t

SEQ ID NO: 6061 - DNA, 333 bp, Homo sapiens; identical to SEQ ID NO: 1789

SEQ ID NO: 6062 - DNA, 333 bp, Homo sapiens; identical to SEQ ID NO: 1789

SEQ ID NO: 6063 - DNA, 332 bp, Homo sapiens; identical to SEQ ID NO: 1791
  misc_feature (43)..(43): n is a, c, g, or t
  misc_feature (53)..(59): n is a, c, g, or t
  misc_feature (62)..(64): n is a, c, g, or t
  misc_feature (68)..(68): n is a, c, g, or t
  misc_feature (165)..(165): n is a, c, g, or t
  misc_feature (223)..(223): n is a, c, g, or t
  misc_feature (252)..(252): n is a, c, g, or t

SEQ ID NO: 6064 - DNA, 549 bp, Homo sapiens; identical to SEQ ID NO: 1792

SEQ ID NO: 6065 - DNA, 192 bp, Homo sapiens; identical to SEQ ID NO: 1793

SEQ ID NO: 6066 - DNA, 1400 bp, Homo sapiens; identical to SEQ ID NO: 1794

SEQ ID NO: 6067 - DNA, 600 bp, Homo sapiens; identical to SEQ ID NO: 1795

SEQ ID NO: 6068 - DNA, 600 bp, Homo sapiens; identical to SEQ ID NO: 1795

SEQ ID NO: 6069 - DNA, 600 bp, Homo sapiens; identical to SEQ ID NO: 1797

SEQ ID NO: 6070 - DNA, 600 bp, Homo sapiens; identical to SEQ ID NO: 1797

SEQ ID NO: 6071 - DNA, 600 bp, Homo sapiens; identical to SEQ ID NO: 1799

SEQ ID NO: 6072 - DNA, 600 bp, Homo sapiens; identical to SEQ ID NO: 1799

SEQ ID NO: 6073 - DNA, 1400 bp, Homo sapiens; identical to SEQ ID NO: 1801

SEQ ID NO: 6074 - DNA, 600 bp, Homo sapiens; identical to SEQ ID NO: 1802

SEQ ID NO: 6075 - DNA, 600 bp, Homo sapiens; identical to SEQ ID NO: 1803

SEQ ID NO: 6076 - DNA, 600 bp, Homo sapiens; identical to SEQ ID NO: 1803

SEQ ID NO: 6077 - DNA, 1400 bp, Homo sapiens; identical to SEQ ID NO: 1805

SEQ ID NO: 6078 - DNA, 1400 bp, Homo sapiens; identical to SEQ ID NO: 1805

SEQ ID NO: 6079 - DNA, 600 bp, Homo sapiens; identical to SEQ ID NO: 1807

SEQ ID NO: 6080 - DNA, 600 bp, Homo sapiens; identical to SEQ ID NO: 1807

SEQ ID NO: 6081 - DNA, 1400 bp, Homo sapiens; identical to SEQ ID NO: 1809

SEQ ID NO: 6082 - DNA, 1400 bp, Homo sapiens; identical to SEQ ID NO: 1809

SEQ ID NO: 6083 - DNA, 1400 bp, Homo sapiens; identical to SEQ ID NO: 1811

SEQ ID NO: 6084 - DNA, 1400 bp, Homo sapiens; identical to SEQ ID NO: 1812

SEQ ID NO: 6085 - DNA, 1400 bp, Homo sapiens; identical to SEQ ID NO: 1813

SEQ ID NO: 6086 - DNA, 1400 bp, Homo sapiens; identical to SEQ ID NO: 1813

SEQ ID NO: 6087 - DNA, 1400 bp, Homo sapiens; identical to SEQ ID NO: 1815

SEQ ID NO: 6088 - DNA, 600 bp, Homo sapiens; identical to SEQ ID NO: 1816

SEQ ID NO: 6089 - DNA, 457 bp, Homo sapiens; identical to SEQ ID NO: 1817

SEQ ID NO: 6090 - DNA, 457 bp, Homo sapiens; identical to SEQ ID NO: 1817

SEQ ID NO: 6091 - DNA, 172 bp, Homo sapiens; identical to SEQ ID NO: 1819

SEQ ID NO: 6092 - DNA, 600 bp, Homo sapiens; identical to SEQ ID NO: 1820

SEQ ID NO: 6093 - DNA, 600 bp, Homo sapiens; identical to SEQ ID NO: 1821

SEQ ID NO: 6094 - DNA, 600 bp, Homo sapiens; identical to SEQ ID NO: 1822

SEQ ID NO: 6095 - DNA, 600 bp, Homo sapiens; identical to SEQ ID NO: 1822

SEQ ID NO: 6096 - DNA, 600 bp, Homo sapiens; identical to SEQ ID NO: 1824

SEQ ID NO: 6097 - DNA, 600 bp, Homo sapiens; identical to SEQ ID NO: 1824

SEQ ID NO: 6098 - DNA, 600 bp, Homo sapiens; identical to SEQ ID NO: 1826

SEQ ID NO: 6099 - DNA, 1400 bp, Homo sapiens; identical to SEQ ID NO: 1827

SEQ ID NO: 6100 - DNA, 1400 bp, Homo sapiens; identical to SEQ ID NO: 1827

SEQ ID NO: 6101 - DNA, 600 bp, Homo sapiens; identical to SEQ ID NO: 1829

SEQ ID NO: 6102 - DNA, 600 bp, Homo sapiens; identical to SEQ ID NO: 1829

SEQ ID NO: 6103 - DNA, 461 bp, Homo sapiens; identical to SEQ ID NO: 1831

SEQ ID NO: 6104 - DNA, 461 bp, Homo sapiens; identical to SEQ ID NO: 1831

SEQ ID NO: 6105 - DNA, 1400 bp, Homo sapiens; identical to SEQ ID NO: 1833

SEQ ID NO: 6106 - DNA, 600 bp, Homo sapiens; identical to SEQ ID NO: 1834

SEQ ID NO: 6107 - DNA, 600 bp, Homo sapiens; identical to SEQ ID NO: 1834

SEQ ID NO: 6108 - DNA, 600 bp, Homo sapiens; identical to SEQ ID NO: 1836

SEQ ID NO: 6109 - DNA, 551 bp, Homo sapiens; identical to SEQ ID NO: 1837

SEQ ID NO: 6110 - DNA, 1400 bp, Homo sapiens; identical to SEQ ID NO: 1838

SEQ ID NO: 6111 - DNA, 330 bp, Homo sapiens; identical to SEQ ID NO: 1839

SEQ ID NO: 6112 - DNA, 330 bp, Homo sapiens; identical to SEQ ID NO: 1839

SEQ ID NO: 6113 - DNA, 492 bp, Homo sapiens; identical to SEQ ID NO: 1841

SEQ ID NO: 6114 - DNA, 600 bp, Homo sapiens; identical to SEQ ID NO: 1842

SEQ ID NO: 6115 - DNA, 600 bp, Homo sapiens; identical to SEQ ID NO: 1843

SEQ ID NO: 6116 - DNA, 600 bp, Homo sapiens; identical to SEQ ID NO: 1843

SEQ ID NO: 6117 - DNA, 600 bp, Homo sapiens; identical to SEQ ID NO: 1845

SEQ ID NO: 6118 - DNA, 600 bp, Homo sapiens; identical to SEQ ID NO: 1845

SEQ ID NO: 6119 - DNA, 537 bp, Homo sapiens; identical to SEQ ID NO: 1847

SEQ ID NO: 6120 - DNA, 537 bp, Homo sapiens; identical to SEQ ID NO: 1847

SEQ ID NO: 6121 - DNA, 600 bp, Homo sapiens; identical to SEQ ID NO: 1849

SEQ ID NO: 6122 - DNA, 600 bp, Homo sapiens; identical to SEQ ID NO: 1850

SEQ ID NO: 6123 - DNA, 600 bp, Homo sapiens; identical to SEQ ID NO: 1850

SEQ ID NO: 6124 - DNA, 600 bp, Homo sapiens; identical to SEQ ID NO: 1852

SEQ ID NO: 6125 - DNA, 600 bp, Homo sapiens; identical to SEQ ID NO: 1853

SEQ ID NO: 6126 - DNA, 792 bp, Homo sapiens; identical to SEQ ID NO: 1854

SEQ ID NO: 6127 - DNA, 792 bp, Homo sapiens; identical to SEQ ID NO: 1854

SEQ ID NO: 6128 - DNA, 600 bp, Homo sapiens; identical to SEQ ID NO: 1856

SEQ ID NO: 6129 - DNA, 600 bp, Homo sapiens; identical to SEQ ID NO: 1857

SEQ ID NO: 6130 - DNA, 427 bp, Homo sapiens; identical to SEQ ID NO: 1858

SEQ ID NO: 6131 - DNA, 427 bp, Homo sapiens; identical to SEQ ID NO: 1858

SEQ ID NO: 6132 - DNA, 429 bp, Homo sapiens; identical to SEQ ID NO: 1860

SEQ ID NO: 6133 - DNA, 429 bp, Homo sapiens; identical to SEQ ID NO: 1860

SEQ ID NO: 6134 - DNA, 600 bp, Homo sapiens; identical to SEQ ID NO: 1862

SEQ ID NO: 6135 - DNA, 600 bp, Homo sapiens; identical to SEQ ID NO: 1863

SEQ ID NO: 6136 - DNA, 575 bp, Homo sapiens; identical to SEQ ID NO: 1864

SEQ ID NO: 6137 - DNA, 575 bp, Homo sapiens; identical to SEQ ID NO: 1864

SEQ ID NO: 6138 - DNA, 328 bp, Homo sapiens; identical to SEQ ID NO: 1866

SEQ ID NO: 6139 - DNA, 328 bp, Homo sapiens; identical to SEQ ID NO: 1866

SEQ ID NO: 6140 - DNA, 1400 bp, Homo sapiens; identical to SEQ ID NO: 1868

SEQ ID NO: 6141 - DNA, 1400 bp, Homo sapiens; identical to SEQ ID NO: 1868

SEQ ID NO: 6142 - DNA, 600 bp, Homo sapiens; identical to SEQ ID NO: 1870

SEQ ID NO: 6143 - DNA, 600 bp, Homo sapiens; identical to SEQ ID NO: 1871

SEQ ID NO: 6144 - DNA, 600 bp, Homo sapiens; identical to SEQ ID NO: 1871

SEQ ID NO: 6145 - DNA, 518 bp, Homo sapiens; identical to SEQ ID NO: 1873

SEQ ID NO: 6146 - DNA, 518 bp, Homo sapiens; identical to SEQ ID NO: 1873

SEQ ID NO: 6147 - DNA, 600 bp, Homo sapiens; identical to SEQ ID NO: 1875

SEQ ID NO: 6148 - DNA, 600 bp, Homo sapiens; identical to SEQ ID NO: 1875

SEQ ID NO: 6149 - DNA, 600 bp, Homo sapiens; identical to SEQ ID NO: 1877

SEQ ID NO: 6150 - DNA, 600 bp, Homo sapiens; identical to SEQ ID NO: 1878

SEQ ID NO: 6151 - DNA, 600 bp, Homo sapiens; identical to SEQ ID NO: 1879

SEQ ID NO: 6152 - DNA, 1400 bp, Homo sapiens; identical to SEQ ID NO: 1880

SEQ ID NO: 6153 - DNA, 600 bp, Homo sapiens; identical to SEQ ID NO: 1881

SEQ ID NO: 6154 - DNA, 600 bp, Homo sapiens; identical to SEQ ID NO: 1882

SEQ ID NO: 6155 - DNA, 1400 bp, Homo sapiens; identical to SEQ ID NO: 1883

SEQ ID NO: 6156 - DNA, 1400 bp, Homo sapiens; identical to SEQ ID NO: 1883

SEQ ID NO: 6157 - DNA, 1400 bp, Homo sapiens; identical to SEQ ID NO: 1885

SEQ ID NO: 6158 - DNA, 1400 bp, Homo sapiens; identical to SEQ ID NO: 1886

SEQ ID NO: 6159 - DNA, 1400 bp, Homo sapiens; identical to SEQ ID NO: 1886

SEQ ID NO: 6160 - DNA, 600 bp, Homo sapiens; identical to SEQ ID NO: 1888

SEQ ID NO: 6161 - DNA, 600 bp, Homo sapiens; identical to SEQ ID NO: 1889

SEQ ID NO: 6162 - DNA, 600 bp, Homo sapiens; identical to SEQ ID NO: 1889

SEQ ID NO: 6163 - DNA, 1400 bp, Homo sapiens; identical to SEQ ID NO: 1891

SEQ ID NO: 6164 - DNA, 1400 bp, Homo sapiens; identical to SEQ ID NO: 1892

SEQ ID NO: 6165 - DNA, 1400 bp, Homo sapiens; identical to SEQ ID NO: 1893

SEQ ID NO: 6166 - DNA, 1400 bp, Homo sapiens; identical to SEQ ID NO: 1893

SEQ ID NO: 6167 - DNA, 1400 bp, Homo sapiens; identical to SEQ ID NO: 1895

SEQ ID NO: 6168 - DNA, 1400 bp, Homo sapiens; identical to SEQ ID NO: 1895

SEQ ID NO: 6169 - DNA, 600 bp, Homo sapiens; identical to SEQ ID NO: 1897

SEQ ID NO: 6170 - DNA, 1400 bp, Homo sapiens; identical to SEQ ID NO: 1898

SEQ ID NO: 6171 - DNA, 530 bp, Homo sapiens; identical to SEQ ID NO: 1899

SEQ ID NO: 6172 - DNA, 530 bp, Homo sapiens; identical to SEQ ID NO: 1899

SEQ ID NO: 6173 - DNA, 600 bp, Homo sapiens; identical to SEQ ID NO: 1901

SEQ ID NO: 6174 - DNA, 600 bp, Homo sapiens; identical to SEQ ID NO: 1901

SEQ ID NO: 6175 - DNA, 600 bp, Homo sapiens; identical to SEQ ID NO: 1903

SEQ ID NO: 6176 - DNA, 600 bp, Homo sapiens; identical to SEQ ID NO: 1903

SEQ ID NO: 6177 - DNA, 600 bp, Homo sapiens; identical to SEQ ID NO: 1905

SEQ ID NO: 6178 - DNA, 600 bp, Homo sapiens; identical to SEQ ID NO: 1905

SEQ ID NO: 6179 - DNA, 600 bp, Homo sapiens; identical to SEQ ID NO: 1907

SEQ ID NO: 6180 - DNA, 600 bp, Homo sapiens; identical to SEQ ID NO: 1907

SEQ ID NO: 6181 - DNA, 600 bp, Homo sapiens; identical to SEQ ID NO: 1909

SEQ ID NO: 6182 - DNA, 600 bp, Homo sapiens; identical to SEQ ID NO: 1909

SEQ ID NO: 6183 - DNA, 600 bp, Homo sapiens; identical to SEQ ID NO: 1911

SEQ ID NO: 6184 - DNA, 600 bp, Homo sapiens; identical to SEQ ID NO: 1911

SEQ ID NO: 6185 - DNA, 600 bp, Homo sapiens; identical to SEQ ID NO: 1913

SEQ ID NO: 6186 - DNA, 600 bp, Homo sapiens; identical to SEQ ID NO: 1913

SEQ ID NO: 6187 - DNA, 1400 bp, Homo sapiens; identical to SEQ ID NO: 1915

SEQ ID NO: 6188 - DNA, 600 bp, Homo sapiens; identical to SEQ ID NO: 1916

SEQ ID NO: 6189 - DNA, 600 bp, Homo sapiens; identical to SEQ ID NO: 1917

SEQ ID NO: 6190 - DNA, 600 bp, Homo sapiens; identical to SEQ ID NO: 1917

SEQ ID NO: 6191 - DNA, 600 bp, Homo sapiens; identical to SEQ ID NO: 1919

SEQ ID NO: 6192 - DNA, 600 bp, Homo sapiens; identical to SEQ ID NO: 1919

SEQ ID NO: 6193 - DNA, 600 bp, Homo sapiens; identical to SEQ ID NO: 1921

SEQ ID NO: 6194 - DNA, 600 bp, Homo sapiens; identical to SEQ ID NO: 1922

SEQ ID NO: 6195 - DNA, 600 bp, Homo sapiens; identical to SEQ ID NO: 1922

SEQ ID NO: 6196 - DNA, 600 bp, Homo sapiens; identical to SEQ ID NO: 1924

SEQ ID NO: 6197 - DNA, 600 bp, Homo sapiens; identical to SEQ ID NO: 1924

SEQ ID NO: 6198 - DNA, 600 bp, Homo sapiens; identical to SEQ ID NO: 1926

SEQ ID NO: 6199 - DNA, 600 bp, Homo sapiens; identical to SEQ ID NO: 1927

SEQ ID NO: 6200 - DNA, 600 bp, Homo sapiens; identical to SEQ ID NO: 1927

SEQ ID NO: 6201 - DNA, 1400 bp, Homo sapiens; identical to SEQ ID NO: 1929

SEQ ID NO: 6202 - DNA, 1400 bp, Homo sapiens; identical to SEQ ID NO: 1929

SEQ ID NO: 6203 - DNA, 600 bp, Homo sapiens; identical to SEQ ID NO: 1931

SEQ ID NO: 6204 - DNA, 600 bp, Homo sapiens; identical to SEQ ID NO: 1931

SEQ ID NO: 6205 - DNA, 1400 bp, Homo sapiens; identical to SEQ ID NO: 1933

SEQ ID NO: 6206 - DNA, 600 bp, Homo sapiens; identical to SEQ ID NO: 1934

SEQ ID NO: 6207 - DNA, 600 bp, Homo sapiens; identical to SEQ ID NO: 1934

SEQ ID NO: 6208 - DNA, 1400 bp, Homo sapiens; identical to SEQ ID NO: 1936

SEQ ID NO: 6209 - DNA, 1400 bp, Homo sapiens; identical to SEQ ID NO: 1937

SEQ ID NO: 6210 - DNA, 600 bp, Homo sapiens; identical to SEQ ID NO: 1938

SEQ ID NO: 6211 - DNA, 600 bp, Homo sapiens; identical to SEQ ID NO: 1938

SEQ ID NO: 6212 - DNA, 1400 bp, Homo sapiens; identical to SEQ ID NO: 1940

SEQ ID NO: 6213 - DNA, 1400 bp, Homo sapiens; identical to SEQ ID NO: 1940

SEQ ID NO: 6214 - DNA, 1400 bp, Homo sapiens; identical to SEQ ID NO: 1942

SEQ ID NO: 6215 - DNA, 1400 bp, Homo sapiens; identical to SEQ ID NO: 1943

SEQ ID NO: 6216 - DNA, 1400 bp, Homo sapiens; identical to SEQ ID NO: 1944

SEQ ID NO: 6217 - DNA, 1400 bp, Homo sapiens; identical to SEQ ID NO: 1944

SEQ ID NO: 6218 - DNA, 600 bp, Homo sapiens; identical to SEQ ID NO: 1946

SEQ ID NO: 6219 - DNA, 600 bp, Homo sapiens; identical to SEQ ID NO: 1947

SEQ ID NO: 6220 - DNA, 1400 bp, Homo sapiens; identical to SEQ ID NO: 1948

SEQ ID NO: 6221 - DNA, 1400 bp, Homo sapiens; identical to SEQ ID NO: 1949

SEQ ID NO: 6222 - DNA, 1400 bp, Homo sapiens; identical to SEQ ID NO: 1950

SEQ ID NO: 6223 - DNA, 1400 bp, Homo sapiens; identical to SEQ ID NO: 1951

SEQ ID NO: 6224 - DNA, 1400 bp, Homo sapiens; identical to SEQ ID NO: 1951

SEQ ID NO: 6225 - DNA, 600 bp, Homo sapiens; identical to SEQ ID NO: 1953

SEQ ID NO: 6226 - DNA, 1400 bp, Homo sapiens; identical to SEQ ID NO: 1954

SEQ ID NO: 6227 - DNA, 600 bp, Homo sapiens; identical to SEQ ID NO: 1955

SEQ ID NO: 6228 - DNA, 1400 bp, Homo sapiens; identical to SEQ ID NO: 1956

SEQ ID NO: 6229 - DNA, 1400 bp, Homo sapiens; identical to SEQ ID NO: 1957
  misc_feature (143)..(143): n is a, c, g, or t
  misc_feature (203)..(203): n is a, c, g, or t
  misc_feature (217)..(218): n is a, c, g, or t
  misc_feature (394)..(395): n is a, c, g, or t
  misc_feature (455)..(455): n is a, c, g, or t
  misc_feature (635)..(636): n is a, c, g, or t
  misc_feature (650)..(650): n is a, c, g, or t
  misc_feature (655)..(655): n is a, c, g, or t
  misc_feature (658)..(660): n is a, c, g, or t
  misc_feature (668)..(668): n is a, c, g, or t
  misc_feature (670)..(674): n is a, c, g, or t
  misc_feature (678)..(679): n is a, c, g, or t
  misc_feature (702)..(702): n is a, c, g, or t
  misc_feature (723)..(723): n is a, c, g, or t
  misc_feature (738)..(739): n is a, c, g, or t
  misc_feature (780)..(780): n is a, c, g, or t
  misc_feature (791)..(791): n is a, c, g, or t
  misc_feature (907)..(907): n is a, c, g, or t
  misc_feature (951)..(951): n is a, c, g, or t
  misc_feature (984)..(984): n is a, c, g, or t
  misc_feature (1018)..(1018): n is a, c, g, or t
  misc_feature (1022)..(1022): n is a, c, g, or t
  misc_feature (1054)..(1054): n is a, c, g, or t
  misc_feature (1076)..(1076): n is a, c, g, or t
  misc_feature (1125)..(1125): n is a, c, g, or t
  misc_feature (1144)..(1144): n is a, c, g, or t
  misc_feature (1198)..(1200): n is a, c, g, or t
  misc_feature (1259)..(1259): n is a, c, g, or t
  misc_feature (1353)..(1354): n is a, c, g, or t
  misc_feature (1373)..(1376): n is a, c, g, or t

SEQ ID NO: 6230 - DNA, 1400 bp, Homo sapiens; identical to SEQ ID NO: 1957
  misc_feature (143)..(143): n is a, c, g, or t
  misc_feature (203)..(203): n is a, c, g, or t
  misc_feature (217)..(218): n is a, c, g, or t
  misc_feature (394)..(395): n is a, c, g, or t
  misc_feature (455)..(455): n is a, c, g, or t
  misc_feature (635)..(636): n is a, c, g, or t
  misc_feature (650)..(650): n is a, c, g, or t
  misc_feature (655)..(655): n is a, c, g, or t
  misc_feature (658)..(660): n is a, c, g, or t
  misc_feature (668)..(668): n is a, c, g, or t
  misc_feature (670)..(674): n is a, c, g, or t
  misc_feature (678)..(679): n is a, c, g, or t
  misc_feature (702)..(702): n is a, c, g, or t
  misc_feature (723)..(723): n is a, c, g, or t
  misc_feature (738)..(739): n is a, c, g, or t
  misc_feature (780)..(780): n is a, c, g, or t
  misc_feature (791)..(791): n is a, c, g, or t
  misc_feature (907)..(907): n is a, c, g, or t
  misc_feature (951)..(951): n is a, c, g, or t
  misc_feature (984)..(984): n is a, c, g, or t
  misc_feature (1018)..(1018): n is a, c, g, or t
  misc_feature (1022)..(1022): n is a, c, g, or t
  misc_feature (1054)..(1054): n is a, c, g, or t
  misc_feature (1076)..(1076): n is a, c, g, or t
  misc_feature (1125)..(1125): n is a, c, g, or t
  misc_feature (1144)..(1144): n is a, c, g, or t
  misc_feature (1198)..(1200): n is a, c, g, or t
  misc_feature (1259)..(1259): n is a, c, g, or t
  misc_feature (1353)..(1354): n is a, c, g, or t
  misc_feature (1373)..(1376): n is a, c, g, or t

SEQ ID NO: 6231 - DNA, 600 bp, Homo sapiens; identical to SEQ ID NO: 1959

SEQ ID NO: 6232 - DNA, 600 bp, Homo sapiens; identical to SEQ ID NO: 1960

SEQ ID NO: 6233 - DNA, 600 bp, Homo sapiens; identical to SEQ ID NO: 1961

SEQ ID NO: 6234 - DNA, 600 bp, Homo sapiens; identical to SEQ ID NO: 1961

SEQ ID NO: 6235 - DNA, 1400 bp, Homo sapiens; identical to SEQ ID NO: 1963

SEQ ID NO: 6236 - DNA, 600 bp, Homo sapiens; identical to SEQ ID NO: 1964

SEQ ID NO: 6237 - DNA, 600 bp, Homo sapiens; identical to SEQ ID NO: 1964

SEQ ID NO: 6238 - DNA, 1400 bp, Homo sapiens; identical to SEQ ID NO: 1966

SEQ ID NO: 6239 - DNA, 1400 bp, Homo sapiens; identical to SEQ ID NO: 1967

SEQ ID NO: 6240 - DNA, 1400 bp, Homo sapiens; identical to SEQ ID NO: 1967

SEQ ID NO: 6241 - DNA, 600 bp, Homo sapiens; identical to SEQ ID NO: 1969

SEQ ID NO: 6242 - DNA, 600 bp, Homo sapiens; identical to SEQ ID NO: 1970

SEQ ID NO: 6243 - DNA, 600 bp, Homo sapiens; identical to SEQ ID NO: 1970

SEQ ID NO: 6244 - DNA, 600 bp, Homo sapiens; identical to SEQ ID NO: 1972

SEQ ID NO: 6245 - DNA, 600 bp, Homo sapiens; identical to SEQ ID NO: 1972

SEQ ID NO: 6246 - DNA, 600 bp, Homo sapiens; identical to SEQ ID NO: 1974

SEQ ID NO: 6247 - DNA, 1400 bp, Homo sapiens; identical to SEQ ID NO: 1975

SEQ ID NO: 6248 - DNA, 1400 bp, Homo sapiens; identical to SEQ ID NO: 1976

SEQ ID NO: 6249 - DNA, 600 bp, Homo sapiens; identical to SEQ ID NO: 1977

SEQ ID NO: 6250 - DNA, 600 bp, Homo sapiens; identical to SEQ ID NO: 1977

SEQ ID NO: 6251 - DNA, 600 bp, Homo sapiens; identical to SEQ ID NO: 1979

SEQ ID NO: 6252 - DNA, 600 bp, Homo sapiens; identical to SEQ ID NO: 1979

SEQ ID NO: 6253 - DNA, 1400 bp, Homo sapiens; identical to SEQ ID NO: 1981

SEQ ID NO: 6254 - DNA, 600 bp, Homo sapiens; identical to SEQ ID NO: 1982

SEQ ID NO: 6255 - DNA, 600 bp, Homo sapiens; identical to SEQ ID NO: 1983

SEQ ID NO: 6256 - DNA, 1400 bp, Homo sapiens; identical to SEQ ID NO: 1984

SEQ ID NO: 6257 - DNA, 600 bp, Homo sapiens; identical to SEQ ID NO: 1985

SEQ ID NO: 6258 - DNA, 600 bp, Homo sapiens; identical to SEQ ID NO: 1985

SEQ ID NO: 6259 - DNA, 1400 bp, Homo sapiens; identical to SEQ ID NO: 1987

SEQ ID NO: 6260 - DNA, 1400 bp, Homo sapiens; identical to SEQ ID NO: 1988

SEQ ID NO: 6261 - DNA, 1400 bp, Homo sapiens; identical to SEQ ID NO: 1988

SEQ ID NO: 6262 - DNA, 600 bp, Homo sapiens; identical to SEQ ID NO: 1990

SEQ ID NO: 6263 - DNA, 1400 bp, Homo sapiens; identical to SEQ ID NO: 1991

SEQ ID NO: 6264 - DNA, 1400 bp, Homo sapiens; identical to SEQ ID NO: 1991

SEQ ID NO: 6265 - DNA, 1400 bp, Homo sapiens; identical to SEQ ID NO: 1993

SEQ ID NO: 6266 - DNA, 1400 bp, Homo sapiens; identical to SEQ ID NO: 1994

SEQ ID NO: 6267 - DNA, 1400 bp, Homo sapiens; identical to SEQ ID NO: 1995

SEQ ID NO: 6268 - DNA, 600 bp, Homo sapiens; identical to SEQ ID NO: 1996

SEQ ID NO: 6269 - DNA, 600 bp, Homo sapiens; identical to SEQ ID NO: 1996

SEQ ID NO: 6270 - DNA, 600 bp, Homo sapiens; identical to SEQ ID NO: 1998

SEQ ID NO: 6271 - DNA, 1400 bp, Homo sapiens; identical to SEQ ID NO: 1999

SEQ ID NO: 6272 - DNA, 1400 bp, Homo sapiens; identical to SEQ ID NO: 1999

SEQ ID NO: 6273 - DNA, 600 bp, Homo sapiens; identical to SEQ ID NO: 2001

SEQ ID NO: 6274 - DNA, 600 bp, Homo sapiens; identical to SEQ ID NO: 2002

SEQ ID NO: 6275 - DNA, 600 bp, Homo sapiens; identical to SEQ ID NO: 2002

SEQ ID NO: 6276 - DNA, 600 bp, Homo sapiens; identical to SEQ ID NO: 2004

SEQ ID NO: 6277 - DNA, 600 bp, Homo sapiens; identical to SEQ ID NO: 2005

SEQ ID NO: 6278 - DNA, 600 bp, Homo sapiens; identical to SEQ ID NO: 2005

SEQ ID NO: 6279 - DNA, 600 bp, Homo sapiens; identical to SEQ ID NO: 2007

SEQ ID NO: 6280 - DNA, 600 bp, Homo sapiens; identical to SEQ ID NO: 2008

SEQ ID NO: 6281 - DNA, 600 bp, Homo sapiens; identical to SEQ ID NO: 2008

SEQ ID NO: 6282 - DNA, 600 bp, Homo sapiens; identical to SEQ ID NO: 2010

SEQ ID NO: 6283 - DNA, 600 bp, Homo sapiens; identical to SEQ ID NO: 2010

SEQ ID NO: 6284 - DNA, 600 bp, Homo sapiens; identical to SEQ ID NO: 2012

SEQ ID NO: 6285 - DNA, 600 bp, Homo sapiens; identical to SEQ ID NO: 2012

SEQ ID NO: 6286 - DNA, 600 bp, Homo sapiens; identical to SEQ ID NO: 2014

SEQ ID NO: 6287 - DNA, 600 bp, Homo sapiens; identical to SEQ ID NO: 2014

SEQ ID NO: 6288 - DNA, 600 bp, Homo sapiens; identical to SEQ ID NO: 2016

SEQ ID NO: 6289 - DNA, 600 bp, Homo sapiens; identical to SEQ ID NO: 2017

SEQ ID NO: 6290 - DNA, 600 bp, Homo sapiens; identical to SEQ ID NO: 2017

SEQ ID NO: 6291 - DNA, 1400 bp, Homo sapiens; identical to SEQ ID NO: 2019

SEQ ID NO: 6292 - DNA, 600 bp, Homo sapiens; identical to SEQ ID NO: 2020

SEQ ID NO: 6293 - DNA, 600 bp, Homo sapiens; identical to SEQ ID NO: 2021

SEQ ID NO: 6294 - DNA, 600 bp, Homo sapiens; identical to SEQ ID NO: 2022

SEQ ID NO: 6295 - DNA, 600 bp, Homo sapiens; identical to SEQ ID NO: 2023

SEQ ID NO: 6296 - DNA, 600 bp, Homo sapiens; identical to SEQ ID NO: 2023

SEQ ID NO: 6297 - DNA, 600 bp, Homo sapiens; identical to SEQ ID NO: 2025

SEQ ID NO: 6298 - DNA, 600 bp, Homo sapiens; identical to SEQ ID NO: 2026

SEQ ID NO: 6299 - DNA, 600 bp, Homo sapiens; identical to SEQ ID NO: 2027

SEQ ID NO: 6300 - DNA, 600 bp, Homo sapiens; identical to SEQ ID NO: 2028

SEQ ID NO: 6301 - DNA, 600 bp, Homo sapiens; identical to SEQ ID NO: 2029

SEQ ID NO: 6302 - DNA, 600 bp, Homo sapiens; identical to SEQ ID NO: 2029

SEQ ID NO: 6303 - DNA, 600 bp, Homo sapiens; identical to SEQ ID NO: 2031

SEQ ID NO: 6304 - DNA, 600 bp, Homo sapiens; identical to SEQ ID NO: 2031

SEQ ID NO: 6305 - DNA, 600 bp, Homo sapiens; identical to SEQ ID NO: 2033

SEQ ID NO: 6306 - DNA, 1400 bp, Homo sapiens; identical to SEQ ID NO: 2034

SEQ ID NO: 6307 - DNA, 1400 bp, Homo sapiens; identical to SEQ ID NO: 2034

SEQ ID NO: 6308 - DNA, 600 bp, Homo sapiens; identical to SEQ ID NO: 2036

SEQ ID NO: 6309 - DNA, 600 bp, Homo sapiens; identical to SEQ ID NO: 2036

SEQ ID NO: 6310 - DNA, 600 bp, Homo sapiens; identical to SEQ ID NO: 2038

SEQ ID NO: 6311 - DNA, 600 bp, Homo sapiens; identical to SEQ ID NO: 2038

SEQ ID NO: 6312 - DNA, 600 bp, Homo sapiens; identical to SEQ ID NO: 2040

SEQ ID NO: 6313 - DNA, 600 bp, Homo sapiens; identical to SEQ ID NO: 2041

SEQ ID NO: 6314 - DNA, 600 bp, Homo sapiens; identical to SEQ ID NO: 2041

SEQ ID NO: 6315 - DNA, 600 bp, Homo sapiens; identical to SEQ ID NO: 2043

SEQ ID NO: 6316 - DNA, 600 bp, Homo sapiens; identical to SEQ ID NO: 2043

SEQ ID NO: 6317 - DNA, 600 bp, Homo sapiens; identical to SEQ ID NO: 2045

SEQ ID NO: 6318 - DNA, 600 bp, Homo sapiens; identical to SEQ ID NO: 2046

SEQ ID NO: 6319 - DNA, 600 bp, Homo sapiens; identical to SEQ ID NO: 2047

SEQ ID NO: 6320 - DNA, 600 bp, Homo sapiens; identical to SEQ ID NO: 2048

SEQ ID NO: 6321 - DNA, 1400 bp, Homo sapiens; identical to SEQ ID NO: 2049

SEQ ID NO: 6322 - DNA, 1400 bp, Homo sapiens; identical to SEQ ID NO: 2049

SEQ ID NO: 6323 - DNA, 1400 bp, Homo sapiens; identical to SEQ ID NO: 2051

SEQ ID NO: 6324 - DNA, 1400 bp, Homo sapiens; identical to SEQ ID NO: 2051

SEQ ID NO: 6325 - DNA, 600 bp, Homo sapiens; identical to SEQ ID NO: 2053

SEQ ID NO: 6326 - DNA, 600 bp, Homo sapiens; identical to SEQ ID NO: 2053

SEQ ID NO: 6327 - DNA, 600 bp, Homo sapiens; identical to SEQ ID NO: 2055

SEQ ID NO: 6328 - DNA, 600 bp, Homo sapiens; identical to SEQ ID NO: 2055

SEQ ID NO: 6329 - DNA, 600 bp, Homo sapiens; identical to SEQ ID NO: 2057

SEQ ID NO: 6330 - DNA, 600 bp, Homo sapiens; identical to SEQ ID NO: 2057

SEQ ID NO: 6331 - DNA, 600 bp, Homo sapiens; identical to SEQ ID NO: 2059

SEQ ID NO: 6332 - DNA, 600 bp, Homo sapiens; identical to SEQ ID NO: 2059

SEQ ID NO: 6333 - DNA, 600 bp, Homo sapiens; identical to SEQ ID NO: 2061

SEQ ID NO: 6334 - DNA, 600 bp, Homo sapiens; identical to SEQ ID NO: 2062

SEQ ID NO: 6335 - DNA, 600 bp, Homo sapiens; identical to SEQ ID NO: 2062

SEQ ID NO: 6336 - DNA, 600 bp, Homo sapiens; identical to SEQ ID NO: 2064

SEQ ID NO: 6337 - DNA, 600 bp, Homo sapiens; identical to SEQ ID NO: 2064

SEQ ID NO: 6338 - DNA, 600 bp, Homo sapiens; identical to SEQ ID NO: 2066

SEQ ID NO: 6339 - DNA, 600 bp, Homo sapiens; identical to SEQ ID NO: 2067

SEQ ID NO: 6340 - DNA, 1400 bp, Homo sapiens; identical to SEQ ID NO: 2068

SEQ ID NO: 6341 - DNA, 600 bp, Homo sapiens; identical to SEQ ID NO: 2069

SEQ ID NO: 6342 - DNA, 600 bp, Homo sapiens; identical to SEQ ID NO: 2070

SEQ ID NO: 6343 - DNA, 600 bp, Homo sapiens; identical to SEQ ID NO: 2070

SEQ ID NO: 6344 - DNA, 600 bp, Homo sapiens; identical to SEQ ID NO: 2072

SEQ ID NO: 6345 - DNA, 600 bp, Homo sapiens; identical to SEQ ID NO: 2072

SEQ ID NO: 6346 - DNA, 600 bp, Homo sapiens; identical to SEQ ID NO: 2074

SEQ ID NO: 6347 - DNA, 600 bp, Homo sapiens; identical to SEQ ID NO: 2074

SEQ ID NO: 6348 - DNA, 1400 bp, Homo sapiens; identical to SEQ ID NO: 2076

SEQ ID NO: 6349 - DNA, 1400 bp, Homo sapiens; identical to SEQ ID NO: 2076

SEQ ID NO: 6350 - DNA, 600 bp, Homo sapiens; identical to SEQ ID NO: 2078

SEQ ID NO: 6351 - DNA, 600 bp, Homo sapiens; identical to SEQ ID NO: 2078

SEQ ID NO: 6352 - DNA, 600 bp, Homo sapiens; identical to SEQ ID NO: 2080

SEQ ID NO: 6353 - DNA, 600 bp, Homo sapiens; identical to SEQ ID NO: 2080

SEQ ID NO: 6354 - DNA, 600 bp, Homo sapiens; identical to SEQ ID NO: 2082

SEQ ID NO: 6355 - DNA, 600 bp, Homo sapiens; identical to SEQ ID NO: 2082

SEQ ID NO: 6356 - DNA, 1400 bp, Homo sapiens; identical to SEQ ID NO: 2084

SEQ ID NO: 6357 - DNA, 600 bp, Homo sapiens; identical to SEQ ID NO: 2085

SEQ ID NO: 6358 - DNA, 600 bp, Homo sapiens; identical to SEQ ID NO: 2085

SEQ ID NO: 6359 - DNA, 600 bp, Homo sapiens; identical to SEQ ID NO: 2087

SEQ ID NO: 6360 - DNA, 600 bp, Homo sapiens; identical to SEQ ID NO: 2088

SEQ ID NO: 6361 - DNA, 600 bp, Homo sapiens; identical to SEQ ID NO: 2088

SEQ ID NO: 6362 - DNA, 600 bp, Homo sapiens; identical to SEQ ID NO: 2090

SEQ ID NO: 6363 - DNA, 600 bp, Homo sapiens; identical to SEQ ID NO: 2091

SEQ ID NO: 6364 - DNA, 600 bp, Homo sapiens; identical to SEQ ID NO: 2092
  misc_feature (501)..(501): n is a, c, g, or t
  misc_feature (529)..(529): n is a, c, g, or t

SEQ ID NO: 6365 - DNA, 600 bp, Homo sapiens; identical to SEQ ID NO: 2092
  misc_feature (501)..(501): n is a, c, g, or t
  misc_feature (529)..(529): n is a, c, g, or t

SEQ ID NO: 6366 - DNA, 1400 bp, Homo sapiens; identical to SEQ ID NO: 2094

SEQ ID NO: 6367 - DNA, 600 bp, Homo sapiens; identical to SEQ ID NO: 2095

SEQ ID NO: 6368 - DNA, 600 bp, Homo sapiens; identical to SEQ ID NO: 2095

SEQ ID NO: 6369 - DNA, 1400 bp, Homo sapiens; identical to SEQ ID NO: 2097

SEQ ID NO: 6370 - DNA, 1400 bp, Homo sapiens; identical to SEQ ID NO: 2097

SEQ ID NO: 6371 - DNA, 1400 bp, Homo sapiens; identical to SEQ ID NO: 2099

SEQ ID NO: 6372 - DNA, 1400 bp, Homo sapiens; identical to SEQ ID NO: 2099

SEQ ID NO: 6373 - DNA, 600 bp, Homo sapiens; identical to SEQ ID NO: 2101

SEQ ID NO: 6374 - DNA, 600 bp, Homo sapiens; identical to SEQ ID NO: 2101

SEQ ID NO: 6375 - DNA, 1376 bp, Homo sapiens; identical to SEQ ID NO: 2103

SEQ ID NO: 6376 - DNA, 1400 bp, Homo sapiens; identical to SEQ ID NO: 2104

SEQ ID NO: 6377 - DNA, 1400 bp, Homo sapiens; identical to SEQ ID NO: 2105

SEQ ID NO: 6378 - DNA, 1400 bp, Homo sapiens; identical to SEQ ID NO: 2105

SEQ ID NO: 6379 - DNA, 600 bp, Homo sapiens; identical to SEQ ID NO: 2107

SEQ ID NO: 6380 - DNA, 600 bp, Homo sapiens; identical to SEQ ID NO: 2108

SEQ ID NO: 6381 - DNA, 600 bp, Homo sapiens; identical to SEQ ID NO: 2109

SEQ ID NO: 6382 - DNA, 1400 bp, Homo sapiens; identical to SEQ ID NO: 2110

SEQ ID NO: 6383 - DNA, 1400 bp, Homo sapiens; identical to SEQ ID NO: 2110

SEQ ID NO: 6384 - DNA, 1400 bp, Homo sapiens; identical to SEQ ID NO: 2112

SEQ ID NO: 6385 - DNA, 600 bp, Homo sapiens; identical to SEQ ID NO: 2113

SEQ ID NO: 6386 - DNA, 600 bp, Homo sapiens; identical to SEQ ID NO: 2113

SEQ ID NO: 6387 - DNA, 1400 bp, Homo sapiens; identical to SEQ ID NO: 2115

SEQ ID NO: 6388 - DNA, 1400 bp, Homo sapiens; identical to SEQ ID NO: 2116

SEQ ID NO: 6389 - DNA, 600 bp, Homo sapiens; identical to SEQ ID NO: 2117

SEQ ID NO: 6390 - DNA, 600 bp, Homo sapiens; identical to SEQ ID NO: 2118

SEQ ID NO: 6391 - DNA, 600 bp, Homo sapiens; identical to SEQ ID NO: 2118

SEQ ID NO: 6392 - DNA, 600 bp, Homo sapiens; identical to SEQ ID NO: 2120

SEQ ID NO: 6393 - DNA, 600 bp, Homo sapiens; identical to SEQ ID NO: 2120

SEQ ID NO: 6394 - DNA, 1400 bp, Homo sapiens; identical to SEQ ID NO: 2122

SEQ ID NO: 6395 - DNA, 1400 bp, Homo sapiens; identical to SEQ ID NO: 2122

SEQ ID NO: 6396 - DNA, 1400 bp, Homo sapiens; identical to SEQ ID NO: 2124

SEQ ID NO: 6397 - DNA, 600 bp, Homo sapiens; identical to SEQ ID NO: 2125

SEQ ID NO: 6398 - DNA, 600 bp, Homo sapiens; identical to SEQ ID NO: 2125

SEQ ID NO: 6399 - DNA, 600 bp, Homo sapiens; identical to SEQ ID NO: 2127

SEQ ID NO: 6400 - DNA, 1400 bp, Homo sapiens; identical to SEQ ID NO: 2128

SEQ ID NO: 6401 - DNA, 1388 bp, Homo sapiens; identical to SEQ ID NO: 2129

SEQ ID NO: 6402 - DNA, 1400 bp, Homo sapiens; identical to SEQ ID NO: 2130

SEQ ID NO: 6403 - DNA, 600 bp, Homo sapiens; identical to SEQ ID NO: 2131

SEQ ID NO: 6404 - DNA, 600 bp, Homo sapiens; identical to SEQ ID NO: 2131

SEQ ID NO: 6405 - DNA, 1400 bp, Homo sapiens; identical to SEQ ID NO: 2133

SEQ ID NO: 6406 - DNA, 1400 bp, Homo sapiens; identical to SEQ ID NO: 2134

SEQ ID NO: 6407 - DNA, 1400 bp, Homo sapiens; identical to SEQ ID NO: 2134

SEQ ID NO: 6408 - DNA, 1400 bp, Homo sapiens; identical to SEQ ID NO: 2136

SEQ ID NO: 6409 - DNA, 1400 bp, Homo sapiens; identical to SEQ ID NO: 2136

SEQ ID NO: 6410 - DNA, 600 bp, Homo sapiens; identical to SEQ ID NO: 2138

SEQ ID NO: 6411 - DNA, 600 bp, Homo sapiens; identical to SEQ ID NO: 2138

SEQ ID NO: 6412 - DNA, 1311 bp, Homo sapiens; identical to SEQ ID NO: 2140

SEQ ID NO: 6413 - DNA, 1311 bp, Homo sapiens; identical to SEQ ID NO: 2140

SEQ ID NO: 6414 - DNA, 1400 bp, Homo sapiens; identical to SEQ ID NO: 2142

SEQ ID NO: 6415 - DNA, 1400 bp, Homo sapiens; identical to SEQ ID NO: 2142

SEQ ID NO: 6416 - DNA, 600 bp, Homo sapiens; identical to SEQ ID NO: 2144

SEQ ID NO: 6417 - DNA, 600 bp, Homo sapiens; identical to SEQ ID NO: 2144

SEQ ID NO: 6418 - DNA, 1400 bp, Homo sapiens; identical to SEQ ID NO: 2146

SEQ ID NO: 6419 - DNA, 1400 bp, Homo sapiens; identical to SEQ ID NO: 2146

SEQ ID NO: 6420 - DNA, 600 bp, Homo sapiens; identical to SEQ ID NO: 2148

SEQ ID NO: 6421 - DNA, 600 bp, Homo sapiens; identical to SEQ ID NO: 2148

SEQ ID NO: 6422 - DNA, 1400 bp, Homo sapiens; identical to SEQ ID NO: 2150

SEQ ID NO: 6423 - DNA, 1400 bp, Homo sapiens; identical to SEQ ID NO: 2151

SEQ ID NO: 6424 - DNA, 600 bp, Homo sapiens; identical to SEQ ID NO: 2152

SEQ ID NO: 6425 - DNA, 600 bp, Homo sapiens; identical to SEQ ID NO: 2153

SEQ ID NO: 6426 - DNA, 600 bp, Homo sapiens; identical to SEQ ID NO: 2153

SEQ ID NO: 6427 - DNA, 600 bp, Homo sapiens; identical to SEQ ID NO: 2155

SEQ ID NO: 6428 - DNA, 600 bp, Homo sapiens; identical to SEQ ID NO: 2156

SEQ ID NO: 6429 - DNA, 600 bp, Homo sapiens; identical to SEQ ID NO: 2156

SEQ ID NO: 6430 - DNA, 1400 bp, Homo sapiens; identical to SEQ ID NO: 2158

SEQ ID NO: 6431 - DNA, 600 bp, Homo sapiens; identical to SEQ ID NO: 2159

SEQ ID NO: 6432 - DNA, 600 bp, Homo sapiens; identical to SEQ ID NO: 2160

SEQ ID NO: 6433 - DNA, 600 bp, Homo sapiens; identical to SEQ ID NO: 2161

SEQ ID NO: 6434 - DNA, 600 bp, Homo sapiens; identical to SEQ ID NO: 2161

SEQ ID NO: 6435 - DNA, 600 bp, Homo sapiens; identical to SEQ ID NO: 2163

SEQ ID NO: 6436 - DNA, 600 bp, Homo sapiens; identical to SEQ ID NO: 2164

SEQ ID NO: 6437 - DNA, 600 bp, Homo sapiens; identical to SEQ ID NO: 2165

SEQ ID NO: 6438 - DNA, 600 bp, Homo sapiens; identical to SEQ ID NO: 2165

SEQ ID NO: 6439 - DNA, 600 bp, Homo sapiens; identical to SEQ ID NO: 2167

SEQ ID NO: 6440 - DNA, 600 bp, Homo sapiens; identical to SEQ ID NO: 2167

SEQ ID NO: 6441 - DNA, 1400 bp, Homo sapiens; identical to SEQ ID NO: 2169

SEQ ID NO: 6442 - DNA, 1400 bp, Homo sapiens; identical to SEQ ID NO: 2170

SEQ ID NO: 6443 - DNA, 1400 bp, Homo sapiens; identical to SEQ ID NO: 2171

SEQ ID NO: 6444 - DNA, 600 bp, Homo sapiens; identical to SEQ ID NO: 2172

SEQ ID NO: 6445 - DNA, 600 bp, Homo sapiens; identical to SEQ ID NO: 2172

SEQ ID NO: 6446 - DNA, 600 bp, Homo sapiens; identical to SEQ ID NO: 2174

SEQ ID NO: 6447 - DNA, 600 bp, Homo sapiens; identical to SEQ ID NO: 2175

SEQ ID NO: 6448 - DNA, 1400 bp, Homo sapiens; identical to SEQ ID NO: 2176

SEQ ID NO: 6449 - DNA, 1400 bp, Homo sapiens; identical to SEQ ID NO: 2176

SEQ ID NO: 6450 - DNA, 600 bp, Homo sapiens; identical to SEQ ID NO: 2178

SEQ ID NO: 6451 - DNA, 600 bp, Homo sapiens; identical to SEQ ID NO: 2178

SEQ ID NO: 6452 - DNA, 1400 bp, Homo sapiens; identical to SEQ ID NO: 2180

SEQ ID NO: 6453 - DNA, 1400 bp, Homo sapiens; identical to SEQ ID NO: 2180

SEQ ID NO: 6454 - DNA, 1400 bp, Homo sapiens; identical to SEQ ID NO: 2182

SEQ ID NO: 6455 - DNA, 1400 bp, Homo sapiens; identical to SEQ ID NO: 2182

SEQ ID NO: 6456 - DNA, 600 bp, Homo sapiens; identical to SEQ ID NO: 2184

SEQ ID NO: 6457 - DNA, 600 bp, Homo sapiens; identical to SEQ ID NO: 2184

SEQ ID NO: 6458 - DNA, 600 bp, Homo sapiens; identical to SEQ ID NO: 2186

SEQ ID NO: 6459 - DNA, 600 bp, Homo sapiens; identical to SEQ ID NO: 2187

SEQ ID NO: 6460 - DNA, 600 bp, Homo sapiens; identical to SEQ ID NO: 2188

SEQ ID NO: 6461 - DNA, 1400 bp, Homo sapiens; identical to SEQ ID NO: 2189

SEQ ID NO: 6462 - DNA, 1400 bp, Homo sapiens; identical to SEQ ID NO: 2190

SEQ ID NO: 6463 - DNA, 1400 bp, Homo sapiens; identical to SEQ ID NO: 2191

SEQ ID NO: 6464 - DNA, 1400 bp, Homo sapiens; identical to SEQ ID NO: 2191

SEQ ID NO: 6465 - DNA, 1400 bp, Homo sapiens; identical to SEQ ID NO: 2193

SEQ ID NO: 6466 - DNA, 1400 bp, Homo sapiens; identical to SEQ ID NO: 2194

SEQ ID NO: 6467 - DNA, 1400 bp, Homo sapiens; identical to SEQ ID NO: 2194

SEQ ID NO: 6468 - DNA, 1400 bp, Homo sapiens; identical to SEQ ID NO: 2196

SEQ ID NO: 6469 - DNA, 1400 bp, Homo sapiens; identical to SEQ ID NO: 2197

SEQ ID NO: 6470 - DNA, 600 bp, Homo sapiens; identical to SEQ ID NO: 2198

SEQ ID NO: 6471 - DNA, 600 bp, Homo sapiens; identical to SEQ ID NO: 2198

SEQ ID NO: 6472 - DNA, 600 bp, Homo sapiens; identical to SEQ ID NO: 2200

SEQ ID NO: 6473 - DNA, 600 bp, Homo sapiens; identical to SEQ ID NO: 2200

SEQ ID NO: 6474 - DNA, 1400 bp, Homo sapiens; identical to SEQ ID NO: 2202

SEQ ID NO: 6475 - DNA, 1400 bp, Homo sapiens; identical to SEQ ID NO: 2202

SEQ ID NO: 6476 - DNA, 600 bp, Homo sapiens; identical to SEQ ID NO: 2204

SEQ ID NO: 6477 - DNA, 600 bp, Homo sapiens; identical to SEQ ID NO: 2205

SEQ ID NO: 6478 - DNA, 1400 bp, Homo sapiens; identical to SEQ ID NO: 2206

SEQ ID NO: 6479 - DNA, 1400 bp, Homo sapiens; identical to SEQ ID NO: 2207

SEQ ID NO: 6480 - DNA, 600 bp, Homo sapiens; identical to SEQ ID NO: 2208

SEQ ID NO: 6481 - DNA, 600 bp, Homo sapiens; identical to SEQ ID NO: 2209

SEQ ID NO: 6482 - DNA, 600 bp, Homo sapiens; identical to SEQ ID NO: 2209

SEQ ID NO: 6483 - DNA, 600 bp, Homo sapiens; identical to SEQ ID NO: 2211

SEQ ID NO: 6484 - DNA, 1400 bp, Homo sapiens; identical to SEQ ID NO: 2212

SEQ ID NO: 6485 - DNA, 1400 bp, Homo sapiens; identical to SEQ ID NO: 2212

SEQ ID NO: 6486 - DNA, 600 bp, Homo sapiens; identical to SEQ ID NO: 2214

SEQ ID NO: 6487 - DNA, 600 bp, Homo sapiens; identical to SEQ ID NO: 2214

SEQ ID NO: 6488 - DNA, 600 bp, Homo sapiens; identical to SEQ ID NO: 2216

SEQ ID NO: 6489 - DNA, 600 bp, Homo sapiens; identical to SEQ ID NO: 2217

SEQ ID NO: 6490 - DNA, 600 bp, Homo sapiens; identical to SEQ ID NO: 2217

SEQ ID NO: 6491 - DNA, 600 bp, Homo sapiens; identical to SEQ ID NO: 2219

SEQ ID NO: 6492 - DNA, 600 bp, Homo sapiens; identical to SEQ ID NO: 2219

SEQ ID NO: 6493 - DNA, 600 bp, Homo sapiens; identical to SEQ ID NO: 2221

SEQ ID NO: 6494 - DNA, 1380 bp, Homo sapiens; identical to SEQ ID NO: 2222

SEQ ID NO: 6495 - DNA, 600 bp, Homo sapiens; identical to SEQ ID NO: 2223

SEQ ID NO: 6496 - DNA, 600 bp, Homo sapiens; identical to SEQ ID NO: 2223

SEQ ID NO: 6497 - DNA, 600 bp, Homo sapiens; identical to SEQ ID NO: 2225

SEQ ID NO: 6498 - DNA, 1400 bp, Homo sapiens; identical to SEQ ID NO: 2226

SEQ ID NO: 6499 - DNA, 1400 bp, Homo sapiens; identical to SEQ ID NO: 2226

SEQ ID NO: 6500 - DNA, 1400 bp, Homo sapiens; identical to SEQ ID NO: 2228

SEQ ID NO: 6501 - DNA, 600 bp, Homo sapiens; identical to SEQ ID NO: 2229

SEQ ID NO: 6502 - DNA, 600 bp, Homo sapiens; identical to SEQ ID NO: 2230

SEQ ID NO: 6503 - DNA, 600 bp, Homo sapiens; identical to SEQ ID NO: 2230

SEQ ID NO: 6504 - DNA, 1400 bp, Homo sapiens; identical to SEQ ID NO: 2232

SEQ ID NO: 6505 - DNA, 1400 bp, Homo sapiens; identical to SEQ ID NO: 2232

SEQ ID NO: 6506 - DNA, 1400 bp, Homo sapiens; identical to SEQ ID NO: 2234

SEQ ID NO: 6507 - DNA, 1400 bp, Homo sapiens; identical to SEQ ID NO: 2234

SEQ ID NO: 6508 - DNA, 600 bp, Homo sapiens; identical to SEQ ID NO: 2236

SEQ ID NO: 6509 - DNA, 857 bp, Homo sapiens; identical to SEQ ID NO: 2237

SEQ ID NO: 6510 - DNA, 1400 bp, Homo sapiens; identical to SEQ ID NO: 2238

SEQ ID NO: 6511 - DNA, 1400 bp, Homo sapiens; identical to SEQ ID NO: 2238

SEQ ID NO: 6512 - DNA, 600 bp, Homo sapiens; identical to SEQ ID NO: 2240

SEQ ID NO: 6513 - DNA, 600 bp, Homo sapiens; identical to SEQ ID NO: 2240

SEQ ID NO: 6514 - DNA, 1400 bp, Homo sapiens; identical to SEQ ID NO: 2242

SEQ ID NO: 6515 - DNA, 1400 bp, Homo sapiens; identical to SEQ ID NO: 2242

SEQ ID NO: 6516 - DNA, 600 bp, Homo sapiens; identical to SEQ ID NO: 2244

SEQ ID NO: 6517 - DNA, 1400 bp, Homo sapiens; identical to SEQ ID NO: 2245

SEQ ID NO: 6518 - DNA, 600 bp, Homo sapiens; identical to SEQ ID NO: 2246

SEQ ID NO: 6519 - DNA, 920 bp, Homo sapiens; identical to SEQ ID NO: 2247

SEQ ID NO: 6520 - DNA, 920 bp, Homo sapiens; identical to SEQ ID NO: 2247

SEQ ID NO: 6521 - DNA, 1400 bp, Homo sapiens; identical to SEQ ID NO: 2249

SEQ ID NO: 6522 - DNA, 600 bp, Homo sapiens; identical to SEQ ID NO: 2250

SEQ ID NO: 6523 - DNA, 600 bp, Homo sapiens; identical to SEQ ID NO: 2250

SEQ ID NO: 6524 - DNA, 600 bp, Homo sapiens; identical to SEQ ID NO: 2252

SEQ ID NO: 6525 - DNA, 1281 bp, Homo sapiens; identical to SEQ ID NO: 2253

SEQ ID NO: 6526 - DNA, 600 bp, Homo sapiens; identical to SEQ ID NO: 2254

SEQ ID NO: 6527 - DNA, 600 bp, Homo sapiens; identical to SEQ ID NO: 2255

SEQ ID NO: 6528 - DNA, 600 bp, Homo sapiens; identical to SEQ ID NO: 2255

SEQ ID NO: 6529 - DNA, 1040 bp, Homo sapiens; identical to SEQ ID NO: 2257

SEQ ID NO: 6530 - DNA, 1040 bp, Homo sapiens; identical to SEQ ID NO: 2257

SEQ ID NO: 6531 - DNA, 1400 bp, Homo sapiens; identical to SEQ ID NO: 2259

SEQ ID NO: 6532 - DNA, 1400 bp, Homo sapiens; identical to SEQ ID NO: 2259

SEQ ID NO: 6533 - DNA, 1400 bp, Homo sapiens; identical to SEQ ID NO: 2261

SEQ ID NO: 6534 - DNA, 600 bp, Homo sapiens; identical to SEQ ID NO: 2262

SEQ ID NO: 6535 - DNA, 600 bp, Homo sapiens; identical to SEQ ID NO: 2262

SEQ ID NO: 6536 - DNA, 1400 bp, Homo sapiens; identical to SEQ ID NO: 2264

SEQ ID NO: 6537 - DNA, 1400 bp, Homo sapiens; identical to SEQ ID NO: 2264

SEQ ID NO: 6538 - DNA, 1400 bp, Homo sapiens; identical to SEQ ID NO: 2266

SEQ ID NO: 6539 - DNA, 600 bp, Homo sapiens; identical to SEQ ID NO: 2267

SEQ ID NO: 6540 - DNA, 600 bp, Homo sapiens; identical to SEQ ID NO: 2268

SEQ ID NO: 6541 - DNA, 600 bp, Homo sapiens; identical to SEQ ID NO: 2268

SEQ ID NO: 6542 - DNA, 600 bp, Homo sapiens; identical to SEQ ID NO: 2270

SEQ ID NO: 6543 - DNA, 600 bp, Homo sapiens; identical to SEQ ID NO: 2271

SEQ ID NO: 6544 - DNA, 600 bp, Homo sapiens; identical to SEQ ID NO: 2271

SEQ ID NO: 6545 - DNA, 1400 bp, Homo sapiens; identical to SEQ ID NO: 2273

SEQ ID NO: 6546 - DNA, 1400 bp, Homo sapiens; identical to SEQ ID NO: 2273

SEQ ID NO: 6547 - DNA, 600 bp, Homo sapiens; identical to SEQ ID NO: 2275

SEQ ID NO: 6548 - DNA, 600 bp, Homo sapiens; identical to SEQ ID NO: 2275

SEQ ID NO: 6549 - DNA, 1400 bp, Homo sapiens; identical to SEQ ID NO: 2277

SEQ ID NO: 6550 - DNA, 1400 bp, Homo sapiens; identical to SEQ ID NO: 2278

SEQ ID NO: 6551 - DNA, 1400 bp, Homo sapiens; identical to SEQ ID NO: 2279

SEQ ID NO: 6552 - DNA, 600 bp, Homo sapiens; identical to SEQ ID NO: 2280

SEQ ID NO: 6553 - DNA, 600 bp, Homo sapiens; identical to SEQ ID NO: 2280

SEQ ID NO: 6554 - DNA, 600 bp, Homo sapiens; identical to SEQ ID NO: 2282

SEQ ID NO: 6555 - DNA, 600 bp, Homo sapiens; identical to SEQ ID NO: 2282

SEQ ID NO: 6556 - DNA, 600 bp, Homo sapiens; identical to SEQ ID NO: 2284

SEQ ID NO: 6557 - DNA, 600 bp, Homo sapiens; identical to SEQ ID NO: 2285

SEQ ID NO: 6558 - DNA, 1400 bp, Homo sapiens; identical to SEQ ID NO: 2286

SEQ ID NO: 6559 - DNA, 600 bp, Homo sapiens; identical to SEQ ID NO: 2287
  misc_feature (274)..(274): n is a, c, g, or t

SEQ ID NO: 6560 - DNA, 1400 bp, Homo sapiens; identical to SEQ ID NO: 2288

SEQ ID NO: 6561 - DNA, 1400 bp, Homo sapiens; identical to SEQ ID NO: 2289

SEQ ID NO: 6562 - DNA, 1127 bp, Homo sapiens; identical to SEQ ID NO: 2290

SEQ ID NO: 6563 - DNA, 600 bp, Homo sapiens; identical to SEQ ID NO: 2291

SEQ ID NO: 6564 - DNA, 600 bp, Homo sapiens; identical to SEQ ID NO: 2291

SEQ ID NO: 6565 - DNA, 1400 bp, Homo sapiens; identical to SEQ ID NO: 2293

SEQ ID NO: 6566 - DNA, 1400 bp, Homo sapiens; identical to SEQ ID NO: 2294

SEQ ID NO: 6567 - DNA, 1400 bp, Homo sapiens; identical to SEQ ID NO: 2295

SEQ ID NO: 6568 - DNA, 1400 bp, Homo sapiens; identical to SEQ ID NO: 2296

SEQ ID NO: 6569 - DNA, 1400 bp, Homo sapiens; identical to SEQ ID NO: 2297

SEQ ID NO: 6570 - DNA, 600 bp, Homo sapiens; identical to SEQ ID NO: 2298

SEQ ID NO: 6571 - DNA, 1400 bp, Homo sapiens; identical to SEQ ID NO: 2299

SEQ ID NO: 6572 - DNA, 1400 bp, Homo sapiens; identical to SEQ ID NO: 2299

SEQ ID NO: 6573 - DNA, 1400 bp, Homo sapiens; identical to SEQ ID NO: 2301

SEQ ID NO: 6574 - DNA, 600 bp, Homo sapiens; identical to SEQ ID NO: 2302

SEQ ID NO: 6575 - DNA, 600 bp, Homo sapiens; identical to SEQ ID NO: 2302

SEQ ID NO: 6576 - DNA, 600 bp, Homo sapiens; identical to SEQ ID NO: 2304

SEQ ID NO: 6577 - DNA, 600 bp, Homo sapiens; identical to SEQ ID NO: 2304

SEQ ID NO: 6578 - DNA, 600 bp, Homo sapiens; identical to SEQ ID NO: 2306

SEQ ID NO: 6579 - DNA, 600 bp, Homo sapiens; identical to SEQ ID NO: 2306

SEQ ID NO: 6580 - DNA, 600 bp, Homo sapiens; identical to SEQ ID NO: 2308

SEQ ID NO: 6581 - DNA, 600 bp, Homo sapiens; identical to SEQ ID NO: 2309

SEQ ID NO: 6582 - DNA, 600 bp, Homo sapiens; identical to SEQ ID NO: 2309

SEQ ID NO: 6583 - DNA, 600 bp, Homo sapiens; identical to SEQ ID NO: 2311

SEQ ID NO: 6584 - DNA, 600 bp, Homo sapiens; identical to SEQ ID NO: 2312

SEQ ID NO: 6585 - DNA, 1400 bp, Homo sapiens; identical to SEQ ID NO: 2313

SEQ ID NO: 6586 - DNA, 600 bp, Homo sapiens; identical to SEQ ID NO: 2314

SEQ ID NO: 6587 - DNA, 600 bp, Homo sapiens; identical to SEQ ID NO: 2315

SEQ ID NO: 6588 - DNA, 600 bp, Homo sapiens; identical to SEQ ID NO: 2316

SEQ ID NO: 6589 - DNA, 600 bp, Homo sapiens; identical to SEQ ID NO: 2316

SEQ ID NO: 6590 - DNA, 1366 bp, Homo sapiens; identical to SEQ ID NO: 2318

SEQ ID NO: 6591 - DNA, 1400 bp, Homo sapiens; identical to SEQ ID NO: 2319

SEQ ID NO: 6592 - DNA, 196 bp, Homo sapiens; identical to SEQ ID NO: 2320

SEQ ID NO: 6593 - DNA, 196 bp, Homo sapiens; identical to SEQ ID NO: 2320

SEQ ID NO: 6594 - DNA, 1400 bp, Homo sapiens; identical to SEQ ID NO: 2322

SEQ ID NO: 6595 - DNA, 1400 bp, Homo sapiens; identical to SEQ ID NO: 2323

SEQ ID NO: 6596 - DNA, 800 bp, Homo sapiens; identical to SEQ ID NO: 2324

SEQ ID NO: 6597 - DNA, 802 bp, Homo sapiens; identical to SEQ ID NO: 2325

SEQ ID NO: 6598 - DNA, 600 bp, Homo sapiens; identical to SEQ ID NO: 2326

SEQ ID NO: 6599 - DNA, 1400 bp, Homo sapiens; identical to SEQ ID NO: 2327

SEQ ID NO: 6600 - DNA, 600 bp, Homo sapiens; identical to SEQ ID NO: 2328

SEQ ID NO: 6601 - DNA, 600 bp, Homo sapiens; identical to SEQ ID NO: 2329

SEQ ID NO: 6602 - DNA, 600 bp, Homo sapiens; identical to SEQ ID NO: 2329

SEQ ID NO: 6603 - DNA, 600 bp, Homo sapiens; identical to SEQ ID NO: 2331

SEQ ID NO: 6604 - DNA, 600 bp, Homo sapiens; identical to SEQ ID NO: 2332

SEQ ID NO: 6605 - DNA, 600 bp, Homo sapiens; identical to SEQ ID NO: 2332

SEQ ID NO: 6606 - DNA, 600 bp, Homo sapiens; identical to SEQ ID NO: 2334

SEQ ID NO: 6607 - DNA, 600 bp, Homo sapiens; identical to SEQ ID NO: 2335

SEQ ID NO: 6608 - DNA, 600 bp, Homo sapiens; identical to SEQ ID NO: 2335

SEQ ID NO: 6609 - DNA, 1400 bp, Homo sapiens; identical to SEQ ID NO: 2337

SEQ ID NO: 6610 - DNA, 600 bp, Homo sapiens; identical to SEQ ID NO: 2338

SEQ ID NO: 6611 - DNA, 1400 bp, Homo sapiens; identical to SEQ ID NO: 2339

SEQ ID NO: 6612 - DNA, 600 bp, Homo sapiens; identical to SEQ ID NO: 2340

SEQ ID NO: 6613 - DNA, 1400 bp, Homo sapiens; identical to SEQ ID NO: 2341

SEQ ID NO: 6614 - DNA, 600 bp, Homo sapiens; identical to SEQ ID NO: 2342

SEQ ID NO: 6615 - DNA, 600 bp, Homo sapiens; identical to SEQ ID NO: 2342

SEQ ID NO: 6616 - DNA, 600 bp, Homo sapiens; identical to SEQ ID NO: 2344

SEQ ID NO: 6617 - DNA, 600 bp, Homo sapiens; identical to SEQ ID NO: 2344

SEQ ID NO: 6618 - DNA, 600 bp, Homo sapiens; identical to SEQ ID NO: 2346

SEQ ID NO: 6619 - DNA, 600 bp, Homo sapiens; identical to SEQ ID NO: 2346

SEQ ID NO: 6620 - DNA, 600 bp, Homo sapiens; identical to SEQ ID NO: 2348

SEQ ID NO: 6621 - DNA, 600 bp, Homo sapiens; identical to SEQ ID NO: 2349

SEQ ID NO: 6622 - DNA, 600 bp, Homo sapiens; identical to SEQ ID NO: 2350

SEQ ID NO: 6623 - DNA, 600 bp, Homo sapiens; identical to SEQ ID NO: 2350

SEQ ID NO: 6624 - DNA, 1400 bp, Homo sapiens; identical to SEQ ID NO: 2352

SEQ ID NO: 6625 - DNA, 600 bp, Homo sapiens; identical to SEQ ID NO: 2353

SEQ ID NO: 6626 - DNA, 1400 bp, Homo sapiens; identical to SEQ ID NO: 2354

SEQ ID NO: 6627 - DNA, 1400 bp, Homo sapiens; identical to SEQ ID NO: 2354

SEQ ID NO: 6628 - DNA, 600 bp, Homo sapiens; identical to SEQ ID NO: 2356

SEQ ID NO: 6629 - DNA, 600 bp, Homo sapiens; identical to SEQ ID NO: 2356

SEQ ID NO: 6630 - DNA, 600 bp, Homo sapiens; identical to SEQ ID NO: 2358

SEQ ID NO: 6631 - DNA, 600 bp, Homo sapiens; identical to SEQ ID NO: 2358

SEQ ID NO: 6632 - DNA, 1400 bp, Homo sapiens; identical to SEQ ID NO: 2360

SEQ ID NO: 6633 - DNA, 1400 bp, Homo sapiens; identical to SEQ ID NO: 2360

SEQ ID NO: 6634 - DNA, 1400 bp, Homo sapiens; identical to SEQ ID NO: 2362

SEQ ID NO: 6635 - DNA, 600 bp, Homo sapiens; identical to SEQ ID NO: 2363

SEQ ID NO: 6636 - DNA, 600 bp, Homo sapiens; identical to SEQ ID NO: 2363

SEQ ID NO: 6637 - DNA, 600 bp, Homo sapiens; identical to SEQ ID NO: 2365

SEQ ID NO: 6638 - DNA, 600 bp, Homo sapiens; identical to SEQ ID NO: 2365

SEQ ID NO: 6639 - DNA, 1400 bp, Homo sapiens; identical to SEQ ID NO: 2367

SEQ ID NO: 6640 - DNA, 600 bp, Homo sapiens; identical to SEQ ID NO: 2368

SEQ ID NO: 6641 - DNA, 600 bp, Homo sapiens; identical to SEQ ID NO: 2368

SEQ ID NO: 6642 - DNA, 600 bp, Homo sapiens; identical to SEQ ID NO: 2370

SEQ ID NO: 6643 - DNA, 1400 bp, Homo sapiens; identical to SEQ ID NO: 2371

SEQ ID NO: 6644 - DNA, 1400 bp, Homo sapiens; identical to SEQ ID NO: 2371

SEQ ID NO: 6645 - DNA, 600 bp, Homo sapiens; identical to SEQ ID NO: 2373

SEQ ID NO: 6646 - DNA, 1400 bp, Homo sapiens; identical to SEQ ID NO: 2374

SEQ ID NO: 6647 - DNA, 600 bp, Homo sapiens; identical to SEQ ID NO: 2375

SEQ ID NO: 6648 - DNA, 600 bp, Homo sapiens; identical to SEQ ID NO: 2375

SEQ ID NO: 6649 - DNA, 600 bp, Homo sapiens; identical to SEQ ID NO: 2377

SEQ ID NO: 6650 - DNA, 600 bp, Homo sapiens; identical to SEQ ID NO: 2377

SEQ ID NO: 6651 - DNA, 1400 bp, Homo sapiens; identical to SEQ ID NO: 2379

SEQ ID NO: 6652 - DNA, 600 bp, Homo sapiens; identical to SEQ ID NO: 2380

SEQ ID NO: 6653 - DNA, 1400 bp, Homo sapiens; identical to SEQ ID NO: 2381

SEQ ID NO: 6654 - DNA, 600 bp, Homo sapiens; identical to SEQ ID NO: 2382

SEQ ID NO: 6655 - DNA, 600 bp, Homo sapiens; identical to SEQ ID NO: 2382

SEQ ID NO: 6656 - DNA, 1400 bp, Homo sapiens; identical to SEQ ID NO: 2384

SEQ ID NO: 6657 - DNA, 1400 bp, Homo sapiens; identical to SEQ ID NO: 2385

SEQ ID NO: 6658 - DNA, 1157 bp, Homo sapiens; identical to SEQ ID NO: 2386

SEQ ID NO: 6659 - DNA, 600 bp, Homo sapiens; identical to SEQ ID NO: 2387

SEQ ID NO: 6660 - DNA, 600 bp, Homo sapiens; identical to SEQ ID NO: 2387

SEQ ID NO: 6661 - DNA, 600 bp, Homo sapiens; identical to SEQ ID NO: 2389

SEQ ID NO: 6662 - DNA, 600 bp, Homo sapiens; identical to SEQ ID NO: 2390

SEQ ID NO: 6663 - DNA, 600 bp, Homo sapiens; identical to SEQ ID NO: 2390

SEQ ID NO: 6664 - DNA, 600 bp, Homo sapiens; identical to SEQ ID NO: 2392

SEQ ID NO: 6665 - DNA, 600 bp, Homo sapiens; identical to SEQ ID NO: 2392

SEQ ID NO: 6666 - DNA, 600 bp, Homo sapiens; identical to SEQ ID NO: 2394

SEQ ID NO: 6667 - DNA, 1400 bp, Homo sapiens; identical to SEQ ID NO: 2395

SEQ ID NO: 6668 - DNA, 600 bp, Homo sapiens; identical to SEQ ID NO: 2396

SEQ ID NO: 6669 - DNA, 600 bp, Homo sapiens; identical to SEQ ID NO: 2396

SEQ ID NO: 6670 - DNA, 1400 bp, Homo sapiens; identical to SEQ ID NO: 2398

SEQ ID NO: 6671 - DNA, 1400 bp, Homo sapiens; identical to SEQ ID NO: 2398

SEQ ID NO: 6672 - DNA, 1400 bp, Homo sapiens; identical to SEQ ID NO: 2400

SEQ ID NO: 6673 - DNA, 1400 bp, Homo sapiens; identical to SEQ ID NO: 2401

SEQ ID NO: 6674 - DNA, 1400 bp, Homo sapiens; identical to SEQ ID NO: 2402

SEQ ID NO: 6675 - DNA, 600 bp, Homo sapiens; identical to SEQ ID NO: 2403

SEQ ID NO: 6676 - DNA, 600 bp, Homo sapiens; identical to SEQ ID NO: 2403

SEQ ID NO: 6677 - DNA, 1400 bp, Homo sapiens; identical to SEQ ID NO: 2405

SEQ ID NO: 6678 - DNA, 1400 bp, Homo sapiens; identical to SEQ ID NO: 2406

SEQ ID NO: 6679 - DNA, 1400 bp, Homo sapiens; identical to SEQ ID NO: 2406

SEQ ID NO: 6680 - DNA, 600 bp, Homo sapiens; identical to SEQ ID NO: 2408

SEQ ID NO: 6681 - DNA, 600 bp, Homo sapiens; identical to SEQ ID NO: 2409

SEQ ID NO: 6682 - DNA, 600 bp, Homo sapiens; identical to SEQ ID NO: 2409

SEQ ID NO: 6683 - DNA, 600 bp, Homo sapiens; identical to SEQ ID NO: 2411

SEQ ID NO: 6684 - DNA, 1280 bp, Homo sapiens; identical to SEQ ID NO: 2412

SEQ ID NO: 6685 - DNA, 600 bp, Homo sapiens; identical to SEQ ID NO: 2413

SEQ ID NO: 6686 - DNA, 600 bp, Homo sapiens; identical to SEQ ID NO: 2414

SEQ ID NO: 6687 - DNA, 600 bp, Homo sapiens; identical to SEQ ID NO: 2414

SEQ ID NO: 6688 - DNA, 1400 bp, Homo sapiens; identical to SEQ ID NO: 2416

SEQ ID NO: 6689 - DNA, 600 bp, Homo sapiens; identical to SEQ ID NO: 2417

SEQ ID NO: 6690 - DNA, 1400 bp, Homo sapiens; identical to SEQ ID NO: 2418

SEQ ID NO: 6691 - DNA, 600 bp, Homo sapiens; identical to SEQ ID NO: 2419

SEQ ID NO: 6692 - DNA, 600 bp, Homo sapiens; identical to SEQ ID NO: 2419

SEQ ID NO: 6693 - DNA, 600 bp, Homo sapiens; identical to SEQ ID NO: 2421

SEQ ID NO: 6694 - DNA, 600 bp, Homo sapiens; identical to SEQ ID NO: 2421

SEQ ID NO: 6695 - DNA, 600 bp, Homo sapiens; identical to SEQ ID NO: 2423

SEQ ID NO: 6696 - DNA, 600 bp, Homo sapiens; identical to SEQ ID NO: 2423

SEQ ID NO: 6697 - DNA, 600 bp, Homo sapiens; identical to SEQ ID NO: 2425

SEQ ID NO: 6698 - DNA, 960 bp, Homo sapiens; identical to SEQ ID NO: 2426

SEQ ID NO: 6699 - DNA, 960 bp, Homo sapiens; identical to SEQ ID NO: 2426

SEQ ID NO: 6700 - DNA, 600 bp, Homo sapiens; identical to SEQ ID NO: 2428

SEQ ID NO: 6701 - DNA, 600 bp, Homo sapiens; identical to SEQ ID NO: 2428

SEQ ID NO: 6702 - DNA, 1277 bp, Homo sapiens; identical to SEQ ID NO: 2430

SEQ ID NO: 6703 - DNA, 600 bp, Homo sapiens; identical to SEQ ID NO: 2431

SEQ ID NO: 6704 - DNA, 600 bp, Homo sapiens; identical to SEQ ID NO: 2432

SEQ ID NO: 6705 - DNA, 600 bp, Homo sapiens; identical to SEQ ID NO: 2432

SEQ ID NO: 6706 - DNA, 600 bp, Homo sapiens; identical to SEQ ID NO: 2434

SEQ ID NO: 6707 - DNA, 600 bp, Homo sapiens; identical to SEQ ID NO: 2434

SEQ ID NO: 6708 - DNA, 600 bp, Homo sapiens; identical to SEQ ID NO: 2436

SEQ ID NO: 6709 - DNA, 600 bp, Homo sapiens; identical to SEQ ID NO: 2436

SEQ ID NO: 6710 - DNA, 600 bp, Homo sapiens; identical to SEQ ID NO: 2438

SEQ ID NO: 6711 - DNA, 600 bp, Homo sapiens; identical to SEQ ID NO: 2439

SEQ ID NO: 6712 - DNA, 600 bp, Homo sapiens; identical to SEQ ID NO: 2440

SEQ ID NO: 6713 - DNA, 600 bp, Homo sapiens; identical to SEQ ID NO: 2441

SEQ ID NO: 6714 - DNA, 600 bp, Homo sapiens; identical to SEQ ID NO: 2442

SEQ ID NO: 6715 - DNA, 600 bp, Homo sapiens; identical to SEQ ID NO: 2442

SEQ ID NO: 6716 - DNA, 1400 bp, Homo sapiens; identical to SEQ ID NO: 2444

SEQ ID NO: 6717 - DNA, 600 bp, Homo sapiens; identical to SEQ ID NO: 2445

SEQ ID NO: 6718 - DNA, 600 bp, Homo sapiens; identical to SEQ ID NO: 2445

SEQ ID NO: 6719 - DNA, 600 bp, Homo sapiens; identical to SEQ ID NO: 2447

SEQ ID NO: 6720 - DNA, 600 bp, Homo sapiens; identical to SEQ ID NO: 2447

SEQ ID NO: 6721 - DNA, 1399 bp, Homo sapiens; identical to SEQ ID NO: 2449

SEQ ID NO: 6722 - DNA, 1399 bp, Homo sapiens; identical to SEQ ID NO: 2449

SEQ ID NO: 6723 - DNA, 1400 bp, Homo sapiens; identical to SEQ ID NO: 2451

SEQ ID NO: 6724 - DNA, 600 bp, Homo sapiens; identical to SEQ ID NO: 2452

SEQ ID NO: 6725 - DNA, 1400 bp, Homo sapiens; identical to SEQ ID NO: 2453

SEQ ID NO: 6726 - DNA, 1400 bp, Homo sapiens; identical to SEQ ID NO: 2453

SEQ ID NO: 6727 - DNA, 1400 bp, Homo sapiens; identical to SEQ ID NO: 2455

SEQ ID NO: 6728 - DNA, 1400 bp, Homo sapiens; identical to SEQ ID NO: 2455

SEQ ID NO: 6729 - DNA, 600 bp, Homo sapiens; identical to SEQ ID NO: 2457

SEQ ID NO: 6730 - DNA, 600 bp, Homo sapiens; identical to SEQ ID NO: 2457

SEQ ID NO: 6731 - DNA, 600 bp, Homo sapiens; identical to SEQ ID NO: 2459

SEQ ID NO: 6732 - DNA, 600 bp, Homo sapiens; identical to SEQ ID NO: 2459

SEQ ID NO: 6733 - DNA, 1400 bp, Homo sapiens; identical to SEQ ID NO: 2461

SEQ ID NO: 6734 - DNA, 600 bp, Homo sapiens; identical to SEQ ID NO: 2462

SEQ ID NO: 6735 - DNA, 600 bp, Homo sapiens; identical to SEQ ID NO: 2462

SEQ ID NO: 6736 - DNA, 1400 bp, Homo sapiens; identical to SEQ ID NO: 2464

SEQ ID NO: 6737 - DNA, 600 bp, Homo sapiens; identical to SEQ ID NO: 2465

SEQ ID NO: 6738 - DNA, 600 bp, Homo sapiens; identical to SEQ ID NO: 2465

SEQ ID NO: 6739 - DNA, 600 bp, Homo sapiens; identical to SEQ ID NO: 2467

SEQ ID NO: 6740 - DNA, 600 bp, Homo sapiens; identical to SEQ ID NO: 2467

SEQ ID NO: 6741 - DNA, 1400 bp, Homo sapiens; identical to SEQ ID NO: 2469

SEQ ID NO: 6742 - DNA, 1400 bp, Homo sapiens; identical to SEQ ID NO: 2470
  misc_feature (539)..(539): n is a, c, g, or t
  misc_feature (1206)..(1206): n is a, c, g, or t
  misc_feature (1220)..(1220): n is a, c, g, or t
  misc_feature (1235)..(1235): n is a, c, g, or t
  misc_feature (1291)..(1291): n is a, c, g, or t
  misc_feature (1294)..(1294): n is a, c, g, or t
  misc_feature (1337)..(1337): n is a, c, g, or t
  misc_feature (1371)..(1371): n is a, c, g, or t

SEQ ID NO: 6743 - DNA, 1400 bp, Homo sapiens; identical to SEQ ID NO: 2470
  misc_feature (539)..(539): n is a, c, g, or t
  misc_feature (1206)..(1206): n is a, c, g, or t
  misc_feature (1220)..(1220): n is a, c, g, or t
  misc_feature (1235)..(1235): n is a, c, g, or t
  misc_feature (1291)..(1291): n is a, c, g, or t
  misc_feature (1294)..(1294): n is a, c, g, or t
  misc_feature (1337)..(1337): n is a, c, g, or t
  misc_feature (1371)..(1371): n is a, c, g, or t

SEQ ID NO: 6744 - DNA, 600 bp, Homo sapiens; identical to SEQ ID NO: 2472

SEQ ID NO: 6745 - DNA, 600 bp, Homo sapiens; identical to SEQ ID NO: 2472

SEQ ID NO: 6746 - DNA, 600 bp, Homo sapiens; identical to SEQ ID NO: 2474

SEQ ID NO: 6747 - DNA, 600 bp, Homo sapiens; identical to SEQ ID NO: 2474

SEQ ID NO: 6748 - DNA, 1400 bp, Homo sapiens; identical to SEQ ID NO: 2476

SEQ ID NO: 6749 - DNA, 600 bp, Homo sapiens; identical to SEQ ID NO: 2477

SEQ ID NO: 6750 - DNA, 600 bp, Homo sapiens; identical to SEQ ID NO: 2478

SEQ ID NO: 6751 - DNA, 600 bp, Homo sapiens; identical to SEQ ID NO: 2479

SEQ ID NO: 6752 - DNA, 600 bp, Homo sapiens; identical to SEQ ID NO: 2479

SEQ ID NO: 6753 - DNA, 1400 bp, Homo sapiens; identical to SEQ ID NO: 2481

SEQ ID NO: 6754 - DNA, 1400 bp, Homo sapiens; identical to SEQ ID NO: 2482

SEQ ID NO: 6755 - DNA, 1400 bp, Homo sapiens; identical to SEQ ID NO: 2483

SEQ ID NO: 6756 - DNA, 1400 bp, Homo sapiens; identical to SEQ ID NO: 2484

SEQ ID NO: 6757 - DNA, 1400 bp, Homo sapiens; identical to SEQ ID NO: 2484

SEQ ID NO: 6758 - DNA, 600 bp, Homo sapiens; identical to SEQ ID NO: 2486

SEQ ID NO: 6759 - DNA, 1400 bp, Homo sapiens; identical to SEQ ID NO: 2487

SEQ ID NO: 6760 - DNA, 600 bp, Homo sapiens; identical to SEQ ID NO: 2488

SEQ ID NO: 6761 - DNA, 600 bp, Homo sapiens; identical to SEQ ID NO: 2489

SEQ ID NO: 6762 - DNA, 600 bp, Homo sapiens; identical to SEQ ID NO: 2489

SEQ ID NO: 6763 - DNA, 1400 bp, Homo sapiens; identical to SEQ ID NO: 2491

SEQ ID NO: 6764 - DNA, 1368 bp, Homo sapiens; identical to SEQ ID NO: 2492

SEQ ID NO: 6765 - DNA, 600 bp, Homo sapiens; identical to SEQ ID NO: 2493

SEQ ID NO: 6766 - DNA, 600 bp, Homo sapiens; identical to SEQ ID NO: 2493

SEQ ID NO: 6767 - DNA, 600 bp, Homo sapiens; identical to SEQ ID NO: 2495

SEQ ID NO: 6768 - DNA, 1400 bp, Homo sapiens; identical to SEQ ID NO: 2496

SEQ ID NO: 6769 - DNA, 600 bp, Homo sapiens; identical to SEQ ID NO: 2497

SEQ ID NO: 6770 - DNA, 600 bp, Homo sapiens; identical to SEQ ID NO: 2497

SEQ ID NO: 6771 - DNA, 600 bp, Homo sapiens; identical to SEQ ID NO: 2499

SEQ ID NO: 6772 - DNA, 600 bp, Homo sapiens; identical to SEQ ID NO: 2500

SEQ ID NO: 6773 - DNA, 600 bp, Homo sapiens; identical to SEQ ID NO: 2501

SEQ ID NO: 6774 - DNA, 600 bp, Homo sapiens; identical to SEQ ID NO: 2501

SEQ ID NO: 6775 - DNA, 600 bp, Homo sapiens; identical to SEQ ID NO: 2503

SEQ ID NO: 6776 - DNA, 600 bp, Homo sapiens; identical to SEQ ID NO: 2504

SEQ ID NO: 6777 - DNA, 1400 bp, Homo sapiens; identical to SEQ ID NO: 2505

SEQ ID NO: 6778 - DNA, 1400 bp, Homo sapiens; identical to SEQ ID NO: 2505

SEQ ID NO: 6779 - DNA, 600 bp, Homo sapiens; identical to SEQ ID NO: 2507

SEQ ID NO: 6780 - DNA, 600 bp, Homo sapiens; identical to SEQ ID NO: 2507

SEQ ID NO: 6781 - DNA, 1400 bp, Homo sapiens; identical to SEQ ID NO: 2509

SEQ ID NO: 6782 - DNA, 1400 bp, Homo sapiens; identical to SEQ ID NO: 2510

SEQ ID NO: 6783 - DNA, 600 bp, Homo sapiens; identical to SEQ ID NO: 2511

SEQ ID NO: 6784 - DNA, 600 bp, Homo sapiens; identical to SEQ ID NO: 2511

SEQ ID NO: 6785 - DNA, 600 bp, Homo sapiens; identical to SEQ ID NO: 2513

SEQ ID NO: 6786 - DNA, 600 bp, Homo sapiens; identical to SEQ ID NO: 2513

SEQ ID NO: 6787 - DNA, 600 bp, Homo sapiens; identical to SEQ ID NO: 2515

SEQ ID NO: 6788 - DNA, 600 bp, Homo sapiens; identical to SEQ ID NO: 2515

SEQ ID NO: 6789 - DNA, 600 bp, Homo sapiens; identical to SEQ ID NO: 2517

SEQ ID NO: 6790 - DNA, 600 bp, Homo sapiens; identical to SEQ ID NO: 2517

SEQ ID NO: 6791 - DNA, 1400 bp, Homo sapiens; identical to SEQ ID NO: 2519

SEQ ID NO: 6792 - DNA, 969 bp, Homo sapiens; identical to SEQ ID NO: 2520

SEQ ID NO: 6793 - DNA, 600 bp, Homo sapiens; identical to SEQ ID NO: 2521

SEQ ID NO: 6794 - DNA, 600 bp, Homo sapiens; identical to SEQ ID NO: 2522

SEQ ID NO: 6795 - DNA, 600 bp, Homo sapiens; identical to SEQ ID NO: 2523

SEQ ID NO: 6796 - DNA, 600 bp, Homo sapiens; identical to SEQ ID NO: 2523

SEQ ID NO: 6797 - DNA, 1400 bp, Homo sapiens; identical to SEQ ID NO: 2525

SEQ ID NO: 6798 - DNA, 1400 bp, Homo sapiens; identical to SEQ ID NO: 2525

SEQ ID NO: 6799 - DNA, 600 bp, Homo sapiens; identical to SEQ ID NO: 2527

SEQ ID NO: 6800 - DNA, 1400 bp, Homo sapiens; identical to SEQ ID NO: 2528

SEQ ID NO: 6801 - DNA, 600 bp, Homo sapiens; identical to SEQ ID NO: 2529

SEQ ID NO: 6802 - DNA, 600 bp, Homo sapiens; identical to SEQ ID NO: 2529

SEQ ID NO: 6803 - DNA, 600 bp, Homo sapiens; identical to SEQ ID NO: 2531

SEQ ID NO: 6804 - DNA, 600 bp, Homo sapiens; identical to SEQ ID NO: 2532

SEQ ID NO: 6805 - DNA, 1400 bp, Homo sapiens; identical to SEQ ID NO: 2533

SEQ ID NO: 6806 - DNA, 600 bp, Homo sapiens; identical to SEQ ID NO: 2534

SEQ ID NO: 6807 - DNA, 600 bp, Homo sapiens; identical to SEQ ID NO: 2535

SEQ ID NO: 6808 - DNA, 600 bp, Homo sapiens; identical to SEQ ID NO: 2535

SEQ ID NO: 6809 - DNA, 600 bp, Homo sapiens; identical to SEQ ID NO: 2537

SEQ ID NO: 6810 - DNA, 600 bp, Homo sapiens; identical to SEQ ID NO: 2537

SEQ ID NO: 6811 - DNA, 600 bp, Homo sapiens; identical to SEQ ID NO: 2539

SEQ ID NO: 6812 - DNA, 600 bp, Homo sapiens; identical to SEQ ID NO: 2540

SEQ ID NO: 6813 - DNA, 1400 bp, Homo sapiens; identical to SEQ ID NO: 2541

SEQ ID NO: 6814 - DNA, 600 bp, Homo sapiens; identical to SEQ ID NO: 2542

SEQ ID NO: 6815 - DNA, 600 bp, Homo sapiens; identical to SEQ ID NO: 2543

SEQ ID NO: 6816 - DNA, 600 bp, Homo sapiens; identical to SEQ ID NO: 2544

SEQ ID NO: 6817 - DNA, 1400 bp, Homo sapiens; identical to SEQ ID NO: 2545

SEQ ID NO: 6818 - DNA, 1400 bp, Homo sapiens; identical to SEQ ID NO: 2546

SEQ ID NO: 6819 - DNA, 600 bp, Homo sapiens; identical to SEQ ID NO: 2547

SEQ ID NO: 6820 - DNA, 600 bp, Homo sapiens; identical to SEQ ID NO: 2548

SEQ ID NO: 6821 - DNA, 600 bp, Homo sapiens; identical to SEQ ID NO: 2549

SEQ ID NO: 6822 - DNA, 600 bp, Homo sapiens; identical to SEQ ID NO: 2549

SEQ ID NO: 6823 - DNA, 600 bp, Homo sapiens; identical to SEQ ID NO: 2551

SEQ ID NO: 6824 - DNA, 600 bp, Homo sapiens; identical to SEQ ID NO: 2551

SEQ ID NO: 6825 - DNA, 600 bp, Homo sapiens; identical to SEQ ID NO: 2553

SEQ ID NO: 6826 - DNA, 600 bp, Homo sapiens; identical to SEQ ID NO: 2554

SEQ ID NO: 6827 - DNA, 600 bp, Homo sapiens; identical to SEQ ID NO: 2554

SEQ ID NO: 6828 - DNA, 947 bp, Homo sapiens; identical to SEQ ID NO: 2556

SEQ ID NO: 6829 - DNA, 1400 bp, Homo sapiens; identical to SEQ ID NO: 2557

SEQ ID NO: 6830 - DNA, 600 bp, Homo sapiens; identical to SEQ ID NO: 2558

SEQ ID NO: 6831 - DNA, 600 bp, Homo sapiens; identical to SEQ ID NO: 2558

SEQ ID NO: 6832 - DNA, 600 bp, Homo sapiens; identical to SEQ ID NO: 2560

SEQ ID NO: 6833 - DNA, 1400 bp, Homo sapiens; identical to SEQ ID NO: 2561

SEQ ID NO: 6834 - DNA, 600 bp, Homo sapiens; identical to SEQ ID NO: 2562

SEQ ID NO: 6835 - DNA, 600 bp, Homo sapiens; identical to SEQ ID NO: 2563

SEQ ID NO: 6836 - DNA, 600 bp, Homo sapiens; identical to SEQ ID NO: 2564

SEQ ID NO: 6837 - DNA, 600 bp, Homo sapiens; identical to SEQ ID NO: 2564

SEQ ID NO: 6838 - DNA, 1400 bp, Homo sapiens; identical to SEQ ID NO: 2566

SEQ ID NO: 6839 - DNA, 1400 bp, Homo sapiens; identical to SEQ ID NO: 2567

SEQ ID NO: 6840 - DNA, 600 bp, Homo sapiens; identical to SEQ ID NO: 2568

SEQ ID NO: 6841 - DNA, 600 bp, Homo sapiens; identical to SEQ ID NO: 2568

SEQ ID NO: 6842 - DNA, 600 bp, Homo sapiens; identical to SEQ ID NO: 2570

SEQ ID NO: 6843 - DNA, 600 bp, Homo sapiens; identical to SEQ ID NO: 2571

SEQ ID NO: 6844 - DNA, 600 bp, Homo sapiens; identical to SEQ ID NO: 2572

SEQ ID NO: 6845 - DNA, 1400 bp, Homo sapiens; identical to SEQ ID NO: 2573

SEQ ID NO: 6846 - DNA, 1400 bp, Homo sapiens; identical to SEQ ID NO: 2573

SEQ ID NO: 6847 - DNA, 1156 bp, Homo sapiens; identical to SEQ ID NO: 2575

SEQ ID NO: 6848 - DNA, 1156 bp, Homo sapiens; identical to SEQ ID NO: 2575

SEQ ID NO: 6849 - DNA, 1400 bp, Homo sapiens; identical to SEQ ID NO: 2577

SEQ ID NO: 6850 - DNA, 600 bp, Homo sapiens; identical to SEQ ID NO: 2578

SEQ ID NO: 6851 - DNA, 600 bp, Homo sapiens; identical to SEQ ID NO: 2578

SEQ ID NO: 6852 - DNA, 600 bp, Homo sapiens; identical to SEQ ID NO: 2580

SEQ ID NO: 6853 - DNA, 1400 bp, Homo sapiens; identical to SEQ ID NO: 2581

SEQ ID NO: 6854 - DNA, 1400 bp, Homo sapiens; identical to SEQ ID NO: 2581

SEQ ID NO: 6855 - DNA, 600 bp, Homo sapiens; identical to SEQ ID NO: 2583

SEQ ID NO: 6856 - DNA, 600 bp, Homo sapiens; identical to SEQ ID NO: 2583

SEQ ID NO: 6857 - DNA, 1400 bp, Homo sapiens; identical to SEQ ID NO: 2585

SEQ ID NO: 6858 - DNA, 1118 bp, Homo sapiens; identical to SEQ ID NO: 2586

SEQ ID NO: 6859 - DNA, 1400 bp, Homo sapiens; identical to SEQ ID NO: 2587

SEQ ID NO: 6860 - DNA, 1400 bp, Homo sapiens; identical to SEQ ID NO: 2587

SEQ ID NO: 6861 - DNA, 1075 bp, Homo sapiens; identical to SEQ ID NO: 2589

SEQ ID NO: 6862 - DNA, 600 bp, Homo sapiens; identical to SEQ ID NO: 2590

SEQ ID NO: 6863 - DNA, 600 bp, Homo sapiens; identical to SEQ ID NO: 2590

SEQ ID NO: 6864 - DNA, 600 bp, Homo sapiens; identical to SEQ ID NO: 2592

SEQ ID NO: 6865 - DNA, 600 bp, Homo sapiens; identical to SEQ ID NO: 2593

SEQ ID NO: 6866 - DNA, 600 bp, Homo sapiens; identical to SEQ ID NO: 2594

SEQ ID NO: 6867 - DNA, 1400 bp, Homo sapiens; identical to SEQ ID NO: 2595

SEQ ID NO: 6868 - DNA, 600 bp, Homo sapiens; identical to SEQ ID NO: 2596

SEQ ID NO: 6869 - DNA, 600 bp, Homo sapiens; identical to SEQ ID NO: 2597

SEQ ID NO: 6870 - DNA, 600 bp, Homo sapiens; identical to SEQ ID NO: 2598

SEQ ID NO: 6871 - DNA, 600 bp, Homo sapiens; identical to SEQ ID NO: 2598

SEQ ID NO: 6872 - DNA, 1400 bp, Homo sapiens; identical to SEQ ID NO: 2600

SEQ ID NO: 6873 - DNA, 600 bp, Homo sapiens; identical to SEQ ID NO: 2601

SEQ ID NO: 6874 - DNA, 600 bp, Homo sapiens; identical to SEQ ID NO: 2601

SEQ ID NO: 6875 - DNA, 600 bp, Homo sapiens; identical to SEQ ID NO: 2603

SEQ ID NO: 6876 - DNA, 600 bp, Homo sapiens; identical to SEQ ID NO: 2604

SEQ ID NO: 6877 - DNA, 600 bp, Homo sapiens; identical to SEQ ID NO: 2605

SEQ ID NO: 6878 - DNA, 600 bp, Homo sapiens; identical to SEQ ID NO: 2606

SEQ ID NO: 6879 - DNA, 600 bp, Homo sapiens; identical to SEQ ID NO: 2606

SEQ ID NO: 6880 - DNA, 600 bp, Homo sapiens; identical to SEQ ID NO: 2608

SEQ ID NO: 6881 - DNA, 600 bp, Homo sapiens; identical to SEQ ID NO: 2608

SEQ ID NO: 6882 - DNA, 1400 bp, Homo sapiens; identical to SEQ ID NO: 2610
  misc_feature (1388)..(1388): n is a, c, g, or t
  misc_feature (1394)..(1394): n is a, c, g, or t

SEQ ID NO: 6883 - DNA, 1400 bp, Homo sapiens; identical to SEQ ID NO: 2610
  misc_feature (1388)..(1388): n is a, c, g, or t
  misc_feature (1394)..(1394): n is a, c, g, or t

SEQ ID NO: 6884 - DNA, 600 bp, Homo sapiens; identical to SEQ ID NO: 2612

SEQ ID NO: 6885 - DNA, 1400 bp, Homo sapiens; identical to SEQ ID NO: 2613

SEQ ID NO: 6886 - DNA, 600 bp, Homo sapiens; identical to SEQ ID NO: 2614

SEQ ID NO: 6887 - DNA, 600 bp, Homo sapiens; identical to SEQ ID NO: 2614

SEQ ID NO: 6888 - DNA, 600 bp, Homo sapiens; identical to SEQ ID NO: 2616

SEQ ID NO: 6889 - DNA, 600 bp, Homo sapiens; identical to SEQ ID NO: 2617

SEQ ID NO: 6890 - DNA, 600 bp, Homo sapiens; identical to SEQ ID NO: 2617

SEQ ID NO: 6891 - DNA, 600 bp, Homo sapiens; identical to SEQ ID NO: 2619

SEQ ID NO: 6892 - DNA, 600 bp, Homo sapiens; identical to SEQ ID NO: 2619

SEQ ID NO: 6893 - DNA, 878 bp, Homo sapiens; identical to SEQ ID NO: 2621

SEQ ID NO: 6894 - DNA, 600 bp, Homo sapiens; identical to SEQ ID NO: 2622

SEQ ID NO: 6895 - DNA, 600 bp, Homo sapiens; identical to SEQ ID NO: 2622

SEQ ID NO: 6896 - DNA, 600 bp, Homo sapiens; identical to SEQ ID NO: 2624

SEQ ID NO: 6897 - DNA, 600 bp, Homo sapiens; identical to SEQ ID NO: 2624

SEQ ID NO: 6898 - DNA, 1400 bp, Homo sapiens; identical to SEQ ID NO: 2626

SEQ ID NO: 6899 - DNA, 600 bp, Homo sapiens; identical to SEQ ID NO: 2627

SEQ ID NO: 6900 - DNA, 600 bp, Homo sapiens; identical to SEQ ID NO: 2627

SEQ ID NO: 6901 - DNA, 1400 bp, Homo sapiens; identical to SEQ ID NO: 2629
  misc_feature (1065)..(1071): n is a, c, g, or t

SEQ ID NO: 6902 - DNA, 1400 bp, Homo sapiens; identical to SEQ ID NO: 2630

SEQ ID NO: 6903 - DNA, 1400 bp, Homo sapiens; identical to SEQ ID NO: 2630

SEQ ID NO: 6904 - DNA, 1400 bp, Homo sapiens; identical to SEQ ID NO: 2632

SEQ ID NO: 6905 - DNA, 1400 bp, Homo sapiens; identical to SEQ ID NO: 2632

SEQ ID NO: 6906 - DNA, 1400 bp, Homo sapiens; identical to SEQ ID NO: 2634

SEQ ID NO: 6907 - DNA, 1400 bp, Homo sapiens; identical to SEQ ID NO: 2635

SEQ ID NO: 6908 - DNA, 1400 bp, Homo sapiens; identical to SEQ ID NO: 2635

SEQ ID NO: 6909 - DNA, 600 bp, Homo sapiens; identical to SEQ ID NO: 2637

SEQ ID NO: 6910 - DNA, 600 bp, Homo sapiens; identical to SEQ ID NO: 2637

SEQ ID NO: 6911 - DNA, 600 bp, Homo sapiens; identical to SEQ ID NO: 2639

SEQ ID NO: 6912 - DNA, 600 bp, Homo sapiens; identical to SEQ ID NO: 2640

SEQ ID NO: 6913 - DNA, 600 bp, Homo sapiens; identical to SEQ ID NO: 2640

SEQ ID NO: 6914 - DNA, 600 bp, Homo sapiens; identical to SEQ ID NO: 2642
  misc_feature (501)..(501): n is a, c, g, or t
  misc_feature (579)..(579): n is a, c, g, or t

SEQ ID NO: 6915 - DNA, 600 bp, Homo sapiens; identical to SEQ ID NO: 2642
  misc_feature (501)..(501): n is a, c, g, or t
  misc_feature (579)..(579): n is a, c, g, or t

SEQ ID NO: 6916 - DNA, 1400 bp, Homo sapiens; identical to SEQ ID NO: 2644

SEQ ID NO: 6917 - DNA, 600 bp, Homo sapiens; identical to SEQ ID NO: 2645

SEQ ID NO: 6918 - DNA, 1400 bp, Homo sapiens; identical to SEQ ID NO: 2646

SEQ ID NO: 6919 - DNA, 1400 bp, Homo sapiens; identical to SEQ ID NO: 2646

SEQ ID NO: 6920 - DNA, 1400 bp, Homo sapiens; identical to SEQ ID NO: 2648

SEQ ID NO: 6921 - DNA, 600 bp, Homo sapiens; identical to SEQ ID NO: 2649

SEQ ID NO: 6922 - DNA, 600 bp, Homo sapiens; identical to SEQ ID NO: 2649

SEQ ID NO: 6923 - DNA, 600 bp, Homo sapiens; identical to SEQ ID NO: 2651

SEQ ID NO: 6924 - DNA, 600 bp, Homo sapiens; identical to SEQ ID NO: 2651

SEQ ID NO: 6925 - DNA, 945 bp, Homo sapiens; identical to SEQ ID NO: 2653

SEQ ID NO: 6926 - DNA, 600 bp, Homo sapiens; identical to SEQ ID NO: 2654

SEQ ID NO: 6927 - DNA, 600 bp, Homo sapiens; identical to SEQ ID NO: 2655

SEQ ID NO: 6928 - DNA, 600 bp, Homo sapiens; identical to SEQ ID NO: 2656

SEQ ID NO: 6929 - DNA, 600 bp, Homo sapiens; identical to SEQ ID NO: 2657

SEQ ID NO: 6930 - DNA, 600 bp, Homo sapiens; identical to SEQ ID NO: 2658

SEQ ID NO: 6931 - DNA, 600 bp, Homo sapiens; identical to SEQ ID NO: 2658

SEQ ID NO: 6932 - DNA, 1077 bp, Homo sapiens; identical to SEQ ID NO: 2660

SEQ ID NO: 6933 - DNA, 1186 bp, Homo sapiens; identical to SEQ ID NO: 2661

SEQ ID NO: 6934 - DNA, 600 bp, Homo sapiens; identical to SEQ ID NO: 2662

SEQ ID NO: 6935 - DNA, 600 bp, Homo sapiens; identical to SEQ ID NO: 2662

SEQ ID NO: 6936 - DNA, 1400 bp, Homo sapiens; identical to SEQ ID NO: 2664

SEQ ID NO: 6937 - DNA, 1400 bp, Homo sapiens; identical to SEQ ID NO: 2665

SEQ ID NO: 6938 - DNA, 1400 bp, Homo sapiens; identical to SEQ ID NO: 2665

SEQ ID NO: 6939 - DNA, 600 bp, Homo sapiens; identical to SEQ ID NO: 2667
  misc_feature (481)..(481): n is a, c, g, or t
  misc_feature (551)..(551): n is a, c, g, or t
  misc_feature (564)..(564): n is a, c, g, or t
  misc_feature (575)..(575): n is a, c, g, or t

SEQ ID NO: 6940 - DNA, 600 bp, Homo sapiens; identical to SEQ ID NO: 2667
  misc_feature (481)..(481): n is a, c, g, or t
  misc_feature (551)..(551): n is a, c, g, or t
  misc_feature (564)..(564): n is a, c, g, or t
  misc_feature (575)..(575): n is a, c, g, or t

SEQ ID NO: 6941 - DNA, 600 bp, Homo sapiens; identical to SEQ ID NO: 2669

SEQ ID NO: 6942 - DNA, 600 bp, Homo sapiens; identical to SEQ ID NO: 2670

SEQ ID NO: 6943 - DNA, 1400 bp, Homo sapiens; identical to SEQ ID NO: 2671

SEQ ID NO: 6944 - DNA, 1007 bp, Homo sapiens; identical to SEQ ID NO: 2672

SEQ ID NO: 6945 - DNA, 1007 bp, Homo sapiens; identical to SEQ ID NO: 2672

SEQ ID NO: 6946 - DNA, 1400 bp, Homo sapiens; identical to SEQ ID NO: 2674

SEQ ID NO: 6947 - DNA, 1400 bp, Homo sapiens; identical to SEQ ID NO: 2675

SEQ ID NO: 6948 - DNA, 1400 bp, Homo sapiens; identical to SEQ ID NO: 2675

SEQ ID NO: 6949 - DNA, 1400 bp, Homo sapiens; identical to SEQ ID NO: 2677

SEQ ID NO: 6950 - DNA, 1400 bp, Homo sapiens; identical to SEQ ID NO: 2678

SEQ ID NO: 6951 - DNA, 600 bp, Homo sapiens; identical to SEQ ID NO: 2679

SEQ ID NO: 6952 - DNA, 1400 bp, Homo sapiens; identical to SEQ ID NO: 2680

SEQ ID NO: 6953 - DNA, 896 bp, Homo sapiens; identical to SEQ ID NO: 2681

SEQ ID NO: 6954 - DNA, 600 bp, Homo sapiens; identical to SEQ ID NO: 2682

SEQ ID NO: 6955 - DNA, 600 bp, Homo sapiens; identical to SEQ ID NO: 2682

SEQ ID NO: 6956 - DNA, 600 bp, Homo sapiens; identical to SEQ ID NO: 2684

SEQ ID NO: 6957 - DNA, 600 bp, Homo sapiens; identical to SEQ ID NO: 2684

SEQ ID NO: 6958 - DNA, 600 bp, Homo sapiens; identical to SEQ ID NO: 2686

SEQ ID NO: 6959 - DNA, 600 bp, Homo sapiens; identical to SEQ ID NO: 2687

SEQ ID NO: 6960 - DNA, 600 bp, Homo sapiens; identical to SEQ ID NO: 2688

SEQ ID NO: 6961 - DNA, 600 bp, Homo sapiens; identical to SEQ ID NO: 2689

SEQ ID NO: 6962 - DNA, 600 bp, Homo sapiens; identical to SEQ ID NO: 2689

SEQ ID NO: 6963 - DNA, 1400 bp, Homo sapiens; identical to SEQ ID NO: 2691

SEQ ID NO: 6964 - DNA, 1148 bp, Homo sapiens; identical to SEQ ID NO: 2692

SEQ ID NO: 6965 - DNA, 1400 bp, Homo sapiens; identical to SEQ ID NO: 2693
  misc_feature (1118)..(1118): n is a, c, g, or t

SEQ ID NO: 6966 - DNA, 600 bp, Homo sapiens; identical to SEQ ID NO: 2694

SEQ ID NO: 6967 - DNA, 1400 bp, Homo sapiens; identical to SEQ ID NO: 2695

SEQ ID NO: 6968 - DNA, 1400 bp, Homo sapiens; identical to SEQ ID NO: 2696

SEQ ID NO: 6969 - DNA, 1400 bp, Homo sapiens; identical to SEQ ID NO: 2697

SEQ ID NO: 6970 - DNA, 600 bp, Homo sapiens; identical to SEQ ID NO: 2698

SEQ ID NO: 6971 - DNA, 1260 bp, Homo sapiens; identical to SEQ ID NO: 2699

SEQ ID NO: 6972 - DNA, 1260 bp, Homo sapiens; identical to SEQ ID NO: 2699

SEQ ID NO: 6973 - DNA, 1400 bp, Homo sapiens; identical to SEQ ID NO: 2701

SEQ ID NO: 6974 - DNA, 600 bp, Homo sapiens; identical to SEQ ID NO: 2702

SEQ ID NO: 6975 - DNA, 600 bp, Homo sapiens; identical to SEQ ID NO: 2702

SEQ ID NO: 6976 - DNA, 600 bp, Homo sapiens; identical to SEQ ID NO: 2704

SEQ ID NO: 6977 - DNA, 600 bp, Homo sapiens; identical to SEQ ID NO: 2704

SEQ ID NO: 6978 - DNA, 600 bp, Homo sapiens; identical to SEQ ID NO: 2706

SEQ ID NO: 6979 - DNA, 600 bp, Homo sapiens; identical to SEQ ID NO: 2706

SEQ ID NO: 6980 - DNA, 1400 bp, Homo sapiens; identical to SEQ ID NO: 2708

SEQ ID NO: 6981 - DNA, 600 bp, Homo sapiens; identical to SEQ ID NO: 2709
  misc_feature (216)..(216): n is a, c, g, or t
  misc_feature (285)..(285): n is a, c, g, or t
  misc_feature (299)..(299): n is a, c, g, or t
  misc_feature (323)..(323): n is a, c, g, or t
  misc_feature (355)..(355): n is a, c, g, or t
  misc_feature (556)..(556): n is a, c, g, or t
  misc_feature (571)..(571): n is a, c, g, or t
  misc_feature (578)..(578): n is a, c, g, or t

SEQ ID NO: 6982 - DNA, 600 bp, Homo sapiens; identical to SEQ ID NO: 2710

SEQ ID NO: 6983 - DNA, 600 bp, Homo sapiens; identical to SEQ ID NO: 2710

SEQ ID NO: 6984 - DNA, 600 bp, Homo sapiens; identical to SEQ ID NO: 2712

SEQ ID NO: 6985 - DNA, 600 bp, Homo sapiens; identical to SEQ ID NO: 2712

SEQ ID NO: 6986 - DNA, 1400 bp, Homo sapiens; identical to SEQ ID NO: 2714

SEQ ID NO: 6987 - DNA, 1400 bp, Homo sapiens; identical to SEQ ID NO: 2715

SEQ ID NO: 6988 - DNA, 600 bp, Homo sapiens; identical to SEQ ID NO: 2716

SEQ ID NO: 6989 - DNA, 600 bp, Homo sapiens; identical to SEQ ID NO: 2717

SEQ ID NO: 6990 - DNA, 600 bp, Homo sapiens; identical to SEQ ID NO: 2718

SEQ ID NO: 6991 - DNA, 600 bp, Homo sapiens; identical to SEQ ID NO: 2718

SEQ ID NO: 6992 - DNA, 951 bp, Homo sapiens; identical to SEQ ID NO: 2720

SEQ ID NO: 6993 - DNA, 658 bp, Homo sapiens; identical to SEQ ID NO: 2721

SEQ ID NO: 6994 - DNA, 600 bp, Homo sapiens; identical to SEQ ID NO: 2722

SEQ ID NO: 6995 - DNA, 1400 bp, Homo sapiens; identical to SEQ ID NO: 2723

SEQ ID NO: 6996 - DNA, 1400 bp, Homo sapiens; identical to SEQ ID NO: 2723

SEQ ID NO: 6997 - DNA, 600 bp, Homo sapiens; identical to SEQ ID NO: 2725

SEQ ID NO: 6998 - DNA, 1400 bp, Homo sapiens; identical to SEQ ID NO: 2726

SEQ ID NO: 6999 - DNA, 600 bp, Homo sapiens; identical to SEQ ID NO: 2727

SEQ ID NO: 7000 - DNA, 600 bp, Homo sapiens; identical to SEQ ID NO: 2727

SEQ ID NO: 7001 - DNA, 600 bp, Homo sapiens; identical to SEQ ID NO: 2729

SEQ ID NO: 7002 - DNA, 600 bp, Homo sapiens; identical to SEQ ID NO: 2729

SEQ ID NO: 7003 - DNA, 600 bp, Homo sapiens; identical to SEQ ID NO: 2731

SEQ ID NO: 7004 - DNA, 600 bp, Homo sapiens; identical to SEQ ID NO: 2731

SEQ ID NO: 7005 - DNA, 600 bp, Homo sapiens; identical to SEQ ID NO: 2733

SEQ ID NO: 7006 - DNA, 600 bp, Homo sapiens; identical to SEQ ID NO: 2733

SEQ ID NO: 7007 - DNA, 600 bp, Homo sapiens; identical to SEQ ID NO: 2735

SEQ ID NO: 7008 - DNA, 600 bp, Homo sapiens; identical to SEQ ID NO: 2735

SEQ ID NO: 7009 - DNA, 600 bp, Homo sapiens; identical to SEQ ID NO: 2737

SEQ ID NO: 7010 - DNA, 600 bp, Homo sapiens; identical to SEQ ID NO: 2737

SEQ ID NO: 7011 - DNA, 600 bp, Homo sapiens; identical to SEQ ID NO: 2739

SEQ ID NO: 7012 - DNA, 600 bp, Homo sapiens; identical to SEQ ID NO: 2740

SEQ ID NO: 7013 - DNA, 600 bp, Homo sapiens; identical to SEQ ID NO: 2740

SEQ ID NO: 7014 - DNA, 1400 bp, Homo sapiens; identical to SEQ ID NO: 2742

SEQ ID NO: 7015 - DNA, 1400 bp, Homo sapiens; identical to SEQ ID NO: 2742

SEQ ID NO: 7016 - DNA, 600 bp, Homo sapiens; identical to SEQ ID NO: 2744

SEQ ID NO: 7017 - DNA, 600 bp, Homo sapiens; identical to SEQ ID NO: 2744

SEQ ID NO: 7018 - DNA, 600 bp, Homo sapiens; identical to SEQ ID NO: 2746

SEQ ID NO: 7019 - DNA, 600 bp, Homo sapiens; identical to SEQ ID NO: 2746

SEQ ID NO: 7020 - DNA, 1400 bp, Homo sapiens; identical to SEQ ID NO: 2748

SEQ ID NO: 7021 - DNA, 1400 bp, Homo sapiens; identical to SEQ ID NO: 2748

SEQ ID NO: 7022 - DNA, 600 bp, Homo sapiens; identical to SEQ ID NO: 2750

SEQ ID NO: 7023 - DNA, 600 bp, Homo sapiens; identical to SEQ ID NO: 2750

SEQ ID NO: 7024 - DNA, 600 bp, Homo sapiens; identical to SEQ ID NO: 2752

SEQ ID NO: 7025 - DNA, 1400 bp, Homo sapiens; identical to SEQ ID NO: 2753

SEQ ID NO: 7026 - DNA, 1400 bp, Homo sapiens; identical to SEQ ID NO: 2753

SEQ ID NO: 7027 - DNA, 600 bp, Homo sapiens; identical to SEQ ID NO: 2755

SEQ ID NO: 7028 - DNA, 600 bp, Homo sapiens; identical to SEQ ID NO: 2756

SEQ ID NO: 7029 - DNA, 600 bp, Homo sapiens; identical to SEQ ID NO: 2756

SEQ ID NO: 7030 - DNA, 1400 bp, Homo sapiens; identical to SEQ ID NO: 2758

SEQ ID NO: 7031 - DNA, 600 bp, Homo sapiens; identical to SEQ ID NO: 2759

SEQ ID NO: 7032 - DNA, 600 bp, Homo sapiens; identical to SEQ ID NO: 2760

SEQ ID NO: 7033 - DNA, 600 bp, Homo sapiens; identical to SEQ ID NO: 2760

SEQ ID NO: 7034 - DNA, 600 bp, Homo sapiens; identical to SEQ ID NO: 2762

SEQ ID NO: 7035 - DNA, 600 bp, Homo sapiens; identical to SEQ ID NO: 2763

SEQ ID NO: 7036 - DNA, 600 bp, Homo sapiens; identical to SEQ ID NO: 2764

SEQ ID NO: 7037 - DNA, 600 bp, Homo sapiens; identical to SEQ ID NO: 2764

SEQ ID NO: 7038 - DNA, 1400 bp, Homo sapiens; identical to SEQ ID NO: 2766

SEQ ID NO: 7039 - DNA, 1400 bp, Homo sapiens; identical to SEQ ID NO: 2767

SEQ ID NO: 7040 - DNA, 1400 bp, Homo sapiens; identical to SEQ ID NO: 2768
  misc_feature (709)..(709): n is a, c, g, or t

SEQ ID NO: 7041 - DNA, 600 bp, Homo sapiens; identical to SEQ ID NO: 2769

SEQ ID NO: 7042 - DNA, 600 bp, Homo sapiens; identical to SEQ ID NO: 2769

SEQ ID NO: 7043 - DNA, 600 bp, Homo sapiens; identical to SEQ ID NO: 2771

SEQ ID NO: 7044 - DNA, 1400 bp, Homo sapiens; identical to SEQ ID NO: 2772

SEQ ID NO: 7045 - DNA, 600 bp, Homo sapiens; identical to SEQ ID NO: 2773

SEQ ID NO: 7046 - DNA, 600 bp, Homo sapiens; identical to SEQ ID NO: 2773

SEQ ID NO: 7047 - DNA, 1400 bp, Homo sapiens; identical to SEQ ID NO: 2775

SEQ ID NO: 7048 - DNA, 1400 bp, Homo sapiens; identical to SEQ ID NO: 2776

SEQ ID NO: 7049 - DNA, 600 bp, Homo sapiens; identical to SEQ ID NO: 2777

SEQ ID NO: 7050 - DNA, 600 bp, Homo sapiens; identical to SEQ ID NO: 2777

SEQ ID NO: 7051 - DNA, 600 bp, Homo sapiens; identical to SEQ ID NO: 2779

SEQ ID NO: 7052 - DNA, 1400 bp, Homo sapiens; identical to SEQ ID NO: 2780

SEQ ID NO: 7053 - DNA, 1400 bp, Homo sapiens; identical to SEQ ID NO: 2780

SEQ ID NO: 7054 - DNA, 1400 bp, Homo sapiens; identical to SEQ ID NO: 2782

SEQ ID NO: 7055 - DNA, 600 bp, Homo sapiens; identical to SEQ ID NO: 2783

SEQ ID NO: 7056 - DNA, 600 bp, Homo sapiens; identical to SEQ ID NO: 2784

SEQ ID NO: 7057 - DNA, 600 bp, Homo sapiens; identical to SEQ ID NO: 2784

SEQ ID NO: 7058 - DNA, 600 bp, Homo sapiens; identical to SEQ ID NO: 2786
  misc_feature (514)..(514): n is a, c, g, or t
  misc_feature (519)..(519): n is a, c, g, or t
  misc_feature (561)..(561): n is a, c, g, or t

SEQ ID NO: 7059 - DNA, 1400 bp, Homo sapiens; identical to SEQ ID NO: 2787

SEQ ID NO: 7060 - DNA, 1400 bp, Homo sapiens; identical to SEQ ID NO: 2788

SEQ ID NO: 7061 - DNA, 1400 bp, Homo sapiens; identical to SEQ ID NO: 2789

SEQ ID NO: 7062 - DNA, 1257 bp, Homo sapiens; identical to SEQ ID NO: 2790

SEQ ID NO: 7063 - DNA, 1257 bp, Homo sapiens; identical to SEQ ID NO: 2790

SEQ ID NO: 7064 - DNA, 600 bp, Homo sapiens; identical to SEQ ID NO: 2792

SEQ ID NO: 7065 - DNA, 600 bp, Homo sapiens; identical to SEQ ID NO: 2792

SEQ ID NO: 7066 - DNA, 600 bp, Homo sapiens; identical to SEQ ID NO: 2794

SEQ ID NO: 7067 - DNA, 600 bp, Homo sapiens; identical to SEQ ID NO: 2795

SEQ ID NO: 7068 - DNA, 600 bp, Homo sapiens; identical to SEQ ID NO: 2795

SEQ ID NO: 7069 - DNA, 600 bp, Homo sapiens; identical to SEQ ID NO: 2797

SEQ ID NO: 7070 - DNA, 1400 bp, Homo sapiens; identical to SEQ ID NO: 2798

SEQ ID NO: 7071 - DNA, 600 bp, Homo sapiens; identical to SEQ ID NO: 2799

SEQ ID NO: 7072 - DNA, 600 bp, Homo sapiens; identical to SEQ ID NO: 2799

SEQ ID NO: 7073 - DNA, 600 bp, Homo sapiens; identical to SEQ ID NO: 2801

SEQ ID NO: 7074 - DNA, 600 bp, Homo sapiens; identical to SEQ ID NO: 2802

SEQ ID NO: 7075 - DNA, 600 bp, Homo sapiens; identical to SEQ ID NO: 2802

SEQ ID NO: 7076 - DNA, 600 bp, Homo sapiens; identical to SEQ ID NO: 2804

SEQ ID NO: 7077 - DNA, 600 bp, Homo sapiens; identical to SEQ ID NO: 2805

SEQ ID NO: 7078 - DNA, 600 bp, Homo sapiens; identical to SEQ ID NO: 2805

SEQ ID NO: 7079 - DNA, 1400 bp, Homo sapiens; identical to SEQ ID NO: 2807

SEQ ID NO: 7080 - DNA, 381 bp, Homo sapiens; identical to SEQ ID NO: 2808

SEQ ID NO: 7081 - DNA, 600 bp, Homo sapiens; identical to SEQ ID NO: 2809

SEQ ID NO: 7082 - DNA, 600 bp, Homo sapiens; identical to SEQ ID NO: 2809

SEQ ID NO: 7083 - DNA, 600 bp, Homo sapiens; identical to SEQ ID NO: 2811

SEQ ID NO: 7084 - DNA, 1400 bp, Homo sapiens; identical to SEQ ID NO: 2812

SEQ ID NO: 7085 - DNA, 1400 bp, Homo sapiens; identical to SEQ ID NO: 2813

SEQ ID NO: 7086 - DNA, 600 bp, Homo sapiens; identical to SEQ ID NO: 2814

SEQ ID NO: 7087 - DNA, 1400 bp, Homo sapiens; identical to SEQ ID NO: 2815

SEQ ID NO: 7088 - DNA, 600 bp, Homo sapiens; identical to SEQ ID NO: 2816

SEQ ID NO: 7089 - DNA, 600 bp, Homo sapiens; identical to SEQ ID NO: 2816

SEQ ID NO: 7090 - DNA, 600 bp, Homo sapiens; identical to SEQ ID NO: 2818

SEQ ID NO: 7091 - DNA, 600 bp, Homo sapiens; identical to SEQ ID NO: 2819

SEQ ID NO: 7092 - DNA, 600 bp, Homo sapiens; identical to SEQ ID NO: 2820

SEQ ID NO: 7093 - DNA, 1400 bp, Homo sapiens; identical to SEQ ID NO: 2821

SEQ ID NO: 7094 - DNA, 1400 bp, Homo sapiens; identical to SEQ ID NO: 2821

SEQ ID NO: 7095 - DNA, 1400 bp, Homo sapiens; identical to SEQ ID NO: 2823

SEQ ID NO: 7096 - DNA, 429 bp, Homo sapiens; identical to SEQ ID NO: 2824

SEQ ID NO: 7097 - DNA, 429 bp, Homo sapiens; identical to SEQ ID NO: 2824

SEQ ID NO: 7098 - DNA, 600 bp, Homo sapiens; identical to SEQ ID NO: 2826

SEQ ID NO: 7099 - DNA, 600 bp, Homo sapiens; identical to SEQ ID NO: 2826

SEQ ID NO: 7100 - DNA, 600 bp, Homo sapiens; identical to SEQ ID NO: 2828

SEQ ID NO: 7101 - DNA, 600 bp, Homo sapiens; identical to SEQ ID NO: 2829

SEQ ID NO: 7102 - DNA, 600 bp, Homo sapiens; identical to SEQ ID NO: 2829

SEQ ID NO: 7103 - DNA, 600 bp, Homo sapiens; identical to SEQ ID NO: 2831

SEQ ID NO: 7104 - DNA, 1400 bp, Homo sapiens; identical to SEQ ID NO: 2832

SEQ ID NO: 7105 - DNA, 1400 bp, Homo sapiens; identical to SEQ ID NO: 2833

SEQ ID NO: 7106 - DNA, 600 bp, Homo sapiens; identical to SEQ ID NO: 2834

SEQ ID NO: 7107 - DNA, 600 bp, Homo sapiens; identical to SEQ ID NO: 2835

SEQ ID NO: 7108 - DNA, 600 bp, Homo sapiens; identical to SEQ ID NO: 2835

SEQ ID NO: 7109 - DNA, 600 bp, Homo sapiens; identical to SEQ ID NO: 2837

SEQ ID NO: 7110 - DNA, 600 bp, Homo sapiens; identical to SEQ ID NO: 2837

SEQ ID NO: 7111 - DNA, 600 bp, Homo sapiens; identical to SEQ ID NO: 2839

SEQ ID NO: 7112 - DNA, 600 bp, Homo sapiens; identical to SEQ ID NO: 2839

SEQ ID NO: 7113 - DNA, 600 bp, Homo sapiens; identical to SEQ ID NO: 2841

SEQ ID NO: 7114 - DNA, 600 bp, Homo sapiens; identical to SEQ ID NO: 2842

SEQ ID NO: 7115 - DNA, 600 bp, Homo sapiens; identical to SEQ ID NO: 2842

SEQ ID NO: 7116 - DNA, 600 bp, Homo sapiens; identical to SEQ ID NO: 2844

SEQ ID NO: 7117 - DNA, 1400 bp, Homo sapiens; identical to SEQ ID NO: 2845

SEQ ID NO: 7118 - DNA, 600 bp, Homo sapiens; identical to SEQ ID NO: 2846

SEQ ID NO: 7119 - DNA, 600 bp, Homo sapiens; identical to SEQ ID NO: 2847

SEQ ID NO: 7120 - DNA, 600 bp, Homo sapiens; identical to SEQ ID NO: 2847

SEQ ID NO: 7121 - DNA, 1400 bp, Homo sapiens; identical to SEQ ID NO: 2849

SEQ ID NO: 7122 - DNA, 1400 bp, Homo sapiens; identical to SEQ ID NO: 2850

SEQ ID NO: 7123 - DNA, 600 bp, Homo sapiens; identical to SEQ ID NO: 2851

SEQ ID NO: 7124 - DNA, 1400 bp, Homo sapiens; identical to SEQ ID NO: 2852

SEQ ID NO: 7125 - DNA, 1400 bp, Homo sapiens; identical to SEQ ID NO: 2852

SEQ ID NO: 7126 - DNA, 1400 bp, Homo sapiens; identical to SEQ ID NO: 2854

SEQ ID NO: 7127 - DNA, 1400 bp, Homo sapiens; identical to SEQ ID NO: 2854

SEQ ID NO: 7128 - DNA, 600 bp, Homo sapiens; identical to SEQ ID NO: 2856

SEQ ID NO: 7129 - DNA, 600 bp, Homo sapiens; identical to SEQ ID NO: 2856

SEQ ID NO: 7130 - DNA, 600 bp, Homo sapiens; identical to SEQ ID NO: 2858

SEQ ID NO: 7131 - DNA, 600 bp, Homo sapiens; identical to SEQ ID NO: 2858

SEQ ID NO: 7132 - DNA, 600 bp, Homo sapiens; identical to SEQ ID NO: 2860

SEQ ID NO: 7133 - DNA, 1400 bp, Homo sapiens; identical to SEQ ID NO: 2861

SEQ ID NO: 7134 - DNA, 1400 bp, Homo sapiens; identical to SEQ ID NO: 2862

SEQ ID NO: 7135 - DNA, 1400 bp, Homo sapiens; identical to SEQ ID NO: 2862

SEQ ID NO: 7136 - DNA, 600 bp, Homo sapiens; identical to SEQ ID NO: 2864

SEQ ID NO: 7137 - DNA, 600 bp, Homo sapiens; identical to SEQ ID NO: 2865

SEQ ID NO: 7138 - DNA, 600 bp, Homo sapiens; identical to SEQ ID NO: 2865

SEQ ID NO: 7139 - DNA, 1400 bp, Homo sapiens; identical to SEQ ID NO: 2867

SEQ ID NO: 7140 - DNA, 600 bp, Homo sapiens; identical to SEQ ID NO: 2868

SEQ ID NO: 7141 - DNA, 600 bp, Homo sapiens; identical to SEQ ID NO: 2869

SEQ ID NO: 7142 - DNA, 1400 bp, Homo sapiens; identical to SEQ ID NO: 2870

SEQ ID NO: 7143 - DNA, 1400 bp, Homo sapiens; identical to SEQ ID NO: 2870

SEQ ID NO: 7144 - DNA, 600 bp, Homo sapiens; identical to SEQ ID NO: 2872

SEQ ID NO: 7145 - DNA, 600 bp, Homo sapiens; identical to SEQ ID NO: 2872

SEQ ID NO: 7146 - DNA, 600 bp, Homo sapiens; identical to SEQ ID NO: 2874

SEQ ID NO: 7147 - DNA, 600 bp, Homo sapiens; identical to SEQ ID NO: 2875

SEQ ID NO: 7148 - DNA, 1168 bp, Homo sapiens; identical to SEQ ID NO: 2876

SEQ ID NO: 7149 - DNA, 600 bp, Homo sapiens; identical to SEQ ID NO: 2877

SEQ ID NO: 7150 - DNA, 600 bp, Homo sapiens; identical to SEQ ID NO: 2877

SEQ ID NO: 7151 - DNA, 600 bp, Homo sapiens; identical to SEQ ID NO: 2879

SEQ ID NO: 7152 - DNA, 600 bp, Homo sapiens; identical to SEQ ID NO: 2880

SEQ ID NO: 7153 - DNA, 600 bp, Homo sapiens; identical to SEQ ID NO: 2881

SEQ ID NO: 7154 - DNA, 600 bp, Homo sapiens; identical to SEQ ID NO: 2882

SEQ ID NO: 7155 - DNA, 1400 bp, Homo sapiens; identical to SEQ ID NO: 2883

SEQ ID NO: 7156 - DNA, 600 bp, Homo sapiens; identical to SEQ ID NO: 2884

SEQ ID NO: 7157 - DNA, 600 bp, Homo sapiens; identical to SEQ ID NO: 2885

SEQ ID NO: 7158 - DNA, 600 bp, Homo sapiens; identical to SEQ ID NO: 2886

SEQ ID NO: 7159 - DNA, 600 bp, Homo sapiens; identical to SEQ ID NO: 2886

SEQ ID NO: 7160 - DNA, 600 bp, Homo sapiens; identical to SEQ ID NO: 2888

SEQ ID NO: 7161 - DNA, 600 bp, Homo sapiens; identical to SEQ ID NO: 2888

SEQ ID NO: 7162 - DNA, 600 bp, Homo sapiens; identical to SEQ ID NO: 2890

SEQ ID NO: 7163 - DNA, 600 bp, Homo sapiens; identical to SEQ ID NO: 2890

SEQ ID NO: 7164 - DNA, 1400 bp, Homo sapiens; identical to SEQ ID NO: 2892

SEQ ID NO: 7165 - DNA, 1400 bp, Homo sapiens; identical to SEQ ID NO: 2893

SEQ ID NO: 7166 - DNA, 1400 bp, Homo sapiens; identical to SEQ ID NO: 2893

SEQ ID NO: 7167 - DNA, 600 bp, Homo sapiens; identical to SEQ ID NO: 2895

SEQ ID NO: 7168 - DNA, 930 bp, Homo sapiens; identical to SEQ ID NO: 2896

SEQ ID NO: 7169 - DNA, 600 bp, Homo sapiens; identical to SEQ ID NO: 2897

SEQ ID NO: 7170 - DNA, 600 bp, Homo sapiens; identical to SEQ ID NO: 2897

SEQ ID NO: 7171 - DNA, 600 bp, Homo sapiens; identical to SEQ ID NO: 2899

SEQ ID NO: 7172 - DNA, 600 bp, Homo sapiens; identical to SEQ ID NO: 2899

SEQ ID NO: 7173 - DNA, 600 bp, Homo sapiens; identical to SEQ ID NO: 2901

SEQ ID NO: 7174 - DNA, 600 bp, Homo sapiens; identical to SEQ ID NO: 2901

SEQ ID NO: 7175 - DNA, 600 bp, Homo sapiens; identical to SEQ ID NO: 2903

SEQ ID NO: 7176 - DNA, 600 bp, Homo sapiens; identical to SEQ ID NO: 2904

SEQ ID NO: 7177 - DNA, 600 bp, Homo sapiens; identical to SEQ ID NO: 2904

SEQ ID NO: 7178 - DNA, 600 bp, Homo sapiens; identical to SEQ ID NO: 2906

SEQ ID NO: 7179 - DNA, 600 bp, Homo sapiens; identical to SEQ ID NO: 2906

SEQ ID NO: 7180 - DNA, 1400 bp, Homo sapiens; identical to SEQ ID NO: 2908

SEQ ID NO: 7181 - DNA, 1400 bp, Homo sapiens; identical to SEQ ID NO: 2909

SEQ ID NO: 7182 - DNA, 600 bp, Homo sapiens; identical to SEQ ID NO: 2910

SEQ ID NO: 7183 - DNA, 600 bp, Homo sapiens; identical to SEQ ID NO: 2910

SEQ ID NO: 7184 - DNA, 600 bp, Homo sapiens; identical to SEQ ID NO: 2912

SEQ ID NO: 7185 - DNA, 600 bp, Homo sapiens; identical to SEQ ID NO: 2912

SEQ ID NO: 7186 - DNA, 600 bp, Homo sapiens; identical to SEQ ID NO: 2914

SEQ ID NO: 7187 - DNA, 600 bp, Homo sapiens; identical to SEQ ID NO: 2915

SEQ ID NO: 7188 - DNA, 600 bp, Homo sapiens; identical to SEQ ID NO: 2916

SEQ ID NO: 7189 - DNA, 600 bp, Homo sapiens; identical to SEQ ID NO: 2917

SEQ ID NO: 7190 - DNA, 600 bp, Homo sapiens; identical to SEQ ID NO: 2918

SEQ ID NO: 7191 - DNA, 600 bp, Homo sapiens; identical to SEQ ID NO: 2919

SEQ ID NO: 7192 - DNA, 600 bp, Homo sapiens; identical to SEQ ID NO: 2920

SEQ ID NO: 7193 - DNA, 600 bp, Homo sapiens; identical to SEQ ID NO: 2920

SEQ ID NO: 7194 - DNA, 600 bp, Homo sapiens; identical to SEQ ID NO: 2922

SEQ ID NO: 7195 - DNA, 600 bp, Homo sapiens; identical to SEQ ID NO: 2922

SEQ ID NO: 7196 - DNA, 600 bp, Homo sapiens; identical to SEQ ID NO: 2924

SEQ ID NO: 7197 - DNA, 600 bp, Homo sapiens; identical to SEQ ID NO: 2924

SEQ ID NO: 7198 - DNA, 600 bp, Homo sapiens; identical to SEQ ID NO: 2926

SEQ ID NO: 7199 - DNA, 1400 bp, Homo sapiens; identical to SEQ ID NO: 2927

SEQ ID NO: 7200 - DNA, 600 bp, Homo sapiens; identical to SEQ ID NO: 2928

SEQ ID NO: 7201 - DNA, 600 bp, Homo sapiens; identical to SEQ ID NO: 2928

SEQ ID NO: 7202 - DNA, 1400 bp, Homo sapiens; identical to SEQ ID NO: 2930

SEQ ID NO: 7203 - DNA, 600 bp, Homo sapiens; identical to SEQ ID NO: 2931

SEQ ID NO: 7204 - DNA, 600 bp, Homo sapiens; identical to SEQ ID NO: 2932

SEQ ID NO: 7205 - DNA, 600 bp, Homo sapiens; identical to SEQ ID NO: 2933

SEQ ID NO: 7206 - DNA, 600 bp, Homo sapiens; identical to SEQ ID NO: 2933

SEQ ID NO: 7207 - DNA, 1396 bp, Homo sapiens; identical to SEQ ID NO: 2935

SEQ ID NO: 7208 - DNA, 600 bp, Homo sapiens; identical to SEQ ID NO: 2936

SEQ ID NO: 7209 - DNA, 600 bp, Homo sapiens; identical to SEQ ID NO: 2936

SEQ ID NO: 7210 - DNA, 600 bp, Homo sapiens; identical to SEQ ID NO: 2938

SEQ ID NO: 7211 - DNA, 600 bp, Homo sapiens; identical to SEQ ID NO: 2938

SEQ ID NO: 7212 - DNA, 600 bp, Homo sapiens; identical to SEQ ID NO: 2940

SEQ ID NO: 7213 - DNA, 600 bp, Homo sapiens; identical to SEQ ID NO: 2940

SEQ ID NO: 7214 - DNA, 600 bp, Homo sapiens; identical to SEQ ID NO: 2942

SEQ ID NO: 7215 - DNA, 600 bp, Homo sapiens; identical to SEQ ID NO: 2943

SEQ ID NO: 7216 - DNA, 600 bp, Homo sapiens; identical to SEQ ID NO: 2943

SEQ ID NO: 7217 - DNA, 1394 bp, Homo sapiens; identical to SEQ ID NO: 2945

SEQ ID NO: 7218 - DNA, 600 bp, Homo sapiens; identical to SEQ ID NO: 2946

SEQ ID NO: 7219 - DNA, 600 bp, Homo sapiens; identical to SEQ ID NO: 2947

SEQ ID NO: 7220 - DNA, 600 bp, Homo sapiens; identical to SEQ ID NO: 2948

SEQ ID NO: 7221 - DNA, 600 bp, Homo sapiens; identical to SEQ ID NO: 2948

SEQ ID NO: 7222 - DNA, 1400 bp, Homo sapiens; identical to SEQ ID NO: 2950

SEQ ID NO: 7223 - DNA, 1373 bp, Homo sapiens; identical to SEQ ID NO: 2951

SEQ ID NO: 7224 - DNA, 950 bp, Homo sapiens; identical to SEQ ID NO: 2952

SEQ ID NO: 7225 - DNA, 950 bp, Homo sapiens; identical to SEQ ID NO: 2952

SEQ ID NO: 7226 - DNA, 600 bp, Homo sapiens; identical to SEQ ID NO: 2954

SEQ ID NO: 7227 - DNA, 600 bp, Homo sapiens; identical to SEQ ID NO: 2954

SEQ ID NO: 7228 - DNA, 600 bp, Homo sapiens; identical to SEQ ID NO: 2956

SEQ ID NO: 7229 - DNA, 600 bp, Homo sapiens; identical to SEQ ID NO: 2956

SEQ ID NO: 7230 - DNA, 600 bp, Homo sapiens; identical to SEQ ID NO: 2958

SEQ ID NO: 7231 - DNA, 1351 bp, Homo sapiens; identical to SEQ ID NO: 2959

SEQ ID NO: 7232 - DNA, 1351 bp, Homo sapiens; identical to SEQ ID NO: 2959

SEQ ID NO: 7233 - DNA, 1343 bp, Homo sapiens; identical to SEQ ID NO: 2961

SEQ ID NO: 7234 - DNA, 600 bp, Homo sapiens; identical to SEQ ID NO: 2962

SEQ ID NO: 7235 - DNA, 600 bp, Homo sapiens; identical to SEQ ID NO: 2963

SEQ ID NO: 7236 - DNA, 600 bp, Homo sapiens; identical to SEQ ID NO: 2963

SEQ ID NO: 7237 - DNA, 600 bp, Homo sapiens; identical to SEQ ID NO: 2965

SEQ ID NO: 7238 - DNA, 600 bp, Homo sapiens; identical to SEQ ID NO: 2965

SEQ ID NO: 7239 - DNA, 306 bp, Homo sapiens; identical to SEQ ID NO: 2967

SEQ ID NO: 7240 - DNA, 306 bp, Homo sapiens; identical to SEQ ID NO: 2967

SEQ ID NO: 7241 - DNA, 600 bp, Homo sapiens; identical to SEQ ID NO: 2969

SEQ ID NO: 7242 - DNA, 600 bp, Homo sapiens; identical to SEQ ID NO: 2970

SEQ ID NO: 7243 - DNA, 600 bp, Homo sapiens; identical to SEQ ID NO: 2970

SEQ ID NO: 7244 - DNA, 1400 bp, Homo sapiens; identical to SEQ ID NO: 2972

SEQ ID NO: 7245 - DNA, 1400 bp, Homo sapiens; identical to SEQ ID NO: 2973

SEQ ID NO: 7246 - DNA, 1400 bp, Homo sapiens; identical to SEQ ID NO: 2973

SEQ ID NO: 7247 - DNA, 600 bp, Homo sapiens; identical to SEQ ID NO: 2975

SEQ ID NO: 7248 - DNA, 600 bp, Homo sapiens; identical to SEQ ID NO: 2975

SEQ ID NO: 7249 - DNA, 600 bp, Homo sapiens; identical to SEQ ID NO: 2977

SEQ ID NO: 7250 - DNA, 600 bp, Homo sapiens; identical to SEQ ID NO: 2977

SEQ ID NO: 7251 - DNA, 600 bp, Homo sapiens; identical to SEQ ID NO: 2979

SEQ ID NO: 7252 - DNA, 600 bp, Homo sapiens; identical to SEQ ID NO: 2980

SEQ ID NO: 7253 - DNA, 600 bp, Homo sapiens; identical to SEQ ID NO: 2980

SEQ ID NO: 7254 - DNA, 600 bp, Homo sapiens; identical to SEQ ID NO: 2982

SEQ ID NO: 7255 - DNA, 600 bp, Homo sapiens; identical to SEQ ID NO: 2982

SEQ ID NO: 7256 - DNA, 600 bp, Homo sapiens; identical to SEQ ID NO: 2984

SEQ ID NO: 7257 - DNA, 600 bp, Homo sapiens; identical to SEQ ID NO: 2984

SEQ ID NO: 7258 - DNA, 600 bp, Homo sapiens; identical to SEQ ID NO: 2986

SEQ ID NO: 7259 - DNA, 600 bp, Homo sapiens; identical to SEQ ID NO: 2987

SEQ ID NO: 7260 - DNA, 600 bp, Homo sapiens; identical to SEQ ID NO: 2987

SEQ ID NO: 7261 - DNA, 600 bp, Homo sapiens; identical to SEQ ID NO: 2989

SEQ ID NO: 7262 - DNA, 600 bp, Homo sapiens; identical to SEQ ID NO: 2989

SEQ ID NO: 7263 - DNA, 600 bp, Homo sapiens; identical to SEQ ID NO: 2991

SEQ ID NO: 7264 - DNA, 1400 bp, Homo sapiens; identical to SEQ ID NO: 2992

SEQ ID NO: 7265 - DNA, 600 bp, Homo sapiens; identical to SEQ ID NO: 2993

SEQ ID NO: 7266 - DNA, 600 bp, Homo sapiens; identical to SEQ ID NO: 2993

SEQ ID NO: 7267 - DNA, 1400 bp, Homo sapiens; identical to SEQ ID NO: 2995
  misc_feature (1140)..(1140): n is a, c, g, or t

SEQ ID NO: 7268 - DNA, 1400 bp, Homo sapiens; identical to SEQ ID NO: 2996

SEQ ID NO: 7269 - DNA, 1400 bp, Homo sapiens; identical to SEQ ID NO: 2996

SEQ ID NO: 7270 - DNA, 600 bp, Homo sapiens; identical to SEQ ID NO: 2998

SEQ ID NO: 7271 - DNA, 600 bp, Homo sapiens; identical to SEQ ID NO: 2998

SEQ ID NO: 7272 - DNA, 600 bp, Homo sapiens; identical to SEQ ID NO: 3000

SEQ ID NO: 7273 - DNA, 600 bp, Homo sapiens; identical to SEQ ID NO: 3000

SEQ ID NO: 7274 - DNA, 600 bp, Homo sapiens; identical to SEQ ID NO: 3002

SEQ ID NO: 7275 - DNA, 199 bp, Homo sapiens; identical to SEQ ID NO: 3003

SEQ ID NO: 7276 - DNA, 600 bp, Homo sapiens; identical to SEQ ID NO: 3004

SEQ ID NO: 7277 - DNA, 600 bp, Homo sapiens; identical to SEQ ID NO: 3005
  misc_feature (366)..(366): n is a, c, g, or t
  misc_feature (434)..(434): n is a, c, g, or t
  misc_feature (444)..(444): n is a, c, g, or t
  misc_feature (485)..(485): n is a, c, g, or t
  misc_feature (517)..(517): n is a, c, g, or t
  misc_feature (534)..(534): n is a, c, g, or t
  misc_feature (536)..(536): n is a, c, g, or t
  misc_feature (588)..(588): n is a, c, g, or t

SEQ ID NO: 7278 - DNA, 600 bp, Homo sapiens; identical to SEQ ID NO: 3005
  misc_feature (366)..(366): n is a, c, g, or t
  misc_feature (434)..(434): n is a, c, g, or t
  misc_feature (444)..(444): n is a, c, g, or t
  misc_feature (485)..(485): n is a, c, g, or t
  misc_feature (517)..(517): n is a, c, g, or t
  misc_feature (534)..(534): n is a, c, g, or t
  misc_feature (536)..(536): n is a, c, g, or t
  misc_feature (588)..(588): n is a, c, g, or t

SEQ ID NO: 7279 - DNA, 1400 bp, Homo sapiens; identical to SEQ ID NO: 3007

SEQ ID NO: 7280 - DNA, 1400 bp, Homo sapiens; identical to SEQ ID NO: 3008

SEQ ID NO: 7281 - DNA, 1400 bp, Homo sapiens; identical to SEQ ID NO: 3008

SEQ ID NO: 7282 - DNA, 600 bp, Homo sapiens; identical to SEQ ID NO: 3010

SEQ ID NO: 7283 - DNA, 1400 bp, Homo sapiens; identical to SEQ ID NO: 3011

SEQ ID NO: 7284 - DNA, 1400 bp, Homo sapiens; identical to SEQ ID NO: 3011

SEQ ID NO: 7285 - DNA, 1400 bp, Homo sapiens; identical to SEQ ID NO: 3013

SEQ ID NO: 7286 - DNA, 1400 bp, Homo sapiens; identical to SEQ ID NO: 3014

SEQ ID NO: 7287 - DNA, 600 bp, Homo sapiens; identical to SEQ ID NO: 3015

SEQ ID NO: 7288 - DNA, 600 bp, Homo sapiens; identical to SEQ ID NO: 3016

SEQ ID NO: 7289 - DNA, 600 bp, Homo sapiens; identical to SEQ ID NO: 3016

SEQ ID NO: 7290 - DNA, 600 bp, Homo sapiens; identical to SEQ ID NO: 3018

SEQ ID NO: 7291 - DNA, 465 bp, Homo sapiens; identical to SEQ ID NO: 3019
  misc_feature (80)..(80): n is a, c, g, or t
  misc_feature (136)..(136): n is a, c, g, or t
  misc_feature (193)..(193): n is a, c, g, or t
  misc_feature (233)..(233): n is a, c, g, or t
  misc_feature (296)..(296): n is a, c, g, or t
  misc_feature (387)..(387): n is a, c, g, or t
  misc_feature (442)..(442): n is a, c, g, or t

SEQ ID NO: 7292 - DNA, 465 bp, Homo sapiens; identical to SEQ ID NO: 3019
  misc_feature (80)..(80): n is a, c, g, or t
  misc_feature (136)..(136): n is a, c, g, or t
  misc_feature (193)..(193): n is a, c, g, or t
  misc_feature (233)..(233): n is a, c, g, or t
  misc_feature (296)..(296): n is a, c, g, or t
  misc_feature (387)..(387): n is a, c, g, or t
  misc_feature (442)..(442): n is a, c, g, or t

SEQ ID NO: 7293 - DNA, 561 bp, Homo sapiens; identical to SEQ ID NO: 3021

SEQ ID NO: 7294 - DNA, 561 bp, Homo sapiens; identical to SEQ ID NO: 3021

SEQ ID NO: 7295 - DNA, 594 bp, Homo sapiens; identical to SEQ ID NO: 3023

SEQ ID NO: 7296 - DNA, 513 bp, Homo sapiens; identical to SEQ ID NO: 3024

SEQ ID NO: 7297 - DNA, 513 bp, Homo sapiens; identical to SEQ ID NO: 3024

SEQ ID NO: 7298 - DNA, 600 bp, Homo sapiens; identical to SEQ ID NO: 3026

SEQ ID NO: 7299 - DNA, 600 bp, Homo sapiens; identical to SEQ ID NO: 3026

SEQ ID NO: 7300 - DNA, 378 bp, Homo sapiens; identical to SEQ ID NO: 3028

SEQ ID NO: 7301 - DNA, 1400 bp, Homo sapiens; identical to SEQ ID NO: 3029

SEQ ID NO: 7302 - DNA, 1400 bp, Homo sapiens; identical to SEQ ID NO: 3029

SEQ ID NO: 7303 - DNA, 600 bp, Homo sapiens; identical to SEQ ID NO: 3031

SEQ ID NO: 7304 - DNA, 600 bp, Homo sapiens; identical to SEQ ID NO: 3032

SEQ ID NO: 7305 - DNA, 600 bp, Homo sapiens; identical to SEQ ID NO: 3032

SEQ ID NO: 7306 - DNA, 600 bp, Homo sapiens; identical to SEQ ID NO: 3034

SEQ ID NO: 7307 - DNA, 600 bp, Homo sapiens; identical to SEQ ID NO: 3034

SEQ ID NO: 7308 - DNA, 600 bp, Homo sapiens; identical to SEQ ID NO: 3036

SEQ ID NO: 7309 - DNA, 600 bp, Homo sapiens; identical to SEQ ID NO: 3036

SEQ ID NO: 7310 - DNA, 600 bp, Homo sapiens; identical to SEQ ID NO: 3038

SEQ ID NO: 7311 - DNA, 600 bp, Homo sapiens; identical to SEQ ID NO: 3038

SEQ ID NO: 7312 - DNA, 600 bp, Homo sapiens; identical to SEQ ID NO: 3040

SEQ ID NO: 7313 - DNA, 600 bp, Homo sapiens; identical to SEQ ID NO: 3040

SEQ ID NO: 7314 - DNA, 600 bp, Homo sapiens; identical to SEQ ID NO: 3042

SEQ ID NO: 7315 - DNA, 600 bp, Homo sapiens; identical to SEQ ID NO: 3042

SEQ ID NO: 7316 - DNA, 600 bp, Homo sapiens; identical to SEQ ID NO: 3044

SEQ ID NO: 7317 - DNA, 600 bp, Homo sapiens; identical to SEQ ID NO: 3045

SEQ ID NO: 7318 - DNA, 600 bp, Homo sapiens; identical to SEQ ID NO: 3045

SEQ ID NO: 7319 - DNA, 600 bp, Homo sapiens; identical to SEQ ID NO: 3047

SEQ ID NO: 7320 - DNA, 1400 bp, Homo sapiens; identical to SEQ ID NO: 3048

SEQ ID NO: 7321 - DNA, 600 bp, Homo sapiens; identical to SEQ ID NO: 3049

SEQ ID NO: 7322 - DNA, 600 bp, Homo sapiens; identical to SEQ ID NO: 3049

SEQ ID NO: 7323 - DNA, 600 bp, Homo sapiens; identical to SEQ ID NO: 3051

SEQ ID NO: 7324 - DNA, 600 bp, Homo sapiens; identical to SEQ ID NO: 3051

SEQ ID NO: 7325 - DNA, 600 bp, Homo sapiens; identical to SEQ ID NO: 3053

SEQ ID NO: 7326 - DNA, 1400 bp, Homo sapiens; identical to SEQ ID NO: 3054

SEQ ID NO: 7327 - DNA, 600 bp, Homo sapiens; identical to SEQ ID NO: 3055

SEQ ID NO: 7328 - DNA, 600 bp, Homo sapiens; identical to SEQ ID NO: 3055

SEQ ID NO: 7329 - DNA, 558 bp, Homo sapiens; identical to SEQ ID NO: 3057

SEQ ID NO: 7330 - DNA, 558 bp, Homo sapiens; identical to SEQ ID NO: 3057

SEQ ID NO: 7331 - DNA, 600 bp, Homo sapiens; identical to SEQ ID NO: 3059

SEQ ID NO: 7332 - DNA, 600 bp, Homo sapiens; identical to SEQ ID NO: 3060

SEQ ID NO: 7333 - DNA, 348 bp, Homo sapiens; identical to SEQ ID NO: 3061

SEQ ID NO: 7334 - DNA, 348 bp, Homo sapiens; identical to SEQ ID NO: 3061

SEQ ID NO: 7335 - DNA, 600 bp, Homo sapiens; identical to SEQ ID NO: 3063

SEQ ID NO: 7336 - DNA, 600 bp, Homo sapiens; identical to SEQ ID NO: 3064

SEQ ID NO: 7337 - DNA, 600 bp, Homo sapiens; identical to SEQ ID NO: 3065

SEQ ID NO: 7338 - DNA, 600 bp, Homo sapiens; identical to SEQ ID NO: 3065

SEQ ID NO: 7339 - DNA, 600 bp, Homo sapiens; identical to SEQ ID NO: 3067

SEQ ID NO: 7340 - DNA, 600 bp, Homo sapiens; identical to SEQ ID NO: 3068

SEQ ID NO: 7341 - DNA, 600 bp, Homo sapiens; identical to SEQ ID NO: 3069

SEQ ID NO: 7342 - DNA, 600 bp, Homo sapiens; identical to SEQ ID NO: 3070

SEQ ID NO: 7343 - DNA, 600 bp, Homo sapiens; identical to SEQ ID NO: 3070

SEQ ID NO: 7344 - DNA, 600 bp, Homo sapiens; identical to SEQ ID NO: 3072

SEQ ID NO: 7345 - DNA, 600 bp, Homo sapiens; identical to SEQ ID NO: 3072

SEQ ID NO: 7346 - DNA, 600 bp, Homo sapiens; identical to SEQ ID NO: 3074

SEQ ID NO: 7347 - DNA, 600 bp, Homo sapiens; identical to SEQ ID NO: 3074

SEQ ID NO: 7348 - DNA, 600 bp, Homo sapiens; identical to SEQ ID NO: 3076

SEQ ID NO: 7349 - DNA, 600 bp, Homo sapiens; identical to SEQ ID NO: 3077

SEQ ID NO: 7350 - DNA, 217 bp, Homo sapiens; identical to SEQ ID NO: 3078

SEQ ID NO: 7351 - DNA, 217 bp, Homo sapiens; identical to SEQ ID NO: 3078

SEQ ID NO: 7352 - DNA, 600 bp, Homo sapiens; identical to SEQ ID NO: 3080

SEQ ID NO: 7353 - DNA, 600 bp, Homo sapiens; identical to SEQ ID NO: 3080

SEQ ID NO: 7354 - DNA, 600 bp, Homo sapiens; identical to SEQ ID NO: 3082

SEQ ID NO: 7355 - DNA, 600 bp, Homo sapiens; identical to SEQ ID NO: 3083

SEQ ID NO: 7356 - DNA, 600 bp, Homo sapiens; identical to SEQ ID NO: 3083

SEQ ID NO: 7357 - DNA, 600 bp, Homo sapiens; identical to SEQ ID NO: 3085

SEQ ID NO: 7358 - DNA, 600 bp, Homo sapiens; identical to SEQ ID NO: 3086

SEQ ID NO: 7359 - DNA, 600 bp, Homo sapiens; identical to SEQ ID NO: 3087

SEQ ID NO: 7360 - DNA, 1400 bp, Homo sapiens; identical to SEQ ID NO: 3088

SEQ ID NO: 7361 - DNA, 1400 bp, Homo sapiens; identical to SEQ ID NO: 3088

SEQ ID NO: 7362 - DNA, 600 bp, Homo sapiens; identical to SEQ ID NO: 3090

SEQ ID NO: 7363 - DNA, 600 bp, Homo sapiens; identical to SEQ ID NO: 3090

SEQ ID NO: 7364 - DNA, 417 bp, Homo sapiens; identical to SEQ ID NO: 3092

SEQ ID NO: 7365 - DNA, 111 bp, Homo sapiens; identical to SEQ ID NO: 3093

SEQ ID NO: 7366 - DNA, 111 bp, Homo sapiens; identical to SEQ ID NO: 3093

SEQ ID NO: 7367 - DNA, 291 bp, Homo sapiens; identical to SEQ ID NO: 3095

SEQ ID NO: 7368 - DNA, 291 bp, Homo sapiens; identical to SEQ ID NO: 3095

SEQ ID NO: 7369 - DNA, 600 bp, Homo sapiens; identical to SEQ ID NO: 3097

SEQ ID NO: 7370 - DNA, 1400 bp, Homo sapiens; identical to SEQ ID NO: 3098

SEQ ID NO: 7371 - DNA, 1400 bp, Homo sapiens; identical to SEQ ID NO: 3098

SEQ ID NO: 7372 - DNA, 1400 bp, Homo sapiens; identical to SEQ ID NO: 3100

SEQ ID NO: 7373 - DNA, 1400 bp, Homo sapiens; identical to SEQ ID NO: 3100

SEQ ID NO: 7374 - DNA, 600 bp, Homo sapiens; identical to SEQ ID NO: 3102

SEQ ID NO: 7375 - DNA, 600 bp, Homo sapiens; identical to SEQ ID NO: 3102

SEQ ID NO: 7376 - DNA, 1400 bp, Homo sapiens; identical to SEQ ID NO: 3104

SEQ ID NO: 7377 - DNA, 1400 bp, Homo sapiens; identical to SEQ ID NO: 3104

SEQ ID NO: 7378 - DNA, 600 bp, Homo sapiens; identical to SEQ ID NO: 3106

SEQ ID NO: 7379 - DNA, 600 bp, Homo sapiens; identical to SEQ ID NO: 3107
  misc_feature (104)..(104): n is a, c, g, or t
  misc_feature (336)..(336): n is a, c, g, or t

SEQ ID NO: 7380 - DNA, 600 bp, Homo sapiens; identical to SEQ ID NO: 3107
  misc_feature (104)..(104): n is a, c, g, or t
  misc_feature (336)..(336): n is a, c, g, or t

SEQ ID NO: 7381 - DNA, 600 bp, Homo sapiens; identical to SEQ ID NO: 3109

SEQ ID NO: 7382 - DNA, 600 bp, Homo sapiens; identical to SEQ ID NO: 3109

SEQ ID NO: 7383 - DNA, 219 bp, Homo sapiens; identical to SEQ ID NO: 3111

SEQ ID NO: 7384 - DNA, 219 bp, Homo sapiens; identical to SEQ ID NO: 3111

SEQ ID NO: 7385 - DNA, 600 bp, Homo sapiens; identical to SEQ ID NO: 3113

SEQ ID NO: 7386 - DNA, 600 bp, Homo sapiens; identical to SEQ ID NO: 3114

SEQ ID NO: 7387 - DNA, 903 bp, Homo sapiens; identical to SEQ ID NO: 3115

SEQ ID NO: 7388 - DNA, 1400 bp, Homo sapiens; identical to SEQ ID NO: 3116

SEQ ID NO: 7389 - DNA, 1400 bp, Homo sapiens; identical to SEQ ID NO: 3116

SEQ ID NO: 7390 - DNA, 1400 bp, Homo sapiens; identical to SEQ ID NO: 3118

SEQ ID NO: 7391 - DNA, 600 bp, Homo sapiens; identical to SEQ ID NO: 3119

SEQ ID NO: 7392 - DNA, 600 bp, Homo sapiens; identical to SEQ ID NO: 3119

SEQ ID NO: 7393 - DNA, 600 bp, Homo sapiens; identical to SEQ ID NO: 3121

SEQ ID NO: 7394 - DNA, 600 bp, Homo sapiens; identical to SEQ ID NO: 3122

SEQ ID NO: 7395 - DNA, 600 bp, Homo sapiens; identical to SEQ ID NO: 3122

SEQ ID NO: 7396 - DNA, 600 bp, Homo sapiens; identical to SEQ ID NO: 3124

SEQ ID NO: 7397 - DNA, 600 bp, Homo sapiens; identical to SEQ ID NO: 3125

SEQ ID NO: 7398 - DNA, 600 bp, Homo sapiens; identical to SEQ ID NO: 3125

SEQ ID NO: 7399 - DNA, 600 bp, Homo sapiens; identical to SEQ ID NO: 3127

SEQ ID NO: 7400 - DNA, 600 bp, Homo sapiens; identical to SEQ ID NO: 3127

SEQ ID NO: 7401 - DNA, 1400 bp, Homo sapiens; identical to SEQ ID NO: 3129

SEQ ID NO: 7402 - DNA, 550 bp, Homo sapiens; identical to SEQ ID NO: 3130

SEQ ID NO: 7403 - DNA, 550 bp, Homo sapiens; identical to SEQ ID NO: 3130

SEQ ID NO: 7404 - DNA, 600 bp, Homo sapiens; identical to SEQ ID NO: 3132

SEQ ID NO: 7405 - DNA, 600 bp, Homo sapiens; identical to SEQ ID NO: 3132

SEQ ID NO: 7406 - DNA, 375 bp, Homo sapiens; identical to SEQ ID NO: 3134

SEQ ID NO: 7407 - DNA, 375 bp, Homo sapiens; identical to SEQ ID NO: 3134

SEQ ID NO: 7408 - DNA, 600 bp, Homo sapiens; identical to SEQ ID NO: 3136

SEQ ID NO: 7409 - DNA, 600 bp, Homo sapiens; identical to SEQ ID NO: 3136

SEQ ID NO: 7410 - DNA, 1400 bp, Homo sapiens; identical to SEQ ID NO: 3138

SEQ ID NO: 7411 - DNA, 600 bp, Homo sapiens; identical to SEQ ID NO: 3139

SEQ ID NO: 7412 - DNA, 600 bp, Homo sapiens; identical to SEQ ID NO: 3140

SEQ ID NO: 7413 - DNA, 600 bp, Homo sapiens; identical to SEQ ID NO: 3140

SEQ ID NO: 7414 - DNA, 600 bp, Homo sapiens; identical to SEQ ID NO: 3142

SEQ ID NO: 7415 - DNA, 600 bp, Homo sapiens; identical to SEQ ID NO: 3142

SEQ ID NO: 7416 - DNA, 600 bp, Homo sapiens; identical to SEQ ID NO: 3144

SEQ ID NO: 7417 - DNA, 600 bp, Homo sapiens; identical to SEQ ID NO: 3144

SEQ ID NO: 7418 - DNA, 1400 bp, Homo sapiens; identical to SEQ ID NO: 3146

SEQ ID NO: 7419 - DNA, 600 bp, Homo sapiens; identical to SEQ ID NO: 3147

SEQ ID NO: 7420 - DNA, 600 bp, Homo sapiens; identical to SEQ ID NO: 3147

SEQ ID NO: 7421 - DNA, 600 bp, Homo sapiens; identical to SEQ ID NO: 3149

SEQ ID NO: 7422 - DNA, 1400 bp, Homo sapiens; identical to SEQ ID NO: 3150

SEQ ID NO: 7423 - DNA, 600 bp, Homo sapiens; identical to SEQ ID NO: 3151

SEQ ID NO: 7424 - DNA, 600 bp, Homo sapiens; identical to SEQ ID NO: 3151

SEQ ID NO: 7425 - DNA, 1400 bp, Homo sapiens; identical to SEQ ID NO: 3153

SEQ ID NO: 7426 - DNA, 600 bp, Homo sapiens; identical to SEQ ID NO: 3154

SEQ ID NO: 7427 - DNA, 600 bp, Homo sapiens; identical to SEQ ID NO: 3155

SEQ ID NO: 7428 - DNA, 600 bp, Homo sapiens; identical to SEQ ID NO: 3155

SEQ ID NO: 7429 - DNA, 600 bp, Homo sapiens; identical to SEQ ID NO: 3157

SEQ ID NO: 7430 - DNA, 1400 bp, Homo sapiens; identical to SEQ ID NO: 3158

SEQ ID NO: 7431 - DNA, 600 bp, Homo sapiens; identical to SEQ ID NO: 3159

SEQ ID NO: 7432 - DNA, 600 bp, Homo sapiens; identical to SEQ ID NO: 3160

SEQ ID NO: 7433 - DNA, 600 bp, Homo sapiens; identical to SEQ ID NO: 3161

SEQ ID NO: 7434 - DNA, 600 bp, Homo sapiens; identical to SEQ ID NO: 3162

SEQ ID NO: 7435 - DNA, 600 bp, Homo sapiens; identical to SEQ ID NO: 3162

SEQ ID NO: 7436 - DNA, 600 bp, Homo sapiens; identical to SEQ ID NO: 3164

SEQ ID NO: 7437 - DNA, 600 bp, Homo sapiens; identical to SEQ ID NO: 3164

SEQ ID NO: 7438 - DNA, 600 bp, Homo sapiens; identical to SEQ ID NO: 3166

SEQ ID NO: 7439 - DNA, 600 bp, Homo sapiens; identical to SEQ ID NO: 3166

SEQ ID NO: 7440 - DNA, 600 bp, Homo sapiens; identical to SEQ ID NO: 3168

SEQ ID NO: 7441 - DNA, 600 bp, Homo sapiens; identical to SEQ ID NO: 3168

SEQ ID NO: 7442 - DNA, 600 bp, Homo sapiens; identical to SEQ ID NO: 3170

SEQ ID NO: 7443 - DNA, 600 bp, Homo sapiens; identical to SEQ ID NO: 3170

SEQ ID NO: 7444 - DNA, 600 bp, Homo sapiens; identical to SEQ ID NO: 3172

SEQ ID NO: 7445 - DNA, 600 bp, Homo sapiens; identical to SEQ ID NO: 3172

SEQ ID NO: 7446 - DNA, 600 bp, Homo sapiens; identical to SEQ ID NO: 3174

SEQ ID NO: 7447 - DNA, 600 bp, Homo sapiens; identical to SEQ ID NO: 3175

SEQ ID NO: 7448 - DNA, 600 bp, Homo sapiens; identical to SEQ ID NO: 3175

SEQ ID NO: 7449 - DNA, 600 bp, Homo sapiens; identical to SEQ ID NO: 3177

SEQ ID NO: 7450 - DNA, 600 bp, Homo sapiens; identical to SEQ ID NO: 3178

SEQ ID NO: 7451 - DNA, 600 bp, Homo sapiens; identical to SEQ ID NO: 3179

SEQ ID NO: 7452 - DNA, 600 bp, Homo sapiens; identical to SEQ ID NO: 3179

SEQ ID NO: 7453 - DNA, 600 bp, Homo sapiens; identical to SEQ ID NO: 3181

SEQ ID NO: 7454 - DNA, 600 bp, Homo sapiens; identical to SEQ ID NO: 3182

SEQ ID NO: 7455 - DNA, 600 bp, Homo sapiens; identical to SEQ ID NO: 3183

SEQ ID NO: 7456 - DNA, 600 bp, Homo sapiens; identical to SEQ ID NO: 3184

SEQ ID NO: 7457 - DNA, 600 bp, Homo sapiens; identical to SEQ ID NO: 3184

SEQ ID NO: 7458 - DNA, 600 bp, Homo sapiens; identical to SEQ ID NO: 3186

SEQ ID NO: 7459 - DNA, 600 bp, Homo sapiens; identical to SEQ ID NO: 3187

SEQ ID NO: 7460 - DNA, 600 bp, Homo sapiens; identical to SEQ ID NO: 3187

SEQ ID NO: 7461 - DNA, 600 bp, Homo sapiens; identical to SEQ ID NO: 3189

SEQ ID NO: 7462 - DNA, 600 bp, Homo sapiens; identical to SEQ ID NO: 3190

SEQ ID NO: 7463 - DNA, 600 bp, Homo sapiens; identical to SEQ ID NO: 3190

SEQ ID NO: 7464 - DNA, 600 bp, Homo sapiens; identical to SEQ ID NO: 3192

SEQ ID NO: 7465 - DNA, 600 bp, Homo sapiens; identical to SEQ ID NO: 3192

SEQ ID NO: 7466 - DNA, 600 bp, Homo sapiens; identical to SEQ ID NO: 3194

SEQ ID NO: 7467 - DNA, 600 bp, Homo sapiens; identical to SEQ ID NO: 3194

SEQ ID NO: 7468 - DNA, 600 bp, Homo sapiens; identical to SEQ ID NO: 3196

SEQ ID NO: 7469 - DNA, 600 bp, Homo sapiens; identical to SEQ ID NO: 3196

SEQ ID NO: 7470 - DNA, 402 bp, Homo sapiens; identical to SEQ ID NO: 3198

SEQ ID NO: 7471 - DNA, 600 bp, Homo sapiens; identical to SEQ ID NO: 3199

SEQ ID NO: 7472 - DNA, 600 bp, Homo sapiens; identical to SEQ ID NO: 3199

SEQ ID NO: 7473 - DNA, 600 bp, Homo sapiens; identical to SEQ ID NO: 3201

SEQ ID NO: 7474 - DNA, 600 bp, Homo sapiens; identical to SEQ ID NO: 3201

SEQ ID NO: 7475 - DNA, 600 bp, Homo sapiens; identical to SEQ ID NO: 3203

SEQ ID NO: 7476 - DNA, 600 bp, Homo sapiens; identical to SEQ ID NO: 3204

SEQ ID NO: 7477 - DNA, 600 bp, Homo sapiens; identical to SEQ ID NO: 3205

SEQ ID NO: 7478 - DNA, 600 bp, Homo sapiens; identical to SEQ ID NO: 3205

SEQ ID NO: 7479 - DNA, 600 bp, Homo sapiens; identical to SEQ ID NO: 3207

SEQ ID NO: 7480 - DNA, 600 bp, Homo sapiens; identical to SEQ ID NO: 3208

SEQ ID NO: 7481 - DNA, 600 bp, Homo sapiens; identical to SEQ ID NO: 3209

SEQ ID NO: 7482 - DNA, 600 bp, Homo sapiens; identical to SEQ ID NO: 3209

SEQ ID NO: 7483 - DNA, 600 bp, Homo sapiens; identical to SEQ ID NO: 3211

SEQ ID NO: 7484 - DNA, 600 bp, Homo sapiens; identical to SEQ ID NO: 3212

SEQ ID NO: 7485 - DNA, 600 bp, Homo sapiens; identical to SEQ ID NO: 3213

SEQ ID NO: 7486 - DNA, 600 bp, Homo sapiens; identical to SEQ ID NO: 3214

SEQ ID NO: 7487 - DNA, 98 bp, Homo sapiens; identical to SEQ ID NO: 3215

SEQ ID NO: 7488 - DNA, 600 bp, Homo sapiens; identical to SEQ ID NO: 3216

SEQ ID NO: 7489 - DNA, 600 bp, Homo sapiens; identical to SEQ ID NO: 3216

SEQ ID NO: 7490 - DNA, 600 bp, Homo sapiens; identical to SEQ ID NO: 3218

SEQ ID NO: 7491 - DNA, 600 bp, Homo sapiens; identical to SEQ ID NO: 3218

SEQ ID NO: 7492 - DNA, 600 bp, Homo sapiens; identical to SEQ ID NO: 3220

SEQ ID NO: 7493 - DNA, 600 bp, Homo sapiens; identical to SEQ ID NO: 3221

SEQ ID NO: 7494 - DNA, 600 bp, Homo sapiens; identical to SEQ ID NO: 3221

SEQ ID NO: 7495 - DNA, 600 bp, Homo sapiens; identical to SEQ ID NO: 3223

SEQ ID NO: 7496 - DNA, 600 bp, Homo sapiens; identical to SEQ ID NO: 3223

SEQ ID NO: 7497 - DNA, 600 bp, Homo sapiens; identical to SEQ ID NO: 3225

SEQ ID NO: 7498 - DNA, 600 bp, Homo sapiens; identical to SEQ ID NO: 3225

SEQ ID NO: 7499 - DNA, 600 bp, Homo sapiens; identical to SEQ ID NO: 3227

SEQ ID NO: 7500 - DNA, 600 bp, Homo sapiens; identical to SEQ ID NO: 3227

SEQ ID NO: 7501 - DNA, 600 bp, Homo sapiens; identical to SEQ ID NO: 3229

SEQ ID NO: 7502 - DNA, 600 bp, Homo sapiens; identical to SEQ ID NO: 3229

SEQ ID NO: 7503 - DNA, 600 bp, Homo sapiens; identical to SEQ ID NO: 3231

SEQ ID NO: 7504 - DNA, 600 bp, Homo sapiens; identical to SEQ ID NO: 3231

SEQ ID NO: 7505 - DNA, 600 bp, Homo sapiens; identical to SEQ ID NO: 3233

SEQ ID NO: 7506 - DNA, 465 bp, Homo sapiens; identical to SEQ ID NO: 3234

SEQ ID NO: 7507 - DNA, 600 bp, Homo sapiens; identical to SEQ ID NO: 3235

SEQ ID NO: 7508 - DNA, 600 bp, Homo sapiens; identical to SEQ ID NO: 3236

SEQ ID NO: 7509 - DNA, 600 bp, Homo sapiens; identical to SEQ ID NO: 3236

SEQ ID NO: 7510 - DNA, 600 bp, Homo sapiens; identical to SEQ ID NO: 3238

SEQ ID NO: 7511 - DNA, 600 bp, Homo sapiens; identical to SEQ ID NO: 3239

SEQ ID NO: 7512 - DNA, 600 bp, Homo sapiens; identical to SEQ ID NO: 3239

SEQ ID NO: 7513 - DNA, 600 bp, Homo sapiens; identical to SEQ ID NO: 3241

SEQ ID NO: 7514 - DNA, 600 bp, Homo sapiens; identical to SEQ ID NO: 3241

SEQ ID NO: 7515 - DNA, 198 bp, Homo sapiens; identical to SEQ ID NO: 3243

SEQ ID NO: 7516 - DNA, 198 bp, Homo sapiens; identical to SEQ ID NO: 3243

SEQ ID NO: 7517 - DNA, 600 bp, Homo sapiens; identical to SEQ ID NO: 3245

SEQ ID NO: 7518 - DNA, 600 bp, Homo sapiens; identical to SEQ ID NO: 3245

SEQ ID NO: 7519 - DNA, 348 bp, Homo sapiens; identical to SEQ ID NO: 3247

SEQ ID NO: 7520 - DNA, 348 bp, Homo sapiens; identical to SEQ ID NO: 3247

SEQ ID NO: 7521 - DNA, 600 bp, Homo sapiens; identical to SEQ ID NO: 3249

SEQ ID NO: 7522 - DNA, 600 bp, Homo sapiens; identical to SEQ ID NO: 3249

SEQ ID NO: 7523 - DNA, 600 bp, Homo sapiens; identical to SEQ ID NO: 3251

SEQ ID NO: 7524 - DNA, 600 bp, Homo sapiens; identical to SEQ ID NO: 3252

SEQ ID NO: 7525 - DNA, 600 bp, Homo sapiens; identical to SEQ ID NO: 3253

SEQ ID NO: 7526 - DNA, 600 bp, Homo sapiens; identical to SEQ ID NO: 3254
  misc_feature (533)..(533): n is a, c, g, or t

SEQ ID NO: 7527 - DNA, 600 bp, Homo sapiens; identical to SEQ ID NO: 3254
  misc_feature (533)..(533): n is a, c, g, or t

SEQ ID NO: 7528 - DNA, 1400 bp, Homo sapiens; identical to SEQ ID NO: 3256

SEQ ID NO: 7529 - DNA, 95 bp, Homo sapiens; identical to SEQ ID NO: 3257

SEQ ID NO: 7530 - DNA, 600 bp, Homo sapiens; identical to SEQ ID NO: 3258

SEQ ID NO: 7531 - DNA, 600 bp, Homo sapiens; identical to SEQ ID NO: 3258

SEQ ID NO: 7532 - DNA, 273 bp, Homo sapiens; identical to SEQ ID NO: 3260

SEQ ID NO: 7533 - DNA, 273 bp, Homo sapiens; identical to SEQ ID NO: 3260

SEQ ID NO: 7534 - DNA, 600 bp, Homo sapiens; identical to SEQ ID NO: 3262

SEQ ID NO: 7535 - DNA, 600 bp, Homo sapiens; identical to SEQ ID NO: 3262

SEQ ID NO: 7536 - DNA, 600 bp, Homo sapiens; identical to SEQ ID NO: 3264

SEQ ID NO: 7537 - DNA, 600 bp, Homo sapiens; identical to SEQ ID NO: 3264

SEQ ID NO: 7538 - DNA, 600 bp, Homo sapiens; identical to SEQ ID NO: 3266

SEQ ID NO: 7539 - DNA, 600 bp, Homo sapiens; identical to SEQ ID NO: 3267

SEQ ID NO: 7540 - DNA, 600 bp, Homo sapiens; identical to SEQ ID NO: 3267

SEQ ID NO: 7541 - DNA, 600 bp, Homo sapiens; identical to SEQ ID NO: 3269

SEQ ID NO: 7542 - DNA, 600 bp, Homo sapiens; identical to SEQ ID NO: 3269

SEQ ID NO: 7543 - DNA, 600 bp, Homo sapiens; identical to SEQ ID NO: 3271

SEQ ID NO: 7544 - DNA, 600 bp, Homo sapiens; identical to SEQ ID NO: 3272

SEQ ID NO: 7545 - DNA, 600 bp, Homo sapiens; identical to SEQ ID NO: 3273

SEQ ID NO: 7546 - DNA, 600 bp, Homo sapiens; identical to SEQ ID NO: 3274

SEQ ID NO: 7547 - DNA, 402 bp, Homo sapiens; identical to SEQ ID NO: 3275

SEQ ID NO: 7548 - DNA, 402 bp, Homo sapiens; identical to SEQ ID NO: 3275

SEQ ID NO: 7549 - DNA, 293 bp, Homo sapiens; identical to SEQ ID NO: 3277

SEQ ID NO: 7550 - DNA, 293 bp, Homo sapiens; identical to SEQ ID NO: 3277

SEQ ID NO: 7551 - DNA, 600 bp, Homo sapiens; identical to SEQ ID NO: 3279

SEQ ID NO: 7552 - DNA, 600 bp, Homo sapiens; identical to SEQ ID NO: 3279

SEQ ID NO: 7553 - DNA, 164 bp, Homo sapiens; identical to SEQ ID NO: 3281

SEQ ID NO: 7554 - DNA, 600 bp, Homo sapiens; identical to SEQ ID NO: 3282

SEQ ID NO: 7555 - DNA, 600 bp, Homo sapiens; identical to SEQ ID NO: 3282

SEQ ID NO: 7556 - DNA, 453 bp, Homo sapiens; identical to SEQ ID NO: 3284

SEQ ID NO: 7557 - DNA, 453 bp, Homo sapiens; identical to SEQ ID NO: 3284

SEQ ID NO: 7558 - DNA, 600 bp, Homo sapiens; identical to SEQ ID NO: 3286

SEQ ID NO: 7559 - DNA, 600 bp, Homo sapiens; identical to SEQ ID NO: 3286

SEQ ID NO: 7560 - DNA, 600 bp, Homo sapiens; identical to SEQ ID NO: 3288

SEQ ID NO: 7561 - DNA, 600 bp, Homo sapiens; identical to SEQ ID NO: 3289

SEQ ID NO: 7562 - DNA, 600 bp, Homo sapiens; identical to SEQ ID NO: 3290

SEQ ID NO: 7563 - DNA, 600 bp, Homo sapiens; identical to SEQ ID NO: 3291

SEQ ID NO: 7564 - DNA, 600 bp, Homo sapiens; identical to SEQ ID NO: 3292

SEQ ID NO: 7565 - DNA, 600 bp, Homo sapiens; identical to SEQ ID NO: 3292

SEQ ID NO: 7566 - DNA, 600 bp, Homo sapiens; identical to SEQ ID NO: 3294

SEQ ID NO: 7567 - DNA, 600 bp, Homo sapiens; identical to SEQ ID NO: 3294

SEQ ID NO: 7568 - DNA, 600 bp, Homo sapiens; identical to SEQ ID NO: 3296

SEQ ID NO: 7569 - DNA, 600 bp, Homo sapiens; identical to SEQ ID NO: 3296

SEQ ID NO: 7570 - DNA, 442 bp, Homo sapiens; identical to SEQ ID NO: 3298

SEQ ID NO: 7571 - DNA, 442 bp, Homo sapiens; identical to SEQ ID NO: 3298

SEQ ID NO: 7572 - DNA, 600 bp, Homo sapiens; identical to SEQ ID NO: 3300

SEQ ID NO: 7573 - DNA, 600 bp, Homo sapiens; identical to SEQ ID NO: 3300

SEQ ID NO: 7574 - DNA, 600 bp, Homo sapiens; identical to SEQ ID NO: 3302

SEQ ID NO: 7575 - DNA, 600 bp, Homo sapiens; identical to SEQ ID NO: 3302

SEQ ID NO: 7576 - DNA, 354 bp, Homo sapiens; identical to SEQ ID NO: 3304

SEQ ID NO: 7577 - DNA, 600 bp, Homo sapiens; identical to SEQ ID NO: 3305

SEQ ID NO: 7578 - DNA, 600 bp, Homo sapiens; identical to SEQ ID NO: 3305

SEQ ID NO: 7579 - DNA, 600 bp, Homo sapiens; identical to SEQ ID NO: 3307

SEQ ID NO: 7580 - DNA, 600 bp, Homo sapiens; identical to SEQ ID NO: 3307

SEQ ID NO: 7581 - DNA, 600 bp, Homo sapiens; identical to SEQ ID NO: 3309

SEQ ID NO: 7582 - DNA, 600 bp, Homo sapiens; identical to SEQ ID NO: 3310

SEQ ID NO: 7583 - DNA, 600 bp, Homo sapiens; identical to SEQ ID NO: 3310

SEQ ID NO: 7584 - DNA, 600 bp, Homo sapiens; identical to SEQ ID NO: 3312

SEQ ID NO: 7585 - DNA, 600 bp, Homo sapiens; identical to SEQ ID NO: 3312

SEQ ID NO: 7586 - DNA, 600 bp, Homo sapiens; identical to SEQ ID NO: 3314

SEQ ID NO: 7587 - DNA, 600 bp, Homo sapiens; identical to SEQ ID NO: 3314

SEQ ID NO: 7588 - DNA, 600 bp, Homo sapiens; identical to SEQ ID NO: 3316

SEQ ID NO: 7589 - DNA, 600 bp, Homo sapiens; identical to SEQ ID NO: 3317

SEQ ID NO: 7590 - DNA, 600 bp, Homo sapiens; identical to SEQ ID NO: 3317

SEQ ID NO: 7591 - DNA, 600 bp, Homo sapiens; identical to SEQ ID NO: 3319

SEQ ID NO: 7592 - DNA, 600 bp, Homo sapiens; identical to SEQ ID NO: 3319

SEQ ID NO: 7593 - DNA, 978 bp, Homo sapiens; identical to SEQ ID NO: 3321

SEQ ID NO: 7594 - DNA, 600 bp, Homo sapiens; identical to SEQ ID NO: 3322

SEQ ID NO: 7595 - DNA, 600 bp, Homo sapiens; identical to SEQ ID NO: 3323

SEQ ID NO: 7596 - DNA, 600 bp, Homo sapiens; identical to SEQ ID NO: 3323

SEQ ID NO: 7597 - DNA, 453 bp, Homo sapiens; identical to SEQ ID NO: 3325

SEQ ID NO: 7598 - DNA, 453 bp, Homo sapiens; identical to SEQ ID NO: 3325

SEQ ID NO: 7599 - DNA, 600 bp, Homo sapiens; identical to SEQ ID NO: 3327

SEQ ID NO: 7600 - DNA, 600 bp, Homo sapiens; identical to SEQ ID NO: 3327

SEQ ID NO: 7601 - DNA, 600 bp, Homo sapiens; identical to SEQ ID NO: 3329

SEQ ID NO: 7602 - DNA, 600 bp, Homo sapiens; identical to SEQ ID NO: 3329

SEQ ID NO: 7603 - DNA, 600 bp, Homo sapiens; identical to SEQ ID NO: 3331

SEQ ID NO: 7604 - DNA, 600 bp, Homo sapiens; identical to SEQ ID NO: 3332

SEQ ID NO: 7605 - DNA, 600 bp, Homo sapiens; identical to SEQ ID NO: 3332

SEQ ID NO: 7606 - DNA, 600 bp, Homo sapiens; identical to SEQ ID NO: 3334

SEQ ID NO: 7607 - DNA, 600 bp, Homo sapiens; identical to SEQ ID NO: 3334

SEQ ID NO: 7608 - DNA, 600 bp, Homo sapiens; identical to SEQ ID NO: 3336

SEQ ID NO: 7609 - DNA, 600 bp, Homo sapiens; identical to SEQ ID NO: 3337

SEQ ID NO: 7610 - DNA, 600 bp, Homo sapiens; identical to SEQ ID NO: 3337

SEQ ID NO: 7611 - DNA, 600 bp, Homo sapiens; identical to SEQ ID NO: 3339

SEQ ID NO: 7612 - DNA, 600 bp, Homo sapiens; identical to SEQ ID NO: 3340

SEQ ID NO: 7613 - DNA, 437 bp, Homo sapiens; identical to SEQ ID NO: 3341

SEQ ID NO: 7614 - DNA, 423 bp, Homo sapiens; identical to SEQ ID NO: 3342

SEQ ID NO: 7615 - DNA, 423 bp, Homo sapiens; identical to SEQ ID NO: 3342

SEQ ID NO: 7616 - DNA, 600 bp, Homo sapiens; identical to SEQ ID NO: 3344

SEQ ID NO: 7617 - DNA, 600 bp, Homo sapiens; identical to SEQ ID NO: 3344

SEQ ID NO: 7618 - DNA, 600 bp, Homo sapiens; identical to SEQ ID NO: 3346

SEQ ID NO: 7619 - DNA, 600 bp, Homo sapiens; identical to SEQ ID NO: 3346

SEQ ID NO: 7620 - DNA, 390 bp, Homo sapiens; identical to SEQ ID NO: 3348

SEQ ID NO: 7621 - DNA, 390 bp, Homo sapiens; identical to SEQ ID NO: 3348

SEQ ID NO: 7622 - DNA, 600 bp, Homo sapiens; identical to SEQ ID NO: 3350

SEQ ID NO: 7623 - DNA, 442 bp, Homo sapiens; identical to SEQ ID NO: 3351

SEQ ID NO: 7624 - DNA, 442 bp, Homo sapiens; identical to SEQ ID NO: 3351

SEQ ID NO: 7625 - DNA, 600 bp, Homo sapiens; identical to SEQ ID NO: 3353

SEQ ID NO: 7626 - DNA, 600 bp, Homo sapiens; identical to SEQ ID NO: 3353

SEQ ID NO: 7627 - DNA, 600 bp, Homo sapiens; identical to SEQ ID NO: 3355

SEQ ID NO: 7628 - DNA, 600 bp, Homo sapiens; identical to SEQ ID NO: 3356

SEQ ID NO: 7629 - DNA, 600 bp, Homo sapiens; identical to SEQ ID NO: 3356

SEQ ID NO: 7630 - DNA, 600 bp, Homo sapiens; identical to SEQ ID NO: 3358

SEQ ID NO: 7631 - DNA, 600 bp, Homo sapiens; identical to SEQ ID NO: 3358

SEQ ID NO: 7632 - DNA, 600 bp, Homo sapiens; identical to SEQ ID NO: 3360

SEQ ID NO: 7633 - DNA, 600 bp, Homo sapiens; identical to SEQ ID NO: 3361

SEQ ID NO: 7634 - DNA, 600 bp, Homo sapiens; identical to SEQ ID NO: 3362

SEQ ID NO: 7635 - DNA, 600 bp, Homo sapiens; identical to SEQ ID NO: 3362

SEQ ID NO: 7636 - DNA, 600 bp, Homo sapiens; identical to SEQ ID NO: 3364

SEQ ID NO: 7637 - DNA, 600 bp, Homo sapiens; identical to SEQ ID NO: 3364

SEQ ID NO: 7638 - DNA, 600 bp, Homo sapiens; identical to SEQ ID NO: 3366

SEQ ID NO: 7639 - DNA, 498 bp, Homo sapiens; identical to SEQ ID NO: 3367

SEQ ID NO: 7640 - DNA, 600 bp, Homo sapiens; identical to SEQ ID NO: 3368

SEQ ID NO: 7641 - DNA, 600 bp, Homo sapiens; identical to SEQ ID NO: 3368

SEQ ID NO: 7642 - DNA, 600 bp, Homo sapiens; identical to SEQ ID NO: 3370

SEQ ID NO: 7643 - DNA, 600 bp, Homo sapiens; identical to SEQ ID NO: 3370

SEQ ID NO: 7644 - DNA, 600 bp, Homo sapiens; identical to SEQ ID NO: 3372

SEQ ID NO: 7645 - DNA, 600 bp, Homo sapiens; identical to SEQ ID NO: 3372

SEQ ID NO: 7646 - DNA, 600 bp, Homo sapiens; identical to SEQ ID NO: 3374

SEQ ID NO: 7647 - DNA, 600 bp, Homo sapiens; identical to SEQ ID NO: 3374

SEQ ID NO: 7648 - DNA, 522 bp, Homo sapiens; identical to SEQ ID NO: 3376

SEQ ID NO: 7649 - DNA, 522 bp, Homo sapiens; identical to SEQ ID NO: 3376

SEQ ID NO: 7650 - DNA, 1400 bp, Homo sapiens; identical to SEQ ID NO: 3378

SEQ ID NO: 7651 - DNA, 1362 bp, Homo sapiens; identical to SEQ ID NO: 3379

SEQ ID NO: 7652 - DNA, 600 bp, Homo sapiens; identical to SEQ ID NO: 3380

SEQ ID NO: 7653 - DNA, 600 bp, Homo sapiens; identical to SEQ ID NO: 3380

SEQ ID NO: 7654 - DNA, 600 bp, Homo sapiens; identical to SEQ ID NO: 3382

SEQ ID NO: 7655 - DNA, 600 bp, Homo sapiens; identical to SEQ ID NO: 3382

SEQ ID NO: 7656 - DNA, 402 bp, Homo sapiens; identical to SEQ ID NO: 3384

SEQ ID NO: 7657 - DNA, 402 bp, Homo sapiens; identical to SEQ ID NO: 3384

SEQ ID NO: 7658 - DNA, 543 bp, Homo sapiens; identical to SEQ ID NO: 3386

SEQ ID NO: 7659 - DNA, 543 bp, Homo sapiens; identical to SEQ ID NO: 3386

SEQ ID NO: 7660 - DNA, 600 bp, Homo sapiens; identical to SEQ ID NO: 3388

SEQ ID NO: 7661 - DNA, 600 bp, Homo sapiens; identical to SEQ ID NO: 3389

SEQ ID NO: 7662 - DNA, 600 bp, Homo sapiens; identical to SEQ ID NO: 3390

SEQ ID NO: 7663 - DNA, 600 bp, Homo sapiens; identical to SEQ ID NO: 3391

SEQ ID NO: 7664 - DNA, 600 bp, Homo sapiens; identical to SEQ ID NO: 3392

SEQ ID NO: 7665 - DNA, 600 bp, Homo sapiens; identical to SEQ ID NO: 3392

SEQ ID NO: 7666 - DNA, 600 bp, Homo sapiens; identical to SEQ ID NO: 3394

SEQ ID NO: 7667 - DNA, 600 bp, Homo sapiens; identical to SEQ ID NO: 3394

SEQ ID NO: 7668 - DNA, 600 bp, Homo sapiens; identical to SEQ ID NO: 3396

SEQ ID NO: 7669 - DNA, 600 bp, Homo sapiens; identical to SEQ ID NO: 3397

SEQ ID NO: 7670 - DNA, 600 bp, Homo sapiens; identical to SEQ ID NO: 3397

SEQ ID NO: 7671 - DNA, 600 bp, Homo sapiens; identical to SEQ ID NO: 3399

SEQ ID NO: 7672 - DNA, 600 bp, Homo sapiens; identical to SEQ ID NO: 3399

SEQ ID NO: 7673 - DNA, 600 bp, Homo sapiens; identical to SEQ ID NO: 3401

SEQ ID NO: 7674 - DNA, 589 bp, Homo sapiens; identical to SEQ ID NO: 3402

SEQ ID NO: 7675 - DNA, 589 bp, Homo sapiens; identical to SEQ ID NO: 3402

SEQ ID NO: 7676 - DNA, 570 bp, Homo sapiens; identical to SEQ ID NO: 3404

SEQ ID NO: 7677 - DNA, 288 bp, Homo sapiens; identical to SEQ ID NO: 3405

SEQ ID NO: 7678 - DNA, 288 bp, Homo sapiens; identical to SEQ ID NO: 3405

SEQ ID NO: 7679 - DNA, 600 bp, Homo sapiens; identical to SEQ ID NO: 3407

SEQ ID NO: 7680 - DNA, 600 bp, Homo sapiens; identical to SEQ ID NO: 3407

SEQ ID NO: 7681 - DNA, 600 bp, Homo sapiens; identical to SEQ ID NO: 3409

SEQ ID NO: 7682 - DNA, 600 bp, Homo sapiens; identical to SEQ ID NO: 3409

SEQ ID NO: 7683 - DNA, 600 bp, Homo sapiens; identical to SEQ ID NO: 3411

SEQ ID NO: 7684 - DNA, 600 bp, Homo sapiens; identical to SEQ ID NO: 3411

SEQ ID NO: 7685 - DNA, 151 bp, Homo sapiens; identical to SEQ ID NO: 3413

SEQ ID NO: 7686 - DNA, 151 bp, Homo sapiens; identical to SEQ ID NO: 3413

SEQ ID NO: 7687 - DNA, 600 bp, Homo sapiens; identical to SEQ ID NO: 3415

SEQ ID NO: 7688 - DNA, 600 bp, Homo sapiens; identical to SEQ ID NO: 3415

SEQ ID NO: 7689 - DNA, 600 bp, Homo sapiens; identical to SEQ ID NO: 3417

SEQ ID NO: 7690 - DNA, 600 bp, Homo sapiens; identical to SEQ ID NO: 3418

SEQ ID NO: 7691 - DNA, 323 bp, Homo sapiens; identical to SEQ ID NO: 3419

SEQ ID NO: 7692 - DNA, 323 bp, Homo sapiens; identical to SEQ ID NO: 3419

SEQ ID NO: 7693 - DNA, 600 bp, Homo sapiens; identical to SEQ ID NO: 3421

SEQ ID NO: 7694 - DNA, 600 bp, Homo sapiens; identical to SEQ ID NO: 3421

SEQ ID NO: 7695 - DNA, 600 bp, Homo sapiens; identical to SEQ ID NO: 3423

SEQ ID NO: 7696 - DNA, 600 bp, Homo sapiens; identical to SEQ ID NO: 3424

SEQ ID NO: 7697 - DNA, 600 bp, Homo sapiens; identical to SEQ ID NO: 3424

SEQ ID NO: 7698 - DNA, 600 bp, Homo sapiens; identical to SEQ ID NO: 3426

SEQ ID NO: 7699 - DNA, 600 bp, Homo sapiens; identical to SEQ ID NO: 3426

SEQ ID NO: 7700 - DNA, 600 bp, Homo sapiens; identical to SEQ ID NO: 3428

SEQ ID NO: 7701 - DNA, 600 bp, Homo sapiens; identical to SEQ ID NO: 3428

SEQ ID NO: 7702 - DNA, 600 bp, Homo sapiens; identical to SEQ ID NO: 3430

SEQ ID NO: 7703 - DNA, 600 bp, Homo sapiens; identical to SEQ ID NO: 3431

SEQ ID NO: 7704 - DNA, 600 bp, Homo sapiens; identical to SEQ ID NO: 3432

SEQ ID NO: 7705 - DNA, 600 bp, Homo sapiens; identical to SEQ ID NO: 3432

SEQ ID NO: 7706 - DNA, 600 bp, Homo sapiens; identical to SEQ ID NO: 3434

SEQ ID NO: 7707 - DNA, 600 bp, Homo sapiens; identical to SEQ ID NO: 3434

SEQ ID NO: 7708 - DNA, 435 bp, Homo sapiens; identical to SEQ ID NO: 3436

SEQ ID NO: 7709 - DNA, 600 bp, Homo sapiens; identical to SEQ ID NO: 3437

SEQ ID NO: 7710 - DNA, 600 bp, Homo sapiens; identical to SEQ ID NO: 3438

SEQ ID NO: 7711 - DNA, 600 bp, Homo sapiens; identical to SEQ ID NO: 3439

SEQ ID NO: 7712 - DNA, 600 bp, Homo sapiens; identical to SEQ ID NO: 3440

SEQ ID NO: 7713 - DNA, 600 bp, Homo sapiens; identical to SEQ ID NO: 3440

SEQ ID NO: 7714 - DNA, 600 bp, Homo sapiens; identical to SEQ ID NO: 3442

SEQ ID NO: 7715 - DNA, 600 bp, Homo sapiens; identical to SEQ ID NO: 3443

SEQ ID NO: 7716 - DNA, 600 bp, Homo sapiens; identical to SEQ ID NO: 3443

SEQ ID NO: 7717 - DNA, 600 bp, Homo sapiens; identical to SEQ ID NO: 3445

SEQ ID NO: 7718 - DNA, 600 bp, Homo sapiens; identical to SEQ ID NO: 3446

SEQ ID NO: 7719 - DNA, 600 bp, Homo sapiens; identical to SEQ ID NO: 3447

SEQ ID NO: 7720 - DNA, 600 bp, Homo sapiens; identical to SEQ ID NO: 3447

SEQ ID NO: 7721 - DNA, 600 bp, Homo sapiens; identical to SEQ ID NO: 3449

SEQ ID NO: 7722 - DNA, 600 bp, Homo sapiens; identical to SEQ ID NO: 3449

SEQ ID NO: 7723 - DNA, 600 bp, Homo sapiens; identical to SEQ ID NO: 3451

SEQ ID NO: 7724 - DNA, 522 bp, Homo sapiens; identical to SEQ ID NO: 3452

SEQ ID NO: 7725 - DNA, 600 bp, Homo sapiens; identical to SEQ ID NO: 3453

SEQ ID NO: 7726 - DNA, 600 bp, Homo sapiens; identical to SEQ ID NO: 3454

SEQ ID NO: 7727 - DNA, 600 bp, Homo sapiens; identical to SEQ ID NO: 3455

SEQ ID NO: 7728 - DNA, 438 bp, Homo sapiens; identical to SEQ ID NO: 3456

SEQ ID NO: 7729 - DNA, 438 bp, Homo sapiens; identical to SEQ ID NO: 3456

SEQ ID NO: 7730 - DNA, 600 bp, Homo sapiens; identical to SEQ ID NO: 3458

SEQ ID NO: 7731 - DNA, 600 bp, Homo sapiens; identical to SEQ ID NO: 3458

SEQ ID NO: 7732 - DNA, 324 bp, Homo sapiens; identical to SEQ ID NO: 3460

SEQ ID NO: 7733 - DNA, 324 bp, Homo sapiens; identical to SEQ ID NO: 3460

SEQ ID NO: 7734 - DNA, 600 bp, Homo sapiens; identical to SEQ ID NO: 3462

SEQ ID NO: 7735 - DNA, 600 bp, Homo sapiens; identical to SEQ ID NO: 3463

SEQ ID NO: 7736 - DNA, 600 bp, Homo sapiens; identical to SEQ ID NO: 3464

SEQ ID NO: 7737 - DNA, 600 bp, Homo sapiens; identical to SEQ ID NO: 3464

SEQ ID NO: 7738 - DNA, 600 bp, Homo sapiens; identical to SEQ ID NO: 3466

SEQ ID NO: 7739 - DNA, 600 bp, Homo sapiens; identical to SEQ ID NO: 3467

SEQ ID NO: 7740 - DNA, 600 bp, Homo sapiens; identical to SEQ ID NO: 3467

SEQ ID NO: 7741 - DNA, 492 bp, Homo sapiens; identical to SEQ ID NO: 3469

SEQ ID NO: 7742 - DNA, 492 bp, Homo sapiens; identical to SEQ ID NO: 3469

SEQ ID NO: 7743 - DNA, 423 bp, Homo sapiens; identical to SEQ ID NO: 3471

SEQ ID NO: 7744 - DNA, 600 bp, Homo sapiens; identical to SEQ ID NO: 3472

SEQ ID NO: 7745 - DNA, 600 bp, Homo sapiens; identical to SEQ ID NO: 3472

SEQ ID NO: 7746 - DNA, 600 bp, Homo sapiens; identical to SEQ ID NO: 3474

SEQ ID NO: 7747 - DNA, 600 bp, Homo sapiens; identical to SEQ ID NO: 3474

SEQ ID NO: 7748 - DNA, 600 bp, Homo sapiens; identical to SEQ ID NO: 3476

SEQ ID NO: 7749 - DNA, 600 bp, Homo sapiens; identical to SEQ ID NO: 3476

SEQ ID NO: 7750 - DNA, 600 bp, Homo sapiens; identical to SEQ ID NO: 3478

SEQ ID NO: 7751 - DNA, 600 bp, Homo sapiens; identical to SEQ ID NO: 3478

SEQ ID NO: 7752 - DNA, 600 bp, Homo sapiens; identical to SEQ ID NO: 3480

SEQ ID NO: 7753 - DNA, 600 bp, Homo sapiens; identical to SEQ ID NO: 3480

SEQ ID NO: 7754 - DNA, 600 bp, Homo sapiens; identical to SEQ ID NO: 3482

SEQ ID NO: 7755 - DNA, 288 bp, Homo sapiens; identical to SEQ ID NO: 3483

SEQ ID NO: 7756 - DNA, 288 bp, Homo sapiens; identical to SEQ ID NO: 3483

SEQ ID NO: 7757 - DNA, 600 bp, Homo sapiens; identical to SEQ ID NO: 3485

SEQ ID NO: 7758 - DNA, 600 bp, Homo sapiens; identical to SEQ ID NO: 3485

SEQ ID NO: 7759 - DNA, 600 bp, Homo sapiens; identical to SEQ ID NO: 3487

SEQ ID NO: 7760 - DNA, 600 bp, Homo sapiens; identical to SEQ ID NO: 3488

SEQ ID NO: 7761 - DNA, 600 bp, Homo sapiens; identical to SEQ ID NO: 3488

SEQ ID NO: 7762 - DNA, 600 bp, Homo sapiens; identical to SEQ ID NO: 3490

SEQ ID NO: 7763 - DNA, 600 bp, Homo sapiens; identical to SEQ ID NO: 3490

SEQ ID NO: 7764 - DNA, 600 bp, Homo sapiens; identical to SEQ ID NO: 3492

SEQ ID NO: 7765 - DNA, 600 bp, Homo sapiens; identical to SEQ ID NO: 3492

SEQ ID NO: 7766 - DNA, 600 bp, Homo sapiens; identical to SEQ ID NO: 3494

SEQ ID NO: 7767 - DNA, 600 bp, Homo sapiens; identical to SEQ ID NO: 3494

SEQ ID NO: 7768 - DNA, 600 bp, Homo sapiens; identical to SEQ ID NO: 3496

SEQ ID NO: 7769 - DNA, 600 bp, Homo sapiens; identical to SEQ ID NO: 3496

SEQ ID NO: 7770 - DNA, 600 bp, Homo sapiens; identical to SEQ ID NO: 3498

SEQ ID NO: 7771 - DNA, 600 bp, Homo sapiens; identical to SEQ ID NO: 3498

SEQ ID NO: 7772 - DNA, 600 bp, Homo sapiens; identical to SEQ ID NO: 3500

SEQ ID NO: 7773 - DNA, 600 bp, Homo sapiens; identical to SEQ ID NO: 3501

SEQ ID NO: 7774 - DNA, 600 bp, Homo sapiens; identical to SEQ ID NO: 3502

SEQ ID NO: 7775 - DNA, 600 bp, Homo sapiens; identical to SEQ ID NO: 3502

SEQ ID NO: 7776 - DNA, 246 bp, Homo sapiens; identical to SEQ ID NO: 3504

SEQ ID NO: 7777 - DNA, 600 bp, Homo sapiens; identical to SEQ ID NO: 3505

SEQ ID NO: 7778 - DNA, 600 bp, Homo sapiens; identical to SEQ ID NO: 3505

SEQ ID NO: 7779 - DNA, 1400 bp, Homo sapiens; identical to SEQ ID NO: 3507

SEQ ID NO: 7780 - DNA, 1400 bp, Homo sapiens; identical to SEQ ID NO: 3507

SEQ ID NO: 7781 - DNA, 600 bp, Homo sapiens; identical to SEQ ID NO: 3509

SEQ ID NO: 7782 - DNA, 600 bp, Homo sapiens; identical to SEQ ID NO: 3509

SEQ ID NO: 7783 - DNA, 600 bp, Homo sapiens; identical to SEQ ID NO: 3511

SEQ ID NO: 7784 - DNA, 600 bp, Homo sapiens; identical to SEQ ID NO: 3511

SEQ ID NO: 7785 - DNA, 224 bp, Homo sapiens; identical to SEQ ID NO: 3513

SEQ ID NO: 7786 - DNA, 224 bp, Homo sapiens; identical to SEQ ID NO: 3513

SEQ ID NO: 7787 - DNA, 600 bp, Homo sapiens; identical to SEQ ID NO: 3515

SEQ ID NO: 7788 - DNA, 600 bp, Homo sapiens; identical to SEQ ID NO: 3516

SEQ ID NO: 7789 - DNA, 600 bp, Homo sapiens; identical to SEQ ID NO: 3517

SEQ ID NO: 7790 - DNA, 600 bp, Homo sapiens; identical to SEQ ID NO: 3518

SEQ ID NO: 7791 - DNA, 600 bp, Homo sapiens; identical to SEQ ID NO: 3518

SEQ ID NO: 7792 - DNA, 600 bp, Homo sapiens; identical to SEQ ID NO: 3520

SEQ ID NO: 7793 - DNA, 600 bp, Homo sapiens; identical to SEQ ID NO: 3520

SEQ ID NO: 7794 - DNA, 600 bp, Homo sapiens; identical to SEQ ID NO: 3522

SEQ ID NO: 7795 - DNA, 600 bp, Homo sapiens; identical to SEQ ID NO: 3523

SEQ ID NO: 7796 - DNA, 600 bp, Homo sapiens; identical to SEQ ID NO: 3523

SEQ ID NO: 7797 - DNA, 600 bp, Homo sapiens; identical to SEQ ID NO: 3525

SEQ ID NO: 7798 - DNA, 600 bp, Homo sapiens; identical to SEQ ID NO: 3525

SEQ ID NO: 7799 - DNA, 600 bp, Homo sapiens; identical to SEQ ID NO: 3527

SEQ ID NO: 7800 - DNA, 422 bp, Homo sapiens; identical to SEQ ID NO: 3528

SEQ ID NO: 7801 - DNA, 600 bp, Homo sapiens; identical to SEQ ID NO: 3529

SEQ ID NO: 7802 - DNA, 600 bp, Homo sapiens; identical to SEQ ID NO: 3529

SEQ ID NO: 7803 - DNA, 600 bp, Homo sapiens; identical to SEQ ID NO: 3531

SEQ ID NO: 7804 - DNA, 504 bp, Homo sapiens; identical to SEQ ID NO: 3532

SEQ ID NO: 7805 - DNA, 504 bp, Homo sapiens; identical to SEQ ID NO: 3532

SEQ ID NO: 7806 - DNA, 591 bp, Homo sapiens; identical to SEQ ID NO: 3534

SEQ ID NO: 7807 - DNA, 591 bp, Homo sapiens; identical to SEQ ID NO: 3534

SEQ ID NO: 7808 - DNA, 600 bp, Homo sapiens; identical to SEQ ID NO: 3536

SEQ ID NO: 7809 - DNA, 600 bp, Homo sapiens; identical to SEQ ID NO: 3536

SEQ ID NO: 7810 - DNA, 600 bp, Homo sapiens; identical to SEQ ID NO: 3538

SEQ ID NO: 7811 - DNA, 600 bp, Homo sapiens; identical to SEQ ID NO: 3539

SEQ ID NO: 7812 - DNA, 600 bp, Homo sapiens; identical to SEQ ID NO: 3540

SEQ ID NO: 7813 - DNA, 585 bp, Homo sapiens; identical to SEQ ID NO: 3541

SEQ ID NO: 7814 - DNA, 534 bp, Homo sapiens; identical to SEQ ID NO: 3542

SEQ ID NO: 7815 - DNA, 534 bp, Homo sapiens; identical to SEQ ID NO: 3542

SEQ ID NO: 7816 - DNA, 486 bp, Homo sapiens; identical to SEQ ID NO: 3544

SEQ ID NO: 7817 - DNA, 486 bp, Homo sapiens; identical to SEQ ID NO: 3544

SEQ ID NO: 7818 - DNA, 600 bp, Homo sapiens; identical to SEQ ID NO: 3546

SEQ ID NO: 7819 - DNA, 600 bp, Homo sapiens; identical to SEQ ID NO: 3546

SEQ ID NO: 7820 - DNA, 600 bp, Homo sapiens; identical to SEQ ID NO: 3548

SEQ ID NO: 7821 - DNA, 600 bp, Homo sapiens; identical to SEQ ID NO: 3549

SEQ ID NO: 7822 - DNA, 600 bp, Homo sapiens; identical to SEQ ID NO: 3549

SEQ ID NO: 7823 - DNA, 537 bp, Homo sapiens; identical to SEQ ID NO: 3551

SEQ ID NO: 7824 - DNA, 600 bp, Homo sapiens; identical to SEQ ID NO: 3552

SEQ ID NO: 7825 - DNA, 600 bp, Homo sapiens; identical to SEQ ID NO: 3552

SEQ ID NO: 7826 - DNA, 600 bp, Homo sapiens; identical to SEQ ID NO: 3554

SEQ ID NO: 7827 - DNA, 600 bp, Homo sapiens; identical to SEQ ID NO: 3555

SEQ ID NO: 7828 - DNA, 600 bp, Homo sapiens; identical to SEQ ID NO: 3556

SEQ ID NO: 7829 - DNA, 600 bp, Homo sapiens; identical to SEQ ID NO: 3556

SEQ ID NO: 7830 - DNA, 600 bp, Homo sapiens; identical to SEQ ID NO: 3558

SEQ ID NO: 7831 - DNA, 600 bp, Homo sapiens; identical to SEQ ID NO: 3558

SEQ ID NO: 7832 - DNA, 450 bp, Homo sapiens; identical to SEQ ID NO: 3560

SEQ ID NO: 7833 - DNA, 450 bp, Homo sapiens; identical to SEQ ID NO: 3560

SEQ ID NO: 7834 - DNA, 336 bp, Homo sapiens; identical to SEQ ID NO: 3562

SEQ ID NO: 7835 - DNA, 600 bp, Homo sapiens; identical to SEQ ID NO: 3563

SEQ ID NO: 7836 - DNA, 600 bp, Homo sapiens; identical to SEQ ID NO: 3564

SEQ ID NO: 7837 - DNA, 600 bp, Homo sapiens; identical to SEQ ID NO: 3564

SEQ ID NO: 7838 - DNA, 1400 bp, Homo sapiens; identical to SEQ ID NO: 3566

SEQ ID NO: 7839 - DNA, 1400 bp, Homo sapiens; identical to SEQ ID NO: 3566

SEQ ID NO: 7840 - DNA, 600 bp, Homo sapiens; identical to SEQ ID NO: 3568

SEQ ID NO: 7841 - DNA, 600 bp, Homo sapiens; identical to SEQ ID NO: 3568

SEQ ID NO: 7842 - DNA, 495 bp, Homo sapiens; identical to SEQ ID NO: 3570

SEQ ID NO: 7843 - DNA, 600 bp, Homo sapiens; identical to SEQ ID NO: 3571

SEQ ID NO: 7844 - DNA, 600 bp, Homo sapiens; identical to SEQ ID NO: 3571

SEQ ID NO: 7845 - DNA, 600 bp, Homo sapiens; identical to SEQ ID NO: 3573

SEQ ID NO: 7846 - DNA, 600 bp, Homo sapiens; identical to SEQ ID NO: 3573

SEQ ID NO: 7847 - DNA, 600 bp, Homo sapiens; identical to SEQ ID NO: 3575

SEQ ID NO: 7848 - DNA, 600 bp, Homo sapiens; identical to SEQ ID NO: 3575

SEQ ID NO: 7849 - DNA, 600 bp, Homo sapiens; identical to SEQ ID NO: 3577

SEQ ID NO: 7850 - DNA, 600 bp, Homo sapiens; identical to SEQ ID NO: 3577

SEQ ID NO: 7851 - DNA, 600 bp, Homo sapiens; identical to SEQ ID NO: 3579

SEQ ID NO: 7852 - DNA, 600 bp, Homo sapiens; identical to SEQ ID NO: 3579

SEQ ID NO: 7853 - DNA, 600 bp, Homo sapiens; identical to SEQ ID NO: 3581

SEQ ID NO: 7854 - DNA, 600 bp, Homo sapiens; identical to SEQ ID NO: 3581

SEQ ID NO: 7855 - DNA, 600 bp, Homo sapiens; identical to SEQ ID NO: 3583

SEQ ID NO: 7856 - DNA, 600 bp, Homo sapiens; identical to SEQ ID NO: 3583

SEQ ID NO: 7857 - DNA, 357 bp, Homo sapiens; identical to SEQ ID NO: 3585

SEQ ID NO: 7858 - DNA, 600 bp, Homo sapiens; identical to SEQ ID NO: 3586

SEQ ID NO: 7859 - DNA, 600 bp, Homo sapiens; identical to SEQ ID NO: 3586

SEQ ID NO: 7860 - DNA, 600 bp, Homo sapiens; identical to SEQ ID NO: 3588

SEQ ID NO: 7861 - DNA, 600 bp, Homo sapiens; identical to SEQ ID NO: 3589

SEQ ID NO: 7862 - DNA, 600 bp, Homo sapiens; identical to SEQ ID NO: 3589

SEQ ID NO: 7863 - DNA, 272 bp, Homo sapiens; identical to SEQ ID NO: 3591

SEQ ID NO: 7864 - DNA, 600 bp, Homo sapiens; identical to SEQ ID NO: 3592

SEQ ID NO: 7865 - DNA, 600 bp, Homo sapiens; identical to SEQ ID NO: 3592

SEQ ID NO: 7866 - DNA, 600 bp, Homo sapiens; identical to SEQ ID NO: 3594

SEQ ID NO: 7867 - DNA, 600 bp, Homo sapiens; identical to SEQ ID NO: 3594

SEQ ID NO: 7868 - DNA, 600 bp, Homo sapiens; identical to SEQ ID NO: 3596

SEQ ID NO: 7869 - DNA, 600 bp, Homo sapiens; identical to SEQ ID NO: 3596

SEQ ID NO: 7870 - DNA, 600 bp, Homo sapiens; identical to SEQ ID NO: 3598

SEQ ID NO: 7871 - DNA, 600 bp, Homo sapiens; identical to SEQ ID NO: 3598

SEQ ID NO: 7872 - DNA, 600 bp, Homo sapiens; identical to SEQ ID NO: 3600

SEQ ID NO: 7873 - DNA, 600 bp, Homo sapiens; identical to SEQ ID NO: 3600

SEQ ID NO: 7874 - DNA, 555 bp, Homo sapiens; identical to SEQ ID NO: 3602

SEQ ID NO: 7875 - DNA, 555 bp, Homo sapiens; identical to SEQ ID NO: 3602

SEQ ID NO: 7876 - DNA, 600 bp, Homo sapiens; identical to SEQ ID NO: 3604

SEQ ID NO: 7877 - DNA, 600 bp, Homo sapiens; identical to SEQ ID NO: 3605

SEQ ID NO: 7878 - DNA, 600 bp, Homo sapiens; identical to SEQ ID NO: 3605

SEQ ID NO: 7879 - DNA, 600 bp, Homo sapiens; identical to SEQ ID NO: 3607

SEQ ID NO: 7880 - DNA, 600 bp, Homo sapiens; identical to SEQ ID NO: 3608

SEQ ID NO: 7881 - DNA, 600 bp, Homo sapiens; identical to SEQ ID NO: 3608

SEQ ID NO: 7882 - DNA, 600 bp, Homo sapiens; identical to SEQ ID NO: 3610

SEQ ID NO: 7883 - DNA, 600 bp, Homo sapiens; identical to SEQ ID NO: 3610

SEQ ID NO: 7884 - DNA, 600 bp, Homo sapiens; identical to SEQ ID NO: 3612

SEQ ID NO: 7885 - DNA, 600 bp, Homo sapiens; identical to SEQ ID NO: 3613

SEQ ID NO: 7886 - DNA, 600 bp, Homo sapiens; identical to SEQ ID NO: 3614

SEQ ID NO: 7887 - DNA, 600 bp, Homo sapiens; identical to SEQ ID NO: 3615

SEQ ID NO: 7888 - DNA, 600 bp, Homo sapiens; identical to SEQ ID NO: 3615

SEQ ID NO: 7889 - DNA, 600 bp, Homo sapiens; identical to SEQ ID NO: 3617

SEQ ID NO: 7890 - DNA, 600 bp, Homo sapiens; identical to SEQ ID NO: 3617

SEQ ID NO: 7891 - DNA, 600 bp, Homo sapiens; identical to SEQ ID NO: 3619

SEQ ID NO: 7892 - DNA, 600 bp, Homo sapiens; identical to SEQ ID NO: 3619

SEQ ID NO: 7893 - DNA, 480 bp, Homo sapiens; identical to SEQ ID NO: 3621

SEQ ID NO: 7894 - DNA, 480 bp, Homo sapiens; identical to SEQ ID NO: 3621

SEQ ID NO: 7895 - DNA, 486 bp, Homo sapiens; identical to SEQ ID NO: 3623

SEQ ID NO: 7896 - DNA, 486 bp, Homo sapiens; identical to SEQ ID NO: 3623

SEQ ID NO: 7897 - DNA, 402 bp, Homo sapiens; identical to SEQ ID NO: 3625

SEQ ID NO: 7898 - DNA, 402 bp, Homo sapiens; identical to SEQ ID NO: 3625

SEQ ID NO: 7899 - DNA, 600 bp, Homo sapiens; identical to SEQ ID NO: 3627

SEQ ID NO: 7900 - DNA, 600 bp, Homo sapiens; identical to SEQ ID NO: 3627

SEQ ID NO: 7901 - DNA, 600 bp, Homo sapiens; identical to SEQ ID NO: 3629

SEQ ID NO: 7902 - DNA, 600 bp, Homo sapiens; identical to SEQ ID NO: 3630

SEQ ID NO: 7903 - DNA, 600 bp, Homo sapiens; identical to SEQ ID NO: 3630

SEQ ID NO: 7904 - DNA, 491 bp, Homo sapiens; identical to SEQ ID NO: 3632

SEQ ID NO: 7905 - DNA, 491 bp, Homo sapiens; identical to SEQ ID NO: 3632

SEQ ID NO: 7906 - DNA, 600 bp, Homo sapiens; identical to SEQ ID NO: 3634

SEQ ID NO: 7907 - DNA, 600 bp, Homo sapiens; identical to SEQ ID NO: 3635

SEQ ID NO: 7908 - DNA, 420 bp, Homo sapiens; identical to SEQ ID NO: 3636

SEQ ID NO: 7909 - DNA, 420 bp, Homo sapiens; identical to SEQ ID NO: 3636

SEQ ID NO: 7910 - DNA, 600 bp, Homo sapiens; identical to SEQ ID NO: 3638

SEQ ID NO: 7911 - DNA, 600 bp, Homo sapiens; identical to SEQ ID NO: 3638

SEQ ID NO: 7912 - DNA, 600 bp, Homo sapiens; identical to SEQ ID NO: 3640

SEQ ID NO: 7913 - DNA, 600 bp, Homo sapiens; identical to SEQ ID NO: 3640

SEQ ID NO: 7914 - DNA, 600 bp, Homo sapiens; identical to SEQ ID NO: 3642

SEQ ID NO: 7915 - DNA, 600 bp, Homo sapiens; identical to SEQ ID NO: 3642

SEQ ID NO: 7916 - DNA, 600 bp, Homo sapiens; identical to SEQ ID NO: 3644

SEQ ID NO: 7917 - DNA, 600 bp, Homo sapiens; identical to SEQ ID NO: 3644

SEQ ID NO: 7918 - DNA, 600 bp, Homo sapiens; identical to SEQ ID NO: 3646

SEQ ID NO: 7919 - DNA, 600 bp, Homo sapiens; identical to SEQ ID NO: 3647

SEQ ID NO: 7920 - DNA, 600 bp, Homo sapiens; identical to SEQ ID NO: 3648

SEQ ID NO: 7921 - DNA, 600 bp, Homo sapiens; identical to SEQ ID NO: 3649

SEQ ID NO: 7922 - DNA, 600 bp, Homo sapiens; identical to SEQ ID NO: 3650

SEQ ID NO: 7923 - DNA, 600 bp, Homo sapiens; identical to SEQ ID NO: 3651

SEQ ID NO: 7924 - DNA, 600 bp, Homo sapiens; identical to SEQ ID NO: 3651

SEQ ID NO: 7925 - DNA, 600 bp, Homo sapiens; identical to SEQ ID NO: 3653

SEQ ID NO: 7926 - DNA, 522 bp, Homo sapiens; identical to SEQ ID NO: 3654

SEQ ID NO: 7927 - DNA, 522 bp, Homo sapiens; identical to SEQ ID NO: 3654

SEQ ID NO: 7928 - DNA, 600 bp, Homo sapiens; identical to SEQ ID NO: 3656

SEQ ID NO: 7929 - DNA, 600 bp, Homo sapiens; identical to SEQ ID NO: 3657

SEQ ID NO: 7930 - DNA, 600 bp, Homo sapiens; identical to SEQ ID NO: 3657

SEQ ID NO: 7931 - DNA, 600 bp, Homo sapiens; identical to SEQ ID NO: 3659

SEQ ID NO: 7932 - DNA, 600 bp, Homo sapiens; identical to SEQ ID NO: 3659

SEQ ID NO: 7933 - DNA, 600 bp, Homo sapiens; identical to SEQ ID NO: 3661

SEQ ID NO: 7934 - DNA, 600 bp, Homo sapiens; identical to SEQ ID NO: 3661

SEQ ID NO: 7935 - DNA, 600 bp, Homo sapiens; identical to SEQ ID NO: 3663

SEQ ID NO: 7936 - DNA, 600 bp, Homo sapiens; identical to SEQ ID NO: 3664

SEQ ID NO: 7937 - DNA, 408 bp, Homo sapiens; identical to SEQ ID NO: 3665

SEQ ID NO: 7938 - DNA, 408 bp, Homo sapiens; identical to SEQ ID NO: 3665

SEQ ID NO: 7939 - DNA, 540 bp, Homo sapiens; identical to SEQ ID NO: 3667

SEQ ID NO: 7940 - DNA, 540 bp, Homo sapiens; identical to SEQ ID NO: 3667

SEQ ID NO: 7941 - DNA, 657 bp, Homo sapiens; identical to SEQ ID NO: 3669

SEQ ID NO: 7942 - DNA, 657 bp, Homo sapiens; identical to SEQ ID NO: 3669

SEQ ID NO: 7943 - DNA, 444 bp, Homo sapiens; identical to SEQ ID NO: 3671

SEQ ID NO: 7944 - DNA, 444 bp, Homo sapiens; identical to SEQ ID NO: 3671

SEQ ID NO: 7945 - DNA, 534 bp, Homo sapiens; identical to SEQ ID NO: 3673

SEQ ID NO: 7946 - DNA, 534 bp, Homo sapiens; identical to SEQ ID NO: 3673

SEQ ID NO: 7947 - DNA, 600 bp, Homo sapiens; identical to SEQ ID NO: 3675

SEQ ID NO: 7948 - DNA, 600 bp, Homo sapiens; identical to SEQ ID NO: 3676

SEQ ID NO: 7949 - DNA, 600 bp, Homo sapiens; identical to SEQ ID NO: 3677

SEQ ID NO: 7950 - DNA, 600 bp, Homo sapiens; identical to SEQ ID NO: 3678

SEQ ID NO: 7951 - DNA, 600 bp, Homo sapiens; identical to SEQ ID NO: 3679

SEQ ID NO: 7952 - DNA, 600 bp, Homo sapiens; identical to SEQ ID NO: 3680

SEQ ID NO: 7953 - DNA, 600 bp, Homo sapiens; identical to SEQ ID NO: 3680

SEQ ID NO: 7954 - DNA, 399 bp, Homo sapiens; identical to SEQ ID NO: 3682

SEQ ID NO: 7955 - DNA, 399 bp, Homo sapiens; identical to SEQ ID NO: 3682

SEQ ID NO: 7956 - DNA, 1400 bp, Homo sapiens; identical to SEQ ID NO: 3684

SEQ ID NO: 7957 - DNA, 1400 bp, Homo sapiens; identical to SEQ ID NO: 3684

SEQ ID NO: 7958 - DNA, 600 bp, Homo sapiens; identical to SEQ ID NO: 3686

SEQ ID NO: 7959 - DNA, 600 bp, Homo sapiens; identical to SEQ ID NO: 3686

SEQ ID NO: 7960 - DNA, 600 bp, Homo sapiens; identical to SEQ ID NO: 3688

SEQ ID NO: 7961 - DNA, 600 bp, Homo sapiens; identical to SEQ ID NO: 3688

SEQ ID NO: 7962 - DNA, 600 bp, Homo sapiens; identical to SEQ ID NO: 3690

SEQ ID NO: 7963 - DNA, 600 bp, Homo sapiens; identical to SEQ ID NO: 3691

SEQ ID NO: 7964 - DNA, 600 bp, Homo sapiens; identical to SEQ ID NO: 3692

SEQ ID NO: 7965 - DNA, 600 bp, Homo sapiens; identical to SEQ ID NO: 3693

SEQ ID NO: 7966 - DNA, 600 bp, Homo sapiens; identical to SEQ ID NO: 3693

SEQ ID NO: 7967 - DNA, 600 bp, Homo sapiens; identical to SEQ ID NO: 3695

SEQ ID NO: 7968 - DNA, 600 bp, Homo sapiens; identical to SEQ ID NO: 3695

SEQ ID NO: 7969 - DNA, 600 bp, Homo sapiens; identical to SEQ ID NO: 3697

SEQ ID NO: 7970 - DNA, 600 bp, Homo sapiens; identical to SEQ ID NO: 3697

SEQ ID NO: 7971 - DNA, 600 bp, Homo sapiens; identical to SEQ ID NO: 3699

SEQ ID NO: 7972 - DNA, 600 bp, Homo sapiens; identical to SEQ ID NO: 3699

SEQ ID NO: 7973 - DNA, 600 bp, Homo sapiens; identical to SEQ ID NO: 3701

SEQ ID NO: 7974 - DNA, 600 bp, Homo sapiens; identical to SEQ ID NO: 3701

SEQ ID NO: 7975 - DNA, 600 bp, Homo sapiens; identical to SEQ ID NO: 3703

SEQ ID NO: 7976 - DNA, 600 bp, Homo sapiens; identical to SEQ ID NO: 3704

SEQ ID NO: 7977 - DNA, 600 bp, Homo sapiens; identical to SEQ ID NO: 3704

SEQ ID NO: 7978 - DNA, 600 bp, Homo sapiens; identical to SEQ ID NO: 3706

SEQ ID NO: 7979 - DNA, 600 bp, Homo sapiens; identical to SEQ ID NO: 3706

SEQ ID NO: 7980 - DNA, 312 bp, Homo sapiens; identical to SEQ ID NO: 3708

SEQ ID NO: 7981 - DNA, 312 bp, Homo sapiens; identical to SEQ ID NO: 3708

SEQ ID NO: 7982 - DNA, 600 bp, Homo sapiens; identical to SEQ ID NO: 3710

SEQ ID NO: 7983 - DNA, 600 bp, Homo sapiens; identical to SEQ ID NO: 3710

SEQ ID NO: 7984 - DNA, 600 bp, Homo sapiens; identical to SEQ ID NO: 3712

SEQ ID NO: 7985 - DNA, 600 bp, Homo sapiens; identical to SEQ ID NO: 3712

SEQ ID NO: 7986 - DNA, 600 bp, Homo sapiens; identical to SEQ ID NO: 3714

SEQ ID NO: 7987 - DNA, 600 bp, Homo sapiens; identical to SEQ ID NO: 3715

SEQ ID NO: 7988 - DNA, 600 bp, Homo sapiens; identical to SEQ ID NO: 3716

SEQ ID NO: 7989 - DNA, 600 bp, Homo sapiens; identical to SEQ ID NO: 3717

SEQ ID NO: 7990 - DNA, 600 bp, Homo sapiens; identical to SEQ ID NO: 3717

SEQ ID NO: 7991 - DNA, 600 bp, Homo sapiens; identical to SEQ ID NO: 3719

SEQ ID NO: 7992 - DNA, 600 bp, Homo sapiens; identical to SEQ ID NO: 3719

SEQ ID NO: 7993 - DNA, 600 bp, Homo sapiens; identical to SEQ ID NO: 3721

SEQ ID NO: 7994 - DNA, 600 bp, Homo sapiens; identical to SEQ ID NO: 3721

SEQ ID NO: 7995 - DNA, 600 bp, Homo sapiens; identical to SEQ ID NO: 3723

SEQ ID NO: 7996 - DNA, 600 bp, Homo sapiens; identical to SEQ ID NO: 3724

SEQ ID NO: 7997 - DNA, 600 bp, Homo sapiens; identical to SEQ ID NO: 3724

SEQ ID NO: 7998 - DNA, 600 bp, Homo sapiens; identical to SEQ ID NO: 3726

SEQ ID NO: 7999 - DNA, 600 bp, Homo sapiens; identical to SEQ ID NO: 3726

SEQ ID NO: 8000 - DNA, 600 bp, Homo sapiens; identical to SEQ ID NO: 3728

SEQ ID NO: 8001 - DNA, 600 bp, Homo sapiens; identical to SEQ ID NO: 3729

SEQ ID NO: 8002 - DNA, 600 bp, Homo sapiens; identical to SEQ ID NO: 3729

SEQ ID NO: 8003 - DNA, 381 bp, Homo sapiens; identical to SEQ ID NO: 3731

SEQ ID NO: 8004 - DNA, 600 bp, Homo sapiens; identical to SEQ ID NO: 3732

SEQ ID NO: 8005 - DNA, 600 bp, Homo sapiens; identical to SEQ ID NO: 3733

SEQ ID NO: 8006 - DNA, 600 bp, Homo sapiens; identical to SEQ ID NO: 3733

SEQ ID NO: 8007 - DNA, 600 bp, Homo sapiens; identical to SEQ ID NO: 3735

SEQ ID NO: 8008 - DNA, 600 bp, Homo sapiens; identical to SEQ ID NO: 3735

SEQ ID NO: 8009 - DNA, 600 bp, Homo sapiens; identical to SEQ ID NO: 3737

SEQ ID NO: 8010 - DNA, 600 bp, Homo sapiens; identical to SEQ ID NO: 3738

SEQ ID NO: 8011 - DNA, 600 bp, Homo sapiens; identical to SEQ ID NO: 3738

SEQ ID NO: 8012 - DNA, 600 bp, Homo sapiens; identical to SEQ ID NO: 3740

SEQ ID NO: 8013 - DNA, 600 bp, Homo sapiens; identical to SEQ ID NO: 3741

SEQ ID NO: 8014 - DNA, 600 bp, Homo sapiens; identical to SEQ ID NO: 3741

SEQ ID NO: 8015 - DNA, 600 bp, Homo sapiens; identical to SEQ ID NO: 3743

SEQ ID NO: 8016 - DNA, 600 bp, Homo sapiens; identical to SEQ ID NO: 3743

SEQ ID NO: 8017 - DNA, 600 bp, Homo sapiens; identical to SEQ ID NO: 3745

SEQ ID NO: 8018 - DNA, 600 bp, Homo sapiens; identical to SEQ ID NO: 3745

SEQ ID NO: 8019 - DNA, 600 bp, Homo sapiens; identical to SEQ ID NO: 3747

SEQ ID NO: 8020 - DNA, 600 bp, Homo sapiens; identical to SEQ ID NO: 3748

SEQ ID NO: 8021 - DNA, 600 bp, Homo sapiens; identical to SEQ ID NO: 3748

SEQ ID NO: 8022 - DNA, 600 bp, Homo sapiens; identical to SEQ ID NO: 3750

SEQ ID NO: 8023 - DNA, 600 bp, Homo sapiens; identical to SEQ ID NO: 3751

SEQ ID NO: 8024 - DNA, 600 bp, Homo sapiens; identical to SEQ ID NO: 3752

SEQ ID NO: 8025 - DNA, 600 bp, Homo sapiens; identical to SEQ ID NO: 3753

SEQ ID NO: 8026 - DNA, 600 bp, Homo sapiens; identical to SEQ ID NO: 3754

SEQ ID NO: 8027 - DNA, 426 bp, Homo sapiens; identical to SEQ ID NO: 3755

SEQ ID NO: 8028 - DNA, 426 bp, Homo sapiens; identical to SEQ ID NO: 3755

SEQ ID NO: 8029 - DNA, 600 bp, Homo sapiens; identical to SEQ ID NO: 3757

SEQ ID NO: 8030 - DNA, 600 bp, Homo sapiens; identical to SEQ ID NO: 3757

SEQ ID NO: 8031 - DNA, 600 bp, Homo sapiens; identical to SEQ ID NO: 3759

SEQ ID NO: 8032 - DNA, 600 bp, Homo sapiens; identical to SEQ ID NO: 3759

SEQ ID NO: 8033 - DNA, 600 bp, Homo sapiens; identical to SEQ ID NO: 3761

SEQ ID NO: 8034 - DNA, 600 bp, Homo sapiens; identical to SEQ ID NO: 3761

SEQ ID NO: 8035 - DNA, 333 bp, Homo sapiens; identical to SEQ ID NO: 3763

SEQ ID NO: 8036 - DNA, 333 bp, Homo sapiens; identical to SEQ ID NO: 3763

SEQ ID NO: 8037 - DNA, 364 bp, Homo sapiens; identical to SEQ ID NO: 3765

SEQ ID NO: 8038 - DNA, 492 bp, Homo sapiens; identical to SEQ ID NO: 3766

SEQ ID NO: 8039 - DNA, 492 bp, Homo sapiens; identical to SEQ ID NO: 3766

SEQ ID NO: 8040 - DNA, 600 bp, Homo sapiens; identical to SEQ ID NO: 3768

SEQ ID NO: 8041 - DNA, 600 bp, Homo sapiens; identical to SEQ ID NO: 3769

SEQ ID NO: 8042 - DNA, 279 bp, Homo sapiens; identical to SEQ ID NO: 3770

SEQ ID NO: 8043 - DNA, 279 bp, Homo sapiens; identical to SEQ ID NO: 3770

SEQ ID NO: 8044 - DNA, 600 bp, Homo sapiens; identical to SEQ ID NO: 3772

SEQ ID NO: 8045 - DNA, 600 bp, Homo sapiens; identical to SEQ ID NO: 3772

SEQ ID NO: 8046 - DNA, 600 bp, Homo sapiens; identical to SEQ ID NO: 3774

SEQ ID NO: 8047 - DNA, 600 bp, Homo sapiens; identical to SEQ ID NO: 3775

SEQ ID NO: 8048 - DNA, 600 bp, Homo sapiens; identical to SEQ ID NO: 3775

SEQ ID NO: 8049 - DNA, 600 bp, Homo sapiens; identical to SEQ ID NO: 3777

SEQ ID NO: 8050 - DNA, 600 bp, Homo sapiens; identical to SEQ ID NO: 3778

SEQ ID NO: 8051 - DNA, 384 bp, Homo sapiens; identical to SEQ ID NO: 3779

SEQ ID NO: 8052 - DNA, 600 bp, Homo sapiens; identical to SEQ ID NO: 3780

SEQ ID NO: 8053 - DNA, 600 bp, Homo sapiens; identical to SEQ ID NO: 3781

SEQ ID NO: 8054 - DNA, 183 bp, Homo sapiens; identical to SEQ ID NO: 3782

SEQ ID NO: 8055 - DNA, 600 bp, Homo sapiens; identical to SEQ ID NO: 3783

SEQ ID NO: 8056 - DNA, 600 bp, Homo sapiens; identical to SEQ ID NO: 3783

SEQ ID NO: 8057 - DNA, 1155 bp, Homo sapiens; identical to SEQ ID NO: 3785

SEQ ID NO: 8058 - DNA, 330 bp, Homo sapiens; identical to SEQ ID NO: 3786

SEQ ID NO: 8059 - DNA, 600 bp, Homo sapiens; identical to SEQ ID NO: 3787

SEQ ID NO: 8060 - DNA, 600 bp, Homo sapiens; identical to SEQ ID NO: 3788

SEQ ID NO: 8061 - DNA, 480 bp, Homo sapiens; identical to SEQ ID NO: 3789

SEQ ID NO: 8062 - DNA, 480 bp, Homo sapiens; identical to SEQ ID NO: 3789

SEQ ID NO: 8063 - DNA, 1400 bp, Homo sapiens; identical to SEQ ID NO: 3791

SEQ ID NO: 8064 - DNA, 548 bp, Homo sapiens; identical to SEQ ID NO: 3792

SEQ ID NO: 8065 - DNA, 548 bp, Homo sapiens; identical to SEQ ID NO: 3792

SEQ ID NO: 8066 - DNA, 414 bp, Homo sapiens; identical to SEQ ID NO: 3794

SEQ ID NO: 8067 - DNA, 600 bp, Homo sapiens; identical to SEQ ID NO: 3795
  misc_feature (504)..(524): n is a, c, g, or t

SEQ ID NO: 8068 - DNA, 600 bp, Homo sapiens; identical to SEQ ID NO: 3796

SEQ ID NO: 8069 - DNA, 600 bp, Homo sapiens; identical to SEQ ID NO: 3796

SEQ ID NO: 8070 - DNA, 600 bp, Homo sapiens; identical to SEQ ID NO: 3798

SEQ ID NO: 8071 - DNA, 474 bp, Homo sapiens; identical to SEQ ID NO: 3799

SEQ ID NO: 8072 - DNA, 474 bp, Homo sapiens; identical to SEQ ID NO: 3799

SEQ ID NO: 8073 - DNA, 600 bp, Homo sapiens; identical to SEQ ID NO: 3801

SEQ ID NO: 8074 - DNA, 600 bp, Homo sapiens; identical to SEQ ID NO: 3802

SEQ ID NO: 8075 - DNA, 600 bp, Homo sapiens; identical to SEQ ID NO: 3802

SEQ ID NO: 8076 - DNA, 600 bp, Homo sapiens; identical to SEQ ID NO: 3804

SEQ ID NO: 8077 - DNA, 600 bp, Homo sapiens; identical to SEQ ID NO: 3805

SEQ ID NO: 8078 - DNA, 600 bp, Homo sapiens; identical to SEQ ID NO: 3806

SEQ ID NO: 8079 - DNA, 1400 bp, Homo sapiens; identical to SEQ ID NO: 3807

SEQ ID NO: 8080 - DNA, 1400 bp, Homo sapiens; identical to SEQ ID NO: 3807

SEQ ID NO: 8081 - DNA, 600 bp, Homo sapiens; identical to SEQ ID NO: 3809

SEQ ID NO: 8082 - DNA, 600 bp, Homo sapiens; identical to SEQ ID NO: 3809

SEQ ID NO: 8083 - DNA, 1400 bp, Homo sapiens; identical to SEQ ID NO: 3811

SEQ ID NO: 8084 - DNA, 1400 bp, Homo sapiens; identical to SEQ ID NO: 3811

SEQ ID NO: 8085 - DNA, 1400 bp, Homo sapiens; identical to SEQ ID NO: 3813

SEQ ID NO: 8086 - DNA, 1400 bp, Homo sapiens; identical to SEQ ID NO: 3813

SEQ ID NO: 8087 - DNA, 472 bp, Homo sapiens; identical to SEQ ID NO: 3815

SEQ ID NO: 8088 - DNA, 472 bp, Homo sapiens; identical to SEQ ID NO: 3815

SEQ ID NO: 8089 - DNA, 463 bp, Homo sapiens; identical to SEQ ID NO: 3817

SEQ ID NO: 8090 - DNA, 463 bp, Homo sapiens; identical to SEQ ID NO: 3817

SEQ ID NO: 8091 - DNA, 472 bp, Homo sapiens; identical to SEQ ID NO: 3819

SEQ ID NO: 8092 - DNA, 472 bp, Homo sapiens; identical to SEQ ID NO: 3819

SEQ ID NO: 8093 - DNA, 600 bp, Homo sapiens; identical to SEQ ID NO: 3821

SEQ ID NO: 8094 - DNA, 271 bp, Homo sapiens; identical to SEQ ID NO: 3822

SEQ ID NO: 8095 - DNA, 271 bp, Homo sapiens; identical to SEQ ID NO: 3822

SEQ ID NO: 8096 - DNA, 600 bp, Homo sapiens; identical to SEQ ID NO: 3824

SEQ ID NO: 8097 - DNA, 600 bp, Homo sapiens; identical to SEQ ID NO: 3824

SEQ ID NO: 8098 - DNA, 1400 bp, Homo sapiens; identical to SEQ ID NO: 3826

SEQ ID NO: 8099 - DNA, 600 bp, Homo sapiens; identical to SEQ ID NO: 3827

SEQ ID NO: 8100 - DNA, 487 bp, Homo sapiens; identical to SEQ ID NO: 3828

SEQ ID NO: 8101 - DNA, 1016 bp, Homo sapiens; identical to SEQ ID NO: 3829

SEQ ID NO: 8102 - DNA, 1016 bp, Homo sapiens; identical to SEQ ID NO: 3829

SEQ ID NO: 8103 - DNA, 1400 bp, Homo sapiens; identical to SEQ ID NO: 3831

SEQ ID NO: 8104 - DNA, 1400 bp, Homo sapiens; identical to SEQ ID NO: 3832

SEQ ID NO: 8105 - DNA, 1400 bp, Homo sapiens; identical to SEQ ID NO: 3833

SEQ ID NO: 8106 - DNA, 600 bp, Homo sapiens; identical to SEQ ID NO: 3834

SEQ ID NO: 8107 - DNA, 1400 bp, Homo sapiens; identical to SEQ ID NO: 3835
  misc_feature (51)..(64): n is a, c, g, or t

SEQ ID NO: 8108 - DNA, 600 bp, Homo sapiens; identical to SEQ ID NO: 3836

SEQ ID NO: 8109 - DNA, 600 bp, Homo sapiens; identical to SEQ ID NO: 3836

SEQ ID NO: 8110 - DNA, 1400 bp, Homo sapiens; identical to SEQ ID NO: 3838

SEQ ID NO: 8111 - DNA, 600 bp, Homo sapiens; identical to SEQ ID NO: 3839

SEQ ID NO: 8112 - DNA, 600 bp, Homo sapiens; identical to SEQ ID NO: 3839

SEQ ID NO: 8113 - DNA, 600 bp, Homo sapiens; identical to SEQ ID NO: 3841

SEQ ID NO: 8114 - DNA, 600 bp, Homo sapiens; identical to SEQ ID NO: 3842

SEQ ID NO: 8115 - DNA, 600 bp, Homo sapiens; identical to SEQ ID NO: 3843

SEQ ID NO: 8116 - DNA, 1400 bp, Homo sapiens; identical to SEQ ID NO: 3844

SEQ ID NO: 8117 - DNA, 600 bp, Homo sapiens; identical to SEQ ID NO: 3845

SEQ ID NO: 8118 - DNA, 600 bp, Homo sapiens; identical to SEQ ID NO: 3846

SEQ ID NO: 8119 - DNA, 600 bp, Homo sapiens; identical to SEQ ID NO: 3846

SEQ ID NO: 8120 - DNA, 600 bp, Homo sapiens; identical to SEQ ID NO: 3848

SEQ ID NO: 8121 - DNA, 600 bp, Homo sapiens; identical to SEQ ID NO: 3848

SEQ ID NO: 8122 - DNA, 600 bp, Homo sapiens; identical to SEQ ID NO: 3850

SEQ ID NO: 8123 - DNA, 600 bp, Homo sapiens; identical to SEQ ID NO: 3850

SEQ ID NO: 8124 - DNA, 600 bp, Homo sapiens; identical to SEQ ID NO: 3852

SEQ ID NO: 8125 - DNA, 600 bp, Homo sapiens; identical to SEQ ID NO: 3852

SEQ ID NO: 8126 - DNA, 1400 bp, Homo sapiens; identical to SEQ ID NO: 3854

SEQ ID NO: 8127 - DNA, 1400 bp, Homo sapiens; identical to SEQ ID NO: 3854

SEQ ID NO: 8128 - DNA, 1171 bp, Homo sapiens; identical to SEQ ID NO: 3856

SEQ ID NO: 8129 - DNA, 1171 bp, Homo sapiens; identical to SEQ ID NO: 3856

SEQ ID NO: 8130 - DNA, 1400 bp, Homo sapiens; identical to SEQ ID NO: 3858

SEQ ID NO: 8131 - DNA, 1400 bp, Homo sapiens; identical to SEQ ID NO: 3858

SEQ ID NO: 8132 - DNA, 1400 bp, Homo sapiens; identical to SEQ ID NO: 3860

SEQ ID NO: 8133 - DNA, 600 bp, Homo sapiens; identical to SEQ ID NO: 3861

SEQ ID NO: 8134 - DNA, 600 bp, Homo sapiens; identical to SEQ ID NO: 3861

SEQ ID NO: 8135 - DNA, 1400 bp, Homo sapiens; identical to SEQ ID NO: 3863

SEQ ID NO: 8136 - DNA, 1400 bp, Homo sapiens; identical to SEQ ID NO: 3864

SEQ ID NO: 8137 - DNA, 600 bp, Homo sapiens; identical to SEQ ID NO: 3865

SEQ ID NO: 8138 - DNA, 600 bp, Homo sapiens; identical to SEQ ID NO: 3865

SEQ ID NO: 8139 - DNA, 1400 bp, Homo sapiens; identical to SEQ ID NO: 3867

SEQ ID NO: 8140 - DNA, 600 bp, Homo sapiens; identical to SEQ ID NO: 3868

SEQ ID NO: 8141 - DNA, 600 bp, Homo sapiens; identical to SEQ ID NO: 3868

SEQ ID NO: 8142 - DNA, 1400 bp, Homo sapiens; identical to SEQ ID NO: 3870

SEQ ID NO: 8143 - DNA, 600 bp, Homo sapiens; identical to SEQ ID NO: 3871

SEQ ID NO: 8144 - DNA, 600 bp, Homo sapiens; identical to SEQ ID NO: 3872

SEQ ID NO: 8145 - DNA, 600 bp, Homo sapiens; identical to SEQ ID NO: 3872

SEQ ID NO: 8146 - DNA, 1400 bp, Homo sapiens; identical to SEQ ID NO: 3874

SEQ ID NO: 8147 - DNA, 1400 bp, Homo sapiens; identical to SEQ ID NO: 3875

SEQ ID NO: 8148 - DNA, 600 bp, Homo sapiens; identical to SEQ ID NO: 3876

SEQ ID NO: 8149 - DNA, 600 bp, Homo sapiens; identical to SEQ ID NO: 3876

SEQ ID NO: 8150 - DNA, 600 bp, Homo sapiens; identical to SEQ ID NO: 3878

SEQ ID NO: 8151 - DNA, 600 bp, Homo sapiens; identical to SEQ ID NO: 3878

SEQ ID NO: 8152 - DNA, 1400 bp, Homo sapiens; identical to SEQ ID NO: 3880

SEQ ID NO: 8153 - DNA, 1400 bp, Homo sapiens; identical to SEQ ID NO: 3881

SEQ ID NO: 8154 - DNA, 1400 bp, Homo sapiens; identical to SEQ ID NO: 3881

SEQ ID NO: 8155 - DNA, 600 bp, Homo sapiens; identical to SEQ ID NO: 3883

SEQ ID NO: 8156 - DNA, 1175 bp, Homo sapiens; identical to SEQ ID NO: 3884

SEQ ID NO: 8157 - DNA, 1175 bp, Homo sapiens; identical to SEQ ID NO: 3884

SEQ ID NO: 8158 - DNA, 600 bp, Homo sapiens; identical to SEQ ID NO: 3886

SEQ ID NO: 8159 - DNA, 408 bp, Homo sapiens; identical to SEQ ID NO: 3887

SEQ ID NO: 8160 - DNA, 1400 bp, Homo sapiens; identical to SEQ ID NO: 3888

SEQ ID NO: 8161 - DNA, 600 bp, Homo sapiens; identical to SEQ ID NO: 3889

SEQ ID NO: 8162 - DNA, 600 bp, Homo sapiens; identical to SEQ ID NO: 3889

SEQ ID NO: 8163 - DNA, 1400 bp, Homo sapiens; identical to SEQ ID NO: 3891

SEQ ID NO: 8164 - DNA, 1400 bp, Homo sapiens; identical to SEQ ID NO: 3892

SEQ ID NO: 8165 - DNA, 1400 bp, Homo sapiens; identical to SEQ ID NO: 3893

SEQ ID NO: 8166 - DNA, 1400 bp, Homo sapiens; identical to SEQ ID NO: 3893

SEQ ID NO: 8167 - DNA, 600 bp, Homo sapiens; identical to SEQ ID NO: 3895

SEQ ID NO: 8168 - DNA, 600 bp, Homo sapiens; identical to SEQ ID NO: 3895

SEQ ID NO: 8169 - DNA, 97 bp, Homo sapiens; identical to SEQ ID NO: 3897

SEQ ID NO: 8170 - DNA, 1400 bp, Homo sapiens; identical to SEQ ID NO: 3898

SEQ ID NO: 8171 - DNA, 600 bp, Homo sapiens; identical to SEQ ID NO: 3899

SEQ ID NO: 8172 - DNA, 600 bp, Homo sapiens; identical to SEQ ID NO: 3900

SEQ ID NO: 8173 - DNA, 1275 bp, Homo sapiens; identical to SEQ ID NO: 3901

SEQ ID NO: 8174 - DNA, 600 bp, Homo sapiens; identical to SEQ ID NO: 3902

SEQ ID NO: 8175 - DNA, 600 bp, Homo sapiens; identical to SEQ ID NO: 3903

SEQ ID NO: 8176 - DNA, 600 bp, Homo sapiens; identical to SEQ ID NO: 3903

SEQ ID NO: 8177 - DNA, 600 bp, Homo sapiens; identical to SEQ ID NO: 3905

SEQ ID NO: 8178 - DNA, 776 bp, Homo sapiens; identical to SEQ ID NO: 3906

SEQ ID NO: 8179 - DNA, 776 bp, Homo sapiens; identical to SEQ ID NO: 3906

SEQ ID NO: 8180 - DNA, 600 bp, Homo sapiens; identical to SEQ ID NO: 3908

SEQ ID NO: 8181 - DNA, 600 bp, Homo sapiens; identical to SEQ ID NO: 3908

SEQ ID NO: 8182 - DNA, 600 bp, Homo sapiens; identical to SEQ ID NO: 3910

SEQ ID NO: 8183 - DNA, 600 bp, Homo sapiens; identical to SEQ ID NO: 3911

SEQ ID NO: 8184 - DNA, 600 bp, Homo sapiens; identical to SEQ ID NO: 3912

SEQ ID NO: 8185 - DNA, 600 bp, Homo sapiens; identical to SEQ ID NO: 3913

SEQ ID NO: 8186 - DNA, 600 bp, Homo sapiens; identical to SEQ ID NO: 3913

SEQ ID NO: 8187 - DNA, 1400 bp, Homo sapiens; identical to SEQ ID NO: 3915

SEQ ID NO: 8188 - DNA, 1400 bp, Homo sapiens; identical to SEQ ID NO: 3916

SEQ ID NO: 8189 - DNA, 600 bp, Homo sapiens; identical to SEQ ID NO: 3917

SEQ ID NO: 8190 - DNA, 600 bp, Homo sapiens; identical to SEQ ID NO: 3918

SEQ ID NO: 8191 - DNA, 1400 bp, Homo sapiens; identical to SEQ ID NO: 3919

SEQ ID NO: 8192 - DNA, 1400 bp, Homo sapiens; identical to SEQ ID NO: 3919

SEQ ID NO: 8193 - DNA, 600 bp, Homo sapiens; identical to SEQ ID NO: 3921

SEQ ID NO: 8194 - DNA, 600 bp, Homo sapiens; identical to SEQ ID NO: 3922

SEQ ID NO: 8195 - DNA, 600 bp, Homo sapiens; identical to SEQ ID NO: 3922

SEQ ID NO: 8196 - DNA, 1400 bp, Homo sapiens; identical to SEQ ID NO: 3924

SEQ ID NO: 8197 - DNA, 1400 bp, Homo sapiens; identical to SEQ ID NO: 3925

SEQ ID NO: 8198 - DNA, 600 bp, Homo sapiens; identical to SEQ ID NO: 3926

SEQ ID NO: 8199 - DNA, 600 bp, Homo sapiens; identical to SEQ ID NO: 3926

SEQ ID NO: 8200 - DNA, 1400 bp, Homo sapiens; identical to SEQ ID NO: 3928

SEQ ID NO: 8201 - DNA, 600 bp, Homo sapiens; identical to SEQ ID NO: 3929

SEQ ID NO: 8202 - DNA, 1400 bp, Homo sapiens; identical to SEQ ID NO: 3930

SEQ ID NO: 8203 - DNA, 1400 bp, Homo sapiens; identical to SEQ ID NO: 3931

SEQ ID NO: 8204 - DNA, 1400 bp, Homo sapiens; identical to SEQ ID NO: 3931

SEQ ID NO: 8205 - DNA, 600 bp, Homo sapiens; identical to SEQ ID NO: 3933

SEQ ID NO: 8206 - DNA, 600 bp, Homo sapiens; identical to SEQ ID NO: 3933

SEQ ID NO: 8207 - DNA, 504 bp, Homo sapiens; identical to SEQ ID NO: 3935

SEQ ID NO: 8208 - DNA, 504 bp, Homo sapiens; identical to SEQ ID NO: 3935

SEQ ID NO: 8209 - DNA, 1400 bp, Homo sapiens; identical to SEQ ID NO: 3937

SEQ ID NO: 8210 - DNA, 600 bp, Homo sapiens; identical to SEQ ID NO: 3938

SEQ ID NO: 8211 - DNA, 600 bp, Homo sapiens; identical to SEQ ID NO: 3939

SEQ ID NO: 8212 - DNA, 600 bp, Homo sapiens; identical to SEQ ID NO: 3940

SEQ ID NO: 8213 - DNA, 600 bp, Homo sapiens; identical to SEQ ID NO: 3940

SEQ ID NO: 8214 - DNA, 600 bp, Homo sapiens; identical to SEQ ID NO: 3942

SEQ ID NO: 8215 - DNA, 600 bp, Homo sapiens; identical to SEQ ID NO: 3942

SEQ ID NO: 8216 - DNA, 600 bp, Homo sapiens; identical to SEQ ID NO: 3944

SEQ ID NO: 8217 - DNA, 600 bp, Homo sapiens; identical to SEQ ID NO: 3944

SEQ ID NO: 8218 - DNA, 1400 bp, Homo sapiens; identical to SEQ ID NO: 3946

SEQ ID NO: 8219 - DNA, 600 bp, Homo sapiens; identical to SEQ ID NO: 3947

SEQ ID NO: 8220 - DNA, 600 bp, Homo sapiens; identical to SEQ ID NO: 3947

SEQ ID NO: 8221 - DNA, 600 bp, Homo sapiens; identical to SEQ ID NO: 3949

SEQ ID NO: 8222 - DNA, 1400 bp, Homo sapiens; identical to SEQ ID NO: 3950

SEQ ID NO: 8223 - DNA, 1400 bp, Homo sapiens; identical to SEQ ID NO: 3951

SEQ ID NO: 8224 - DNA, 600 bp, Homo sapiens; identical to SEQ ID NO: 3952

SEQ ID NO: 8225 - DNA, 600 bp, Homo sapiens; identical to SEQ ID NO: 3952

SEQ ID NO: 8226 - DNA, 600 bp, Homo sapiens; identical to SEQ ID NO: 3954

SEQ ID NO: 8227 - DNA, 1400 bp, Homo sapiens; identical to SEQ ID NO: 3955

SEQ ID NO: 8228 - DNA, 1006 bp, Homo sapiens; identical to SEQ ID NO: 3956

SEQ ID NO: 8229 - DNA, 600 bp, Homo sapiens; identical to SEQ ID NO: 3957

SEQ ID NO: 8230 - DNA, 1400 bp, Homo sapiens; identical to SEQ ID NO: 3958

SEQ ID NO: 8231 - DNA, 1400 bp, Homo sapiens; identical to SEQ ID NO: 3959

SEQ ID NO: 8232 - DNA, 600 bp, Homo sapiens; identical to SEQ ID NO: 3960

SEQ ID NO: 8233 - DNA, 1400 bp, Homo sapiens; identical to SEQ ID NO: 3961

SEQ ID NO: 8234 - DNA, 109 bp, Homo sapiens; identical to SEQ ID NO: 3962

SEQ ID NO: 8235 - DNA, 1400 bp, Homo sapiens; identical to SEQ ID NO: 3963

SEQ ID NO: 8236 - DNA, 1400 bp, Homo sapiens; identical to SEQ ID NO: 3964

SEQ ID NO: 8237 - DNA, 746 bp, Homo sapiens; identical to SEQ ID NO: 3965

SEQ ID NO: 8238 - DNA, 1400 bp, Homo sapiens; identical to SEQ ID NO: 3966

SEQ ID NO: 8239 - DNA, 1400 bp, Homo sapiens; identical to SEQ ID NO: 3967

SEQ ID NO: 8240 - DNA, 600 bp, Homo sapiens; identical to SEQ ID NO: 3968

SEQ ID NO: 8241 - DNA, 600 bp, Homo sapiens; identical to SEQ ID NO: 3968

SEQ ID NO: 8242 - DNA, 600 bp, Homo sapiens; identical to SEQ ID NO: 3970

SEQ ID NO: 8243 - DNA, 600 bp, Homo sapiens; identical to SEQ ID NO: 3971

SEQ ID NO: 8244 - DNA, 600 bp, Homo sapiens; identical to SEQ ID NO: 3971

SEQ ID NO: 8245 - DNA, 1400 bp, Homo sapiens; identical to SEQ ID NO: 3973

SEQ ID NO: 8246 - DNA, 1400 bp, Homo sapiens; identical to SEQ ID NO: 3974

SEQ ID NO: 8247 - DNA, 1400 bp, Homo sapiens; identical to SEQ ID NO: 3975

SEQ ID NO: 8248 - DNA, 1400 bp, Homo sapiens; identical to SEQ ID NO: 3975

SEQ ID NO: 8249 - DNA, 600 bp, Homo sapiens; identical to SEQ ID NO: 3977

SEQ ID NO: 8250 - DNA, 600 bp, Homo sapiens; identical to SEQ ID NO: 3977

SEQ ID NO: 8251 - DNA, 1400 bp, Homo sapiens; identical to SEQ ID NO: 3979

SEQ ID NO: 8252 - DNA, 1400 bp, Homo sapiens; identical to SEQ ID NO: 3980

SEQ ID NO: 8253 - DNA, 1400 bp, Homo sapiens; identical to SEQ ID NO: 3981

SEQ ID NO: 8254 - DNA, 1400 bp, Homo sapiens; identical to SEQ ID NO: 3982

SEQ ID NO: 8255 - DNA, 600 bp, Homo sapiens; identical to SEQ ID NO: 3983

SEQ ID NO: 8256 - DNA, 600 bp, Homo sapiens; identical to SEQ ID NO: 3984

SEQ ID NO: 8257 - DNA, 1400 bp, Homo sapiens; identical to SEQ ID NO: 3985

SEQ ID NO: 8258 - DNA, 1400 bp, Homo sapiens; identical to SEQ ID NO: 3986

SEQ ID NO: 8259 - DNA, 1400 bp, Homo sapiens; identical to SEQ ID NO: 3986

SEQ ID NO: 8260 - DNA, 600 bp, Homo sapiens; identical to SEQ ID NO: 3988

SEQ ID NO: 8261 - DNA, 600 bp, Homo sapiens; identical to SEQ ID NO: 3988

SEQ ID NO: 8262 - DNA, 767 bp, Homo sapiens; identical to SEQ ID NO: 3990

SEQ ID NO: 8263 - DNA, 767 bp, Homo sapiens; identical to SEQ ID NO: 3990

SEQ ID NO: 8264 - DNA, 600 bp, Homo sapiens; identical to SEQ ID NO: 3992

SEQ ID NO: 8265 - DNA, 1400 bp, Homo sapiens; identical to SEQ ID NO: 3993

SEQ ID NO: 8266 - DNA, 1400 bp, Homo sapiens; identical to SEQ ID NO: 3994

SEQ ID NO: 8267 - DNA, 1400 bp, Homo sapiens; identical to SEQ ID NO: 3994

SEQ ID NO: 8268 - DNA, 377 bp, Homo sapiens; identical to SEQ ID NO: 3996

SEQ ID NO: 8269 - DNA, 600 bp, Homo sapiens; identical to SEQ ID NO: 3997

SEQ ID NO: 8270 - DNA, 600 bp, Homo sapiens; identical to SEQ ID NO: 3997

SEQ ID NO: 8271 - DNA, 600 bp, Homo sapiens; identical to SEQ ID NO: 3999

SEQ ID NO: 8272 - DNA, 600 bp, Homo sapiens; identical to SEQ ID NO: 3999

SEQ ID NO: 8273 - DNA, 1293 bp, Homo sapiens; identical to SEQ ID NO: 4001

SEQ ID NO: 8274 - DNA, 600 bp, Homo sapiens; identical to SEQ ID NO: 4002

SEQ ID NO: 8275 - DNA, 600 bp, Homo sapiens; identical to SEQ ID NO: 4002

SEQ ID NO: 8276 - DNA, 600 bp, Homo sapiens; identical to SEQ ID NO: 4004

SEQ ID NO: 8277 - DNA, 600 bp, Homo sapiens; identical to SEQ ID NO: 4004

SEQ ID NO: 8278 - DNA, 1400 bp, Homo sapiens; identical to SEQ ID NO: 4006

SEQ ID NO: 8279 - DNA, 1400 bp, Homo sapiens; identical to SEQ ID NO: 4007

SEQ ID NO: 8280 - DNA, 1400 bp, Homo sapiens; identical to SEQ ID NO: 4008

SEQ ID NO: 8281 - DNA, 600 bp, Homo sapiens; identical to SEQ ID NO: 4009

SEQ ID NO: 8282 - DNA, 600 bp, Homo sapiens; identical to SEQ ID NO: 4009

SEQ ID NO: 8283 - DNA, 1400 bp, Homo sapiens; identical to SEQ ID NO: 4011

SEQ ID NO: 8284 - DNA, 866 bp, Homo sapiens; identical to SEQ ID NO: 4012

SEQ ID NO: 8285 - DNA, 600 bp, Homo sapiens; identical to SEQ ID NO: 4013

SEQ ID NO: 8286 - DNA, 1400 bp, Homo sapiens; identical to SEQ ID NO: 4014

SEQ ID NO: 8287 - DNA, 600 bp, Homo sapiens; identical to SEQ ID NO: 4015

SEQ ID NO: 8288 - DNA, 600 bp, Homo sapiens; identical to SEQ ID NO: 4015

SEQ ID NO: 8289 - DNA, 1400 bp, Homo sapiens; identical to SEQ ID NO: 4017

SEQ ID NO: 8290 - DNA, 600 bp, Homo sapiens; identical to SEQ ID NO: 4018

SEQ ID NO: 8291 - DNA, 600 bp, Homo sapiens; identical to SEQ ID NO: 4019

SEQ ID NO: 8292 - DNA, 600 bp, Homo sapiens; identical to SEQ ID NO: 4020

SEQ ID NO: 8293 - DNA, 600 bp, Homo sapiens; identical to SEQ ID NO: 4020

SEQ ID NO: 8294 - DNA, 600 bp, Homo sapiens; identical to SEQ ID NO: 4022

SEQ ID NO: 8295 - DNA, 1400 bp, Homo sapiens; identical to SEQ ID NO: 4023

SEQ ID NO: 8296 - DNA, 1400 bp, Homo sapiens; identical to SEQ ID NO: 4023

SEQ ID NO: 8297 - DNA, 1400 bp, Homo sapiens; identical to SEQ ID NO: 4025

SEQ ID NO: 8298 - DNA, 1400 bp, Homo sapiens; identical to SEQ ID NO: 4026

SEQ ID NO: 8299 - DNA, 600 bp, Homo sapiens; identical to SEQ ID NO: 4027

SEQ ID NO: 8300 - DNA, 600 bp, Homo sapiens; identical to SEQ ID NO: 4027

SEQ ID NO: 8301 - DNA, 600 bp, Homo sapiens; identical to SEQ ID NO: 4029

SEQ ID NO: 8302 - DNA, 600 bp, Homo sapiens; identical to SEQ ID NO: 4029

SEQ ID NO: 8303 - DNA, 600 bp, Homo sapiens; identical to SEQ ID NO: 4031

SEQ ID NO: 8304 - DNA, 600 bp, Homo sapiens; identical to SEQ ID NO: 4031

SEQ ID NO: 8305 - DNA, 1400 bp, Homo sapiens; identical to SEQ ID NO: 4033

SEQ ID NO: 8306 - DNA, 600 bp, Homo sapiens; identical to SEQ ID NO: 4034

SEQ ID NO: 8307 - DNA, 1400 bp, Homo sapiens; identical to SEQ ID NO: 4035

SEQ ID NO: 8308 - DNA, 600 bp, Homo sapiens; identical to SEQ ID NO: 4036

SEQ ID NO: 8309 - DNA, 600 bp, Homo sapiens; identical to SEQ ID NO: 4036

SEQ ID NO: 8310 - DNA, 600 bp, Homo sapiens; identical to SEQ ID NO: 4038

SEQ ID NO: 8311 - DNA, 600 bp, Homo sapiens; identical to SEQ ID NO: 4038

SEQ ID NO: 8312 - DNA, 600 bp, Homo sapiens; identical to SEQ ID NO: 4040

SEQ ID NO: 8313 - DNA, 600 bp, Homo sapiens; identical to SEQ ID NO: 4041

SEQ ID NO: 8314 - DNA, 600 bp, Homo sapiens; identical to SEQ ID NO: 4041

SEQ ID NO: 8315 - DNA, 600 bp, Homo sapiens; identical to SEQ ID NO: 4043

SEQ ID NO: 8316 - DNA, 600 bp, Homo sapiens; identical to SEQ ID NO: 4043

SEQ ID NO: 8317 - DNA, 1400 bp, Homo sapiens; identical to SEQ ID NO: 4045

SEQ ID NO: 8318 - DNA, 600 bp, Homo sapiens; identical to SEQ ID NO: 4046

SEQ ID NO: 8319 - DNA, 600 bp, Homo sapiens; identical to SEQ ID NO: 4046

SEQ ID NO: 8320 - DNA, 600 bp, Homo sapiens; identical to SEQ ID NO: 4048

SEQ ID NO: 8321 - DNA, 600 bp, Homo sapiens; identical to SEQ ID NO: 4049

SEQ ID NO: 8322 - DNA, 600 bp, Homo sapiens; identical to SEQ ID NO: 4049

SEQ ID NO: 8323 - DNA, 1104 bp, Homo sapiens; identical to SEQ ID NO: 4051

SEQ ID NO: 8324 - DNA, 600 bp, Homo sapiens; identical to SEQ ID NO: 4052

SEQ ID NO: 8325 - DNA, 600 bp, Homo sapiens; identical to SEQ ID NO: 4052

SEQ ID NO: 8326 - DNA, 600 bp, Homo sapiens; identical to SEQ ID NO: 4054

SEQ ID NO: 8327 - DNA, 600 bp, Homo sapiens; identical to SEQ ID NO: 4054

SEQ ID NO: 8328 - DNA, 600 bp, Homo sapiens; identical to SEQ ID NO: 4056

SEQ ID NO: 8329 - DNA, 600 bp, Homo sapiens; identical to SEQ ID NO: 4056

SEQ ID NO: 8330 - DNA, 1017 bp, Homo sapiens; identical to SEQ ID NO: 4058

SEQ ID NO: 8331 - DNA, 440 bp, Homo sapiens; identical to SEQ ID NO: 4059

SEQ ID NO: 8332 - DNA, 440 bp, Homo sapiens; identical to SEQ ID NO: 4059

SEQ ID NO: 8333 - DNA, 1400 bp, Homo sapiens; identical to SEQ ID NO: 4061

SEQ ID NO: 8334 - DNA, 600 bp, Homo sapiens; identical to SEQ ID NO: 4062

SEQ ID NO: 8335 - DNA, 600 bp, Homo sapiens; identical to SEQ ID NO: 4062

SEQ ID NO: 8336 - DNA, 1400 bp, Homo sapiens; identical to SEQ ID NO: 4064

SEQ ID NO: 8337 - DNA, 1400 bp, Homo sapiens; identical to SEQ ID NO: 4065

SEQ ID NO: 8338 - DNA, 600 bp, Homo sapiens; identical to SEQ ID NO: 4066

SEQ ID NO: 8339 - DNA, 600 bp, Homo sapiens; identical to SEQ ID NO: 4067

SEQ ID NO: 8340 - DNA, 600 bp, Homo sapiens; identical to SEQ ID NO: 4067

SEQ ID NO: 8341 - DNA, 1400 bp, Homo sapiens; identical to SEQ ID NO: 4069

SEQ ID NO: 8342 - DNA, 1394 bp, Homo sapiens; identical to SEQ ID NO: 4070

SEQ ID NO: 8343 - DNA, 1394 bp, Homo sapiens; identical to SEQ ID NO: 4070

SEQ ID NO: 8344 - DNA, 600 bp, Homo sapiens; identical to SEQ ID NO: 4072

SEQ ID NO: 8345 - DNA, 1400 bp, Homo sapiens; identical to SEQ ID NO: 4073

SEQ ID NO: 8346 - DNA, 600 bp, Homo sapiens; identical to SEQ ID NO: 4074

SEQ ID NO: 8347 - DNA, 600 bp, Homo sapiens; identical to SEQ ID NO: 4074

SEQ ID NO: 8348 - DNA, 600 bp, Homo sapiens; identical to SEQ ID NO: 4076

SEQ ID NO: 8349 - DNA, 600 bp, Homo sapiens; identical to SEQ ID NO: 4076

SEQ ID NO: 8350 - DNA, 1400 bp, Homo sapiens; identical to SEQ ID NO: 4078

SEQ ID NO: 8351 - DNA, 1400 bp, Homo sapiens; identical to SEQ ID NO: 4078

SEQ ID NO: 8352 - DNA, 600 bp, Homo sapiens; identical to SEQ ID NO: 4080

SEQ ID NO: 8353 - DNA, 600 bp, Homo sapiens; identical to SEQ ID NO: 4081

SEQ ID NO: 8354 - DNA, 600 bp, Homo sapiens; identical to SEQ ID NO: 4081

SEQ ID NO: 8355 - DNA, 600 bp, Homo sapiens; identical to SEQ ID NO: 4083

SEQ ID NO: 8356 - DNA, 600 bp, Homo sapiens; identical to SEQ ID NO: 4083

SEQ ID NO: 8357 - DNA, 1009 bp, Homo sapiens; identical to SEQ ID NO: 4085

SEQ ID NO: 8358 - DNA, 600 bp, Homo sapiens; identical to SEQ ID NO: 4086

SEQ ID NO: 8359 - DNA, 1400 bp, Homo sapiens; identical to SEQ ID NO: 4087

SEQ ID NO: 8360 - DNA, 1247 bp, Homo sapiens; identical to SEQ ID NO: 4088
  misc_feature (354)..(673): n is a, c, g, or t

SEQ ID NO: 8361 - DNA, 600 bp, Homo sapiens; identical to SEQ ID NO: 4089

SEQ ID NO: 8362 - DNA, 1400 bp, Homo sapiens; identical to SEQ ID NO: 4090

SEQ ID NO: 8363 - DNA, 600 bp, Homo sapiens; identical to SEQ ID NO: 4091

SEQ ID NO: 8364 - DNA, 600 bp, Homo sapiens; identical to SEQ ID NO: 4092

SEQ ID NO: 8365 - DNA, 600 bp, Homo sapiens; identical to SEQ ID NO: 4093

SEQ ID NO: 8366 - DNA, 600 bp, Homo sapiens; identical to SEQ ID NO: 4094

SEQ ID NO: 8367 - DNA, 1400 bp, Homo sapiens; identical to SEQ ID NO: 4095

SEQ ID NO: 8368 - DNA, 600 bp, Homo sapiens; identical to SEQ ID NO: 4096

SEQ ID NO: 8369 - DNA, 600 bp, Homo sapiens; identical to SEQ ID NO: 4096

SEQ ID NO: 8370 - DNA, 600 bp, Homo sapiens; identical to SEQ ID NO: 4098

SEQ ID NO: 8371 - DNA, 600 bp, Homo sapiens; identical to SEQ ID NO: 4098

SEQ ID NO: 8372 - DNA, 1134 bp, Homo sapiens; identical to SEQ ID NO: 4100

SEQ ID NO: 8373 - DNA, 1134 bp, Homo sapiens; identical to SEQ ID NO: 4100

SEQ ID NO: 8374 - DNA, 600 bp, Homo sapiens; identical to SEQ ID NO: 4102

SEQ ID NO: 8375 - DNA, 600 bp, Homo sapiens; identical to SEQ ID NO: 4102

SEQ ID NO: 8376 - DNA, 600 bp, Homo sapiens; identical to SEQ ID NO: 4104

SEQ ID NO: 8377 - DNA, 600 bp, Homo sapiens; identical to SEQ ID NO: 4104

SEQ ID NO: 8378 - DNA, 1400 bp, Homo sapiens; identical to SEQ ID NO: 4106

SEQ ID NO: 8379 - DNA, 1372 bp, Homo sapiens; identical to SEQ ID NO: 4107

SEQ ID NO: 8380 - DNA, 586 bp, Homo sapiens; identical to SEQ ID NO: 4108

SEQ ID NO: 8381 - DNA, 1400 bp, Homo sapiens; identical to SEQ ID NO: 4109

SEQ ID NO: 8382 - DNA, 600 bp, Homo sapiens; identical to SEQ ID NO: 4110

SEQ ID NO: 8383 - DNA, 600 bp, Homo sapiens; identical to SEQ ID NO: 4110

SEQ ID NO: 8384 - DNA, 600 bp, Homo sapiens; identical to SEQ ID NO: 4112

SEQ ID NO: 8385 - DNA, 600 bp, Homo sapiens; identical to SEQ ID NO: 4112

SEQ ID NO: 8386 - DNA, 393 bp, Homo sapiens; identical to SEQ ID NO: 4114

SEQ ID NO: 8387 - DNA, 555 bp, Homo sapiens; identical to SEQ ID NO: 4115

SEQ ID NO: 8388 - DNA, 555 bp, Homo sapiens; identical to SEQ ID NO: 4115

SEQ ID NO: 8389 - DNA, 600 bp, Homo sapiens; identical to SEQ ID NO: 4117

SEQ ID NO: 8390 - DNA, 600 bp, Homo sapiens; identical to SEQ ID NO: 4118

SEQ ID NO: 8391 - DNA, 600 bp, Homo sapiens; identical to SEQ ID NO: 4119

SEQ ID NO: 8392 - DNA, 600 bp, Homo sapiens; identical to SEQ ID NO: 4120

SEQ ID NO: 8393 - DNA, 600 bp, Homo sapiens; identical to SEQ ID NO: 4121

SEQ ID NO: 8394 - DNA, 474 bp, Homo sapiens; identical to SEQ ID NO: 4122

SEQ ID NO: 8395 - DNA, 474 bp, Homo sapiens; identical to SEQ ID NO: 4122

SEQ ID NO: 8396 - DNA, 600 bp, Homo sapiens; identical to SEQ ID NO: 4124

SEQ ID NO: 8397 - DNA, 525 bp, Homo sapiens; identical to SEQ ID NO: 4125

SEQ ID NO: 8398 - DNA, 525 bp, Homo sapiens; identical to SEQ ID NO: 4125

SEQ ID NO: 8399 - DNA, 600 bp, Homo sapiens; identical to SEQ ID NO: 4127

SEQ ID NO: 8400 - DNA, 600 bp, Homo sapiens; identical to SEQ ID NO: 4127

SEQ ID NO: 8401 - DNA, 423 bp, Homo sapiens; identical to SEQ ID NO: 4129

SEQ ID NO: 8402 - DNA, 423 bp, Homo sapiens; identical to SEQ ID NO: 4129

SEQ ID NO: 8403 - DNA, 600 bp, Homo sapiens; identical to SEQ ID NO: 4131

SEQ ID NO: 8404 - DNA, 600 bp, Homo sapiens; identical to SEQ ID NO: 4131

SEQ ID NO: 8405 - DNA, 600 bp, Homo sapiens; identical to SEQ ID NO: 4133

SEQ ID NO: 8406 - DNA, 600 bp, Homo sapiens; identical to SEQ ID NO: 4133

SEQ ID NO: 8407 - DNA, 600 bp, Homo sapiens; identical to SEQ ID NO: 4135

SEQ ID NO: 8408 - DNA, 600 bp, Homo sapiens; identical to SEQ ID NO: 4136

SEQ ID NO: 8409 - DNA, 486 bp, Homo sapiens; identical to SEQ ID NO: 4137

SEQ ID NO: 8410 - DNA, 486 bp, Homo sapiens; identical to SEQ ID NO: 4137

SEQ ID NO: 8411 - DNA, 600 bp, Homo sapiens; identical to SEQ ID NO: 4139

SEQ ID NO: 8412 - DNA, 600 bp, Homo sapiens; identical to SEQ ID NO: 4140

SEQ ID NO: 8413 - DNA, 600 bp, Homo sapiens; identical to SEQ ID NO: 4140

SEQ ID NO: 8414 - DNA, 600 bp, Homo sapiens; identical to SEQ ID NO: 4142

SEQ ID NO: 8415 - DNA, 600 bp, Homo sapiens; identical to SEQ ID NO: 4143

SEQ ID NO: 8416 - DNA, 600 bp, Homo sapiens; identical to SEQ ID NO: 4143

SEQ ID NO: 8417 - DNA, 600 bp, Homo sapiens; identical to SEQ ID NO: 4145

SEQ ID NO: 8418 - DNA, 420 bp, Homo sapiens; identical to SEQ ID NO: 4146

SEQ ID NO: 8419 - DNA, 420 bp, Homo sapiens; identical to SEQ ID NO: 4146

SEQ ID NO: 8420 - DNA, 600 bp, Homo sapiens; identical to SEQ ID NO: 4148

SEQ ID NO: 8421 - DNA, 600 bp, Homo sapiens; identical to SEQ ID NO: 4148

SEQ ID NO: 8422 - DNA, 600 bp, Homo sapiens; identical to SEQ ID NO: 4150

SEQ ID NO: 8423 - DNA, 600 bp, Homo sapiens; identical to SEQ ID NO: 4150

SEQ ID NO: 8424 - DNA, 600 bp, Homo sapiens; identical to SEQ ID NO: 4152

SEQ ID NO: 8425 - DNA, 600 bp, Homo sapiens; identical to SEQ ID NO: 4152

SEQ ID NO: 8426 - DNA, 600 bp, Homo sapiens; identical to SEQ ID NO: 4154

SEQ ID NO: 8427 - DNA, 600 bp, Homo sapiens; identical to SEQ ID NO: 4154

SEQ ID NO: 8428 - DNA, 600 bp, Homo sapiens; identical to SEQ ID NO: 4156

SEQ ID NO: 8429 - DNA, 600 bp, Homo sapiens; identical to SEQ ID NO: 4156

SEQ ID NO: 8430 - DNA, 600 bp, Homo sapiens; identical to SEQ ID NO: 4158

SEQ ID NO: 8431 - DNA, 600 bp, Homo sapiens; identical to SEQ ID NO: 4159

SEQ ID NO: 8432 - DNA, 600 bp, Homo sapiens; identical to SEQ ID NO: 4159

SEQ ID NO: 8433 - DNA, 600 bp, Homo sapiens; identical to SEQ ID NO: 4161

SEQ ID NO: 8434 - DNA, 600 bp, Homo sapiens; identical to SEQ ID NO: 4162

SEQ ID NO: 8435 - DNA, 600 bp, Homo sapiens; identical to SEQ ID NO: 4163

SEQ ID NO: 8436 - DNA, 600 bp, Homo sapiens; identical to SEQ ID NO: 4164

SEQ ID NO: 8437 - DNA, 600 bp, Homo sapiens; identical to SEQ ID NO: 4164

SEQ ID NO: 8438 - DNA, 1400 bp, Homo sapiens; identical to SEQ ID NO: 4166

SEQ ID NO: 8439 - DNA, 1400 bp, Homo sapiens; identical to SEQ ID NO: 4166

SEQ ID NO: 8440 - DNA, 600 bp, Homo sapiens; identical to SEQ ID NO: 4168

SEQ ID NO: 8441 - DNA, 849 bp, Homo sapiens; identical to SEQ ID NO: 4169

SEQ ID NO: 8442 - DNA, 849 bp, Homo sapiens; identical to SEQ ID NO: 4169

SEQ ID NO: 8443 - DNA, 600 bp, Homo sapiens; identical to SEQ ID NO: 4171

SEQ ID NO: 8444 - DNA, 381 bp, Homo sapiens; identical to SEQ ID NO: 4172

SEQ ID NO: 8445 - DNA, 381 bp, Homo sapiens; identical to SEQ ID NO: 4172

SEQ ID NO: 8446 - DNA, 408 bp, Homo sapiens; identical to SEQ ID NO: 4174

SEQ ID NO: 8447 - DNA, 408 bp, Homo sapiens; identical to SEQ ID NO: 4174

SEQ ID NO: 8448 - DNA, 599 bp, Homo sapiens; identical to SEQ ID NO: 4176

SEQ ID NO: 8449 - DNA, 600 bp, Homo sapiens; identical to SEQ ID NO: 4177

SEQ ID NO: 8450 - DNA, 600 bp, Homo sapiens; identical to SEQ ID NO: 4177

SEQ ID NO: 8451 - DNA, 569 bp, Homo sapiens; identical to SEQ ID NO: 4179

SEQ ID NO: 8452 - DNA, 569 bp, Homo sapiens; identical to SEQ ID NO: 4179

SEQ ID NO: 8453 - DNA, 309 bp, Homo sapiens; identical to SEQ ID NO: 4181

SEQ ID NO: 8454 - DNA, 309 bp, Homo sapiens; identical to SEQ ID NO: 4181

SEQ ID NO: 8455 - DNA, 105 bp, Homo sapiens; identical to SEQ ID NO: 4183

SEQ ID NO: 8456 - DNA, 600 bp, Homo sapiens; identical to SEQ ID NO: 4184
  misc_feature (575)..(576): n is a, c, g, or t

SEQ ID NO: 8457 - DNA, 600 bp, Homo sapiens; identical to SEQ ID NO: 4184
  misc_feature (575)..(576): n is a, c, g, or t

SEQ ID NO: 8458 - DNA, 600 bp, Homo sapiens; identical to SEQ ID NO: 4186

SEQ ID NO: 8459 - DNA, 600 bp, Homo sapiens; identical to SEQ ID NO: 4187

SEQ ID NO: 8460 - DNA, 1400 bp, Homo sapiens; identical to SEQ ID NO: 4188

SEQ ID NO: 8461 - DNA, 1400 bp, Homo sapiens; identical to SEQ ID NO: 4188

SEQ ID NO: 8462 - DNA, 600 bp, Homo sapiens; identical to SEQ ID NO: 4190

SEQ ID NO: 8463 - DNA, 600 bp, Homo sapiens; identical to SEQ ID NO: 4190

SEQ ID NO: 8464 - DNA, 600 bp, Homo sapiens; identical to SEQ ID NO: 4192

SEQ ID NO: 8465 - DNA, 600 bp, Homo sapiens; identical to SEQ ID NO: 4192

SEQ ID NO: 8466 - DNA, 600 bp, Homo sapiens; identical to SEQ ID NO: 4194

SEQ ID NO: 8467 - DNA, 600 bp, Homo sapiens; identical to SEQ ID NO: 4194

SEQ ID NO: 8468 - DNA, 600 bp, Homo sapiens; identical to SEQ ID NO: 4196

SEQ ID NO: 8469 - DNA, 600 bp, Homo sapiens; identical to SEQ ID NO: 4197

SEQ ID NO: 8470 - DNA, 600 bp, Homo sapiens; identical to SEQ ID NO: 4197

SEQ ID NO: 8471 - DNA, 483 bp, Homo sapiens; identical to SEQ ID NO: 4199

SEQ ID NO: 8472 - DNA, 600 bp, Homo sapiens; identical to SEQ ID NO: 4200

SEQ ID NO: 8473 - DNA, 600 bp, Homo sapiens; identical to SEQ ID NO: 4200

SEQ ID NO: 8474 - DNA, 600 bp, Homo sapiens; identical to SEQ ID NO: 4202

SEQ ID NO: 8475 - DNA, 600 bp, Homo sapiens; identical to SEQ ID NO: 4202

SEQ ID NO: 8476 - DNA, 600 bp, Homo sapiens; identical to SEQ ID NO: 4204

SEQ ID NO: 8477 - DNA, 600 bp, Homo sapiens; identical to SEQ ID NO: 4205

SEQ ID NO: 8478 - DNA, 600 bp, Homo sapiens; identical to SEQ ID NO: 4205

SEQ ID NO: 8479 - DNA, 600 bp, Homo sapiens; identical to SEQ ID NO: 4207

SEQ ID NO: 8480 - DNA, 1400 bp, Homo sapiens; identical to SEQ ID NO: 4208

SEQ ID NO: 8481 - DNA, 600 bp, Homo sapiens; identical to SEQ ID NO: 4209

SEQ ID NO: 8482 - DNA, 600 bp, Homo sapiens; identical to SEQ ID NO: 4209

SEQ ID NO: 8483 - DNA, 1400 bp, Homo sapiens; identical to SEQ ID NO: 4211

SEQ ID NO: 8484 - DNA, 1096 bp, Homo sapiens; identical to SEQ ID NO: 4212

SEQ ID NO: 8485 - DNA, 600 bp, Homo sapiens; identical to SEQ ID NO: 4213

SEQ ID NO: 8486 - DNA, 600 bp, Homo sapiens; identical to SEQ ID NO: 4214

SEQ ID NO: 8487 - DNA, 600 bp, Homo sapiens; identical to SEQ ID NO: 4214

SEQ ID NO: 8488 - DNA, 132 bp, Homo sapiens; identical to SEQ ID NO: 4216

SEQ ID NO: 8489 - DNA, 600 bp, Homo sapiens; identical to SEQ ID NO: 4217

SEQ ID NO: 8490 - DNA, 79 bp, Homo sapiens; identical to SEQ ID NO: 4218

SEQ ID NO: 8491 - DNA, 187 bp, Homo sapiens; identical to SEQ ID NO: 4219

SEQ ID NO: 8492 - DNA, 149 bp, Homo sapiens; identical to SEQ ID NO: 4220

SEQ ID NO: 8493 - DNA, 96 bp, Homo sapiens; identical to SEQ ID NO: 4221

SEQ ID NO: 8494 - DNA, 84 bp, Homo sapiens; identical to SEQ ID NO: 4222

SEQ ID NO: 8495 - DNA, 96 bp, Homo sapiens; identical to SEQ ID NO: 4223

SEQ ID NO: 8496 - DNA, 87 bp, Homo sapiens; identical to SEQ ID NO: 4224

SEQ ID NO: 8497 - DNA, 88 bp, Homo sapiens; identical to SEQ ID NO: 4225

SEQ ID NO: 8498 - DNA, 1400 bp, Homo sapiens; identical to SEQ ID NO: 4226

SEQ ID NO: 8499 - DNA, 600 bp, Homo sapiens; identical to SEQ ID NO: 4227

SEQ ID NO: 8500 - DNA, 284 bp, Homo sapiens; identical to SEQ ID NO: 4228
  misc_feature (104)..(104): n is a, c, g, or t
  misc_feature (107)..(107): n is a, c, g, or t
  misc_feature (110)..(112): n is a, c, g, or t
  misc_feature (118)..(118): n is a, c, g, or t
  misc_feature (125)..(126): n is a, c, g, or t
  misc_feature (128)..(128): n is a, c, g, or t
  misc_feature (130)..(130): n is a, c, g, or t
  misc_feature (132)..(132): n is a, c, g, or t
  misc_feature (135)..(135): n is a, c, g, or t
  misc_feature (137)..(137): n is a, c, g, or t
  misc_feature (144)..(144): n is a, c, g, or t
  misc_feature (160)..(160): n is a, c, g, or t
  misc_feature (162)..(162): n is a, c, g, or t
  misc_feature (165)..(165): n is a, c, g, or t
  misc_feature (176)..(177): n is a, c, g, or t
  misc_feature (186)..(186): n is a, c, g, or t
  misc_feature (189)..(189): n is a, c, g, or t
  misc_feature (192)..(192): n is a, c, g, or t
  misc_feature (196)..(196): n is a, c, g, or t
  misc_feature (200)..(200): n is a, c, g, or t
  misc_feature (207)..(207): n is a, c, g, or t
  misc_feature (209)..(209): n is a, c, g, or t
  misc_feature (214)..(214): n is a, c, g, or t
  misc_feature (219)..(220): n is a, c, g, or t
  misc_feature (224)..(224): n is a, c, g, or t
  misc_feature (229)..(229): n is a, c, g, or t
  misc_feature (236)..(237): n is a, c, g, or t
  misc_feature (248)..(248): n is a, c, g, or t
  misc_feature (254)..(254): n is a, c, g, or t
  misc_feature (261)..(261): n is a, c, g, or t
  misc_feature (263)..(263): n is a, c, g, or t
  misc_feature (268)..(268): n is a, c, g, or t
  misc_feature (275)..(275): n is a, c, g, or t
  misc_feature (278)..(278): n is a, c, g, or t

SEQ ID NO: 8501 - DNA, 600 bp, Homo sapiens; identical to SEQ ID NO: 4229

SEQ ID NO: 8502 - DNA, 221 bp, Homo sapiens; identical to SEQ ID NO: 4230

SEQ ID NO: 8503 - DNA, 600 bp, Homo sapiens; identical to SEQ ID NO: 4231

SEQ ID NO: 8504 - DNA, 600 bp, Homo sapiens; identical to SEQ ID NO: 4232

SEQ ID NO: 8505 - DNA, 214 bp, Homo sapiens; identical to SEQ ID NO: 4233
  misc_feature (60)..(60): n is a, c, g, or t
  misc_feature (62)..(62): n is a, c, g, or t
  misc_feature (81)..(81): n is a, c, g, or t
  misc_feature (83)..(83): n is a, c, g, or t
  misc_feature (118)..(118): n is a, c, g, or t
  misc_feature (165)..(165): n is a, c, g, or t
  misc_feature (167)..(168): n is a, c, g, or t

SEQ ID NO: 8506 - DNA, 600 bp, Homo sapiens; identical to SEQ ID NO: 4234

SEQ ID NO: 8507 - DNA, 1400 bp, Homo sapiens; identical to SEQ ID NO: 4235

SEQ ID NO: 8508 - DNA, 600 bp, Homo sapiens; identical to SEQ ID NO: 4236

SEQ ID NO: 8509 - DNA, 237 bp, Homo sapiens; identical to SEQ ID NO: 4237

SEQ ID NO: 8510 - DNA, 600 bp, Homo sapiens; identical to SEQ ID NO: 4238

SEQ ID NO: 8511 - DNA, 600 bp, Homo sapiens; identical to SEQ ID NO: 4239

SEQ ID NO: 8512 - DNA, 600 bp, Homo sapiens; identical to SEQ ID NO: 4240

SEQ ID NO: 8513 - DNA, 1400 bp, Homo sapiens; identical to SEQ ID NO: 4241

SEQ ID NO: 8514 - DNA, 600 bp, Homo sapiens; identical to SEQ ID NO: 4242

SEQ ID NO: 8515 - DNA, 600 bp, Homo sapiens; identical to SEQ ID NO: 4243

SEQ ID NO: 8516 - DNA, 600 bp, Homo sapiens; identical to SEQ ID NO: 4244

SEQ ID NO: 8517 - DNA, 600 bp, Homo sapiens; identical to SEQ ID NO: 4245

SEQ ID NO: 8518 - DNA, 1400 bp, Homo sapiens; identical to SEQ ID NO: 4246

SEQ ID NO: 8519 - DNA, 600 bp, Homo sapiens; identical to SEQ ID NO: 4247

SEQ ID NO: 8520 - DNA, 600 bp, Homo sapiens; identical to SEQ ID NO: 4248

SEQ ID NO: 8521 - DNA, 600 bp, Homo sapiens; identical to SEQ ID NO: 4249

SEQ ID NO: 8522 - DNA, 93 bp, Homo sapiens; identical to SEQ ID NO: 4250

SEQ ID NO: 8523 - DNA, 1400 bp, Homo sapiens; identical to SEQ ID NO: 4251

SEQ ID NO: 8524 - DNA, 600 bp, Homo sapiens; identical to SEQ ID NO: 4252

SEQ ID NO: 8525 - DNA, 600 bp, Homo sapiens; identical to SEQ ID NO: 4253

SEQ ID NO: 8526 - DNA, 91 bp, Homo sapiens; identical to SEQ ID NO: 4254

SEQ ID NO: 8527 - DNA, 600 bp, Homo sapiens; identical to SEQ ID NO: 4255

SEQ ID NO: 8528 - DNA, 600 bp, Homo sapiens; identical to SEQ ID NO: 4256

SEQ ID NO: 8529 - DNA, 1400 bp, Homo sapiens; identical to SEQ ID NO: 4257

SEQ ID NO: 8530 - DNA, 600 bp, Homo sapiens; identical to SEQ ID NO: 4258

SEQ ID NO: 8531 - DNA, 600 bp, Homo sapiens; identical to SEQ ID NO: 4259

SEQ ID NO: 8532 - DNA, 600 bp, Homo sapiens; identical to SEQ ID NO: 4260

SEQ ID NO: 8533 - DNA, 1400 bp, Homo sapiens; identical to SEQ ID NO: 4261

SEQ ID NO: 8534 - DNA, 600 bp, Homo sapiens; identical to SEQ ID NO: 4262

SEQ ID NO: 8535 - DNA, 1400 bp, Homo sapiens; identical to SEQ ID NO: 4263

SEQ ID NO: 8536 - DNA, 1400 bp, Homo sapiens; identical to SEQ ID NO: 4264

SEQ ID NO: 8537 - DNA, 1400 bp, Homo sapiens; identical to SEQ ID NO: 4265

SEQ ID NO: 8538 - DNA, 1400 bp, Homo sapiens; identical to SEQ ID NO: 4266

SEQ ID NO: 8539 - DNA, 600 bp, Homo sapiens; identical to SEQ ID NO: 4267

SEQ ID NO: 8540 - DNA, 120 bp, Homo sapiens; identical to SEQ ID NO: 4268

SEQ ID NO: 8541 - DNA, 87 bp, Homo sapiens; identical to SEQ ID NO: 4269

SEQ ID NO: 8542 - DNA, 600 bp, Homo sapiens; identical to SEQ ID NO: 4270

SEQ ID NO: 8543 - DNA, 331 bp, Homo sapiens; identical to SEQ ID NO: 4271

SEQ ID NO: 8544 - DNA, 102 bp, Homo sapiens; identical to SEQ ID NO: 4272

SEQ ID NO: 8545 - DNA, 1049 bp, control sequence
atggctcaccgcccacgctggacattgtcgcaagtcacagaattatttgaaaaaccgttgctggatctgctgtttgaagcgcagcaggtgcatcgccagcatttcgatcctcgtcaggtgcaggtcagcacgttgctgtcgattaagaccggagcttgtccggaagattgcaaatactgcccgcaaacgtcgcgctacaaaaccgggctggaagccgagcggttgatggaagttgaacaggtgctggagtcggcgcgcaaagcgaaagcggcaggatcgacgcgcttctgtatgggcgcggcgtggaagaatccccacgaacgcgatatgccgtacctggaacaaatggtgcagggggtaaaagcgatggggctggaggcgtgtatgacgctgggcacgttgagtgaatctcaggcgcagcgcctcgcgaacgccgggctggattactacaaccacaacctggacacctcgccggagttttacggcaatatcatcaccacacgcacttatcaggaacgcctcgatacgctggaaaaagtgcgcgatgccgggatcaaagtctgttctggcggcattgtgggcttaggcgaaacggtaaaagatcgcgccggattattgctgcaactggcaaacctgccgacgccgccggaaagcgtgccaatcaacatgctggtgaaggtgaaaggcacgccgcttgccgataacgatgatgtcgatgcctttgattttattcgcaccattgcggtcgcgcggatcatgatgccaacctcttacgtgcgcctttctgccggacgcgagcagatgaacgaacagactcaggcgatgtgctttatggcaggcgcaaactcgattttctacggttgcaaactgctgaccacgccgaatccggaagaagataaagacctgcaactgttccgcaaactggggctaaatccgcagcaaactgccgtgctggcaggggataacgaacaacagcaacgtcttgaacaggcgctgatgaccccggacaccgacgaatattacaacgcggcagcattatgagctggcag

SEQ ID NO: 8546 - DNA, 1049 bp, control sequence; identical to SEQ ID NO: 8545

SEQ ID NO: 8547 - DNA, 1049 bp, control sequence; identical to SEQ ID NO: 8545

SEQ ID NO: 8548 - DNA, 748 bp, control sequence
atggcaacggttaataaacaagccattgcagcggcatttggtcgggcagccgcacactatgagcaacatgcagatctacagcgccagagtgctgacgccttactggcaatgcttccacagcgtaaatacacccacgtactggacgcgggttgtggacctggctggatgagccgccactggcgggaacgtcacgcgcaggtgacggccttagatctctcgccgccaatgcttgttcaggcacgccagaaggatgccgcagaccattatctggcgggagatatcgaatccctgccgttagcgactgcgacgttcgatcttgcatggagcaatctcgcagtgcagtggtgcggtaatttatccacggcactccgcgagctgtatcgggtggtgcgccccaaaggcgtggtcgcgtttaccacgctggtgcagggatcgttacccgaacgtcatcaggcgtggcaggcggtggacgagcgtccgcatgctaatcgctttttaccgccagatgaaatcgaacagtcgctgaacggcgtgcattatcaacatcatattcagcccatcacgctgtggtttgatgatgcgctcagtgccatgcgttcgctgaaaggcatcggtgccacgcatcttcatgaagggcgcgacccgcgaatattaacgcgttcgcagttgcagcgattgcaactggcctggccgcaacagcaggggcgatatcctctgacgtatcatctttttttgggagtgattgctc

SEQ ID NO: 8549 - DNA, 748 bp, control sequence; identical to SEQ ID NO: 8548

SEQ ID NO: 8550 - DNA, 652 bp, control sequence
aaacgttattttgtcaccggaacggataccgaagtggggaaaactgtcgccagttgtgcacttttacaagccgcaaaggcagcaggctaccggacggcaggttataaaccggtcgcctctggcagcgaaaagaccccggaaggtttacgcaatagcgacgcgctggcgttacagcgcaacagcagcctgcagctggattacgcaacagtaaatccttacaccttcgcagaacccacttcgccgcacatcatcagcgcgcaagagggcagaccgatagaatcattggtaatgagcgccggattacgcgcgcttgaacaacaggctgactgggtgttagtggaaggtgctggcggctggtttacgccgctttctgacactttcacttttgcagattgggtaacacaggaacaactgccggtgatactggtagttggtgtgaaactcggctgtattaatcacgcgatgttgactgcacaggtaatacaacacgccggactgactctggcgggttgggtggcgaacgatgttacgcctccgggaaaacgtcacgctgaatatatgaccacgctcacccgcatgattcccgcgccgctgctgggagagatcccctggcttgcagaaaatccagaaaatgcggcaaccggaaagtaca

SEQ ID NO: 8551 - DNA, 652 bp, control sequence; identical to SEQ ID NO: 8550

SEQ ID NO: 8552 - DNA, 1032 bp, control sequence
atgtccaatttactgaccgtacaccaaaatttgcctgcattaccggtcgatgcaacgagtgatgaggttcgcaagaacctgatggacatgttcagggatcgccaggcgttttctgagcatacctggaaaatgcttctgtccgtttgccggtcgtgggcggcatggtgcaagttgaataaccggaaatggtttcccgcagaacctgaagatgttcgcgattatcttctatatcttcaggcgcgcggtctggcagtaaaaactatccagcaacatttgggccagctaaacatgcttcatcgtcggtccgggctgccacgaccaagtgacagcaatgctgtttcactggttatgcggcggatccgaaaagaaaacgttgatgccggtgaacgtgcaaaacaggctctagcgttcgaacgcactgatttcgaccaggttcgttcactcatggaaaatagcgatcgctgccaggatatacgtaatctggcatttctggggattgcttataacaccctgttacgtatagccgaaattgccaggatcagggttaaagatatctcacgtactgacggtgggagaatgttaatccatattggcagaacgaaaacgctggttagcaccgcaggtgtagagaaggcacttagcctgggggtaactaaactggtcgagcgatggatttccgtctctggtgtagctgatgatccgaataactacctgttttgccgggtcagaaaaaatggtgttgccgcgccatctgccaccagccagctatcaactcgcgccctggaagggatttttgaagcaactcatcgattgatttacggcgctaaggatgactctggtcagagatacctggcctggtctggacacagtgcccgtgtcggagccgcgcgagatatggcccgcgctggagtttcaataccggagatcatgcaagctggtggctggaccaatgtaaatattgtcatgaactatatccgtaacctggatagtgaaacaggggcaatggtgcgcctgctggaagatggcgattag

SEQ ID NO: 8553 - DNA, 1032 bp, control sequence; identical to SEQ ID NO: 8552

(The sequence listing continues in the following parts.)
